United States Patent Application Publication US 2011/0014706 A2 - sequence listing, part 42

SEQ ID NO: 125327 - DNA, 478 bp, Arabidopsis thaliana columbia
acgactcactttttggaaagctggtacgcctgcaggttccgggtccggtaattccaggggtcgacccacgcgtgcggagagacagagcaagttcagatttcaaccttctcaaaatgatacaccctagttccgtagctctacttgtgggaaaggcggttgggaatcaaatggggagccagtgtttcgatcttttccaaactttattacacctgaaggggcccccctttgtttctctccaggtaggccaggattcctgtggcaagacgtatgccgattaactcatagttatatcttaatggacaaaattactcaaaagacaatacatggcgggaccaatccatatctctcatttagtatgaagcttccccattttgcctcaaacaatgttcacctcgattacaaggcttcagatatttattatattctaatcaacctttaagtctgtttgtatgtatagaacatctcgttactgcaggct

SEQ ID NO: 125328 - DNA, 251 bp, Arabidopsis thaliana columbia
  unsure (1)..(251): unsure at all n locations
gcacgccgtacgcnnnaagctatggactcctccttagagcaggctcgcnnccttttgttatttgtttgttcttttctcaacaccacaatttttctcgtgcattggcgcatacacaaagttgttctcttgggatagtgtctcagctcaccattaactgcataaacaattacgcattcgcggttgttataaccatttcatgttacataccatagatcgatagagaaacctgtggaaaaataaatataccagag

SEQ ID NO: 125329 - DNA, 334 bp, Arabidopsis thaliana columbia
actatagaagattatgacgtcgcatgcacgcgtacgtaagcttggatcctctagagcggccgccctttttttttttttttttttttttttttctttttttttttttgtttgaaaggggggccgggaggcccgcaaagcccgtgaaagaggcccgcgaagccgggcgccaaaggccaaaaagcccgcgaacacggaggacgggcccagaaagcacgacaaaaaactttttttgaatgggggggcggccgactgaacgcggaacggggcaggagaaaagaggaaacggccaatctgggaggggtgggggccgacaagtccgggaggaaccgagggg

SEQ ID NO: 125330 - DNA, 505 bp, Arabidopsis thaliana columbia
  unsure (1)..(505): unsure at all n locations
tacgactcacnctaaggaaagctggtacgcctgcaagtaccggtccggaattcccgggtcgacccacgcgtccggccacgcgttcgtgacaattaaccttgaccttaagagaggaggaaaccggagggtcttgaaaactgggggttacagacactttggaagaaacgaccctgactttacctgggaagtcgtcaagccacttcagtgggacaaaccttaagcctaaattttacctactctggttctggcttcattccaaaaaccaattatttgcttacttttttatttcctctggtttctgggggttaattgagttatggatcaatggccttgagccttttcaatttgggtggttggttttatgggcaacttttaaaaataaaaaagtcgtactaaatatttatgtattacgctgaatttgggtcgcagtgtttatgtttccgtgttttggtggggcgtttttgaggagcccaaacctttttatagggggcaacctaaattaaat

SEQ ID NO: 125331 - DNA, 507 bp, Arabidopsis thaliana columbia
gacgtcgcatgcacgcgtacgtaagcttggatcctctagagcggccgccctttttttttttttttttttttttttaacgaacaccattatttttcagctgttacggacatcgatccaagtggttttcacgcattagaagacttatacaagtctctccagaaaagagacattcaggtccatacatatttacacacatactgaattctttaaggattataacctaagcactcaaagggaattagttgaagaagatttacctgactttgtgttgtgtgatgataaacaggtgattttggcgaatcctggaccgtgggtgataggcaagctacccttgtctcactttgcccacatgttaggacaagacaatatctatctacaggggggctgatgccgcccaggctagttgtccaaaactcttaaaggaggtctggaatttcccagggacgatgagcaccaagcaactggcgatactgcccacgaaaaacgaagatttgcccttttaaatgt

SEQ ID NO: 125332 - DNA, 489 bp, Arabidopsis thaliana columbia
ttagcctgggttcctttgagcgggccgcccttttttttttttttttttaaccagaaagatttttccggttttagcctcaattaagcctctggttcccattccacaattcttaaaatttaaagtttttcccctcgagaattccttttttttttttttttgtagaggaaaaaacaaacccccccccgaggaccttttcttttaggaccaaactctttgaccagagagggttttttccaaccagccaacccagtattaaggattttagaccaaccccaaggggatggggtaaagccaggtagctttgaaacatggtccaaggagggtaagttggggcggaaactcgggaaaccgccctttacccgacaaccgatggagaattcccaacacttcttgttaaaagttccctgtaagtccttgaacttagacgattggctaaaaacaccggaagacccagaatggttgtcattgtcctccaccccatagttcgga

SEQ ID NO: 125333 - DNA, 511 bp, Arabidopsis thaliana columbia
gactgacctagggggagctgctacgcctgcaggtaccgggccggaattcccgggtccgcccacgcgtgcggccacgcgtacggttttttggtgtcctctctttccaaattcatcatgagattcagatctctcatcctcttcttttacttctcttcttcacctcattctgttaccctcgattcggctgcctaaacccatcttcaaccagtttaatcttcgatggaatcgacagggggtcaaatctcgccggttccgggtcgggtatcaagtcggttgtttcagcttcggctgaagaaaaggaggaagcttgggagcaaacataccggtttatgccctgtacctagacccgctctggaaacctgtttctgattttgggttatgggattctcatgtttaccggctgcgacttttctctcttgtggaagtgagcttcttcttgagatccctgggccccggaaaaggcgggtgtttggttctttccgtgcctggtgctccttccgaacctttgctt

SEQ ID NO: 125334 - DNA, 442 bp, Arabidopsis thaliana columbia
  unsure (1)..(442): unsure at all n locations
gcactcgtacgtaagctaggatcctntagagcgttgcgnggggagggggtagggcgnnnnaaanaaaannaannaaaggggagggggggaaccttaatactaatagagggaaggataaagaaacaacccgctaaaccagatattcacatataaaccggttaaaggggagactggggagtacaacnacattaactttcctctgggaggtggganannnanaagatactntatgactaaaaacaaccccaaattaaggggggggaggacgatacaaaaggggccggcggatggaacactaccacaaaaaagtgcccacggaccgaggtgcgactttaaagggaagtggaaaaaagcaacaactgactggtcccgaaggaggggaccaagagcaaggttttagaaagataccgttcccggaaaaagctgcacggggttataaaat

SEQ ID NO: 125335 - DNA, 518 bp, Arabidopsis thaliana columbia
gacgtcgcatgcacgcgtacgtaagcttggatcctctagagcggctgcttttttttttttgtttttttttttttttttactaaagagattattccttttgaattaaaatgaatagtcagattgtttacagatttcagtctttacagatacaaagagactacttcactccagagactgatttatctctttgggggaggcaattattgtttatgacagggttaaacttacaagctcattgtctcaggcaaactcagctccagaaagtaaagactcgcagacatacatgccatgccaaaaaacacagctttcacagcttgtttctgtcccgcataatcaaatgccaaaggaagcatttcgtgcaatgttaggaaagccatgattccaccaactgctcccaacaaaccttcaaggatttctggacttaagcttctcgggaatagataggccacgataattacacctagaggctcagctaaaccagagagtgttgccaacttaaatgcctgccatttgctttc

SEQ ID NO: 125336 - DNA, 520 bp, Arabidopsis thaliana columbia
  unsure (1)..(520): unsure at all n locations
nnnnnnnnnnnnnnnnnnnnnnnnnnnnnnnnnnnnnnnnnnnnnnnnnnnnnnnnnnnnnnnnnntnnnggttttttttttttttttttttttttgcataataaagtatttgataaacgttcaataacaatggcttaaaatgagtttcaagcgtatataatccataataactggatcaaatagatatacaaacacataaactgataaacgcaaagtcctttctagtacctgcttgcatttcccacaccaaagagccaaacacaccttggcttaaaccacaaaccccatttaaattttttttgccctttccctttaaaaaaaatttttctttttttaaaaaaaaaaaaactttccccataaaaaaaaatccctttttttcaaaaatattttttttccctcttaaaaaatttacccggaaaaacccctttttttttccccaattttttttaaaaatttctcgggaaaaagggggaggtgttttttttttataaaaaaaccccctttaaaaaaataaaaaaa

SEQ ID NO: 125337 - DNA, 496 bp, Arabidopsis thaliana columbia
  unsure (1)..(496): unsure at all n locations
cacgcgtacgtaagcttggatcctctagagcggttgcncngnggggngggggcnnnnananaanangggaacaacaggncggaggganagaacaggggaaacagaggggacaaacacacaaaggacacaaacccccaaacggaagaacaagacgaaagaagccaagcggcacaaggcgggggcggaaaaaggnngctcttctagaagatgcacacannnnnagncnagccngcgagaaaaggccctcccttgggggaggggggaaatgaacttgcgataaagcaacctgtgacagcttttttagataggaaaccatcttgggccgtagcaagaatatagagtaggatccattcaactttgttggaaagccatccaaaaggatcgattggcattcgatttggctcgggtacatttcaaacctctttgaatgataactattctttaaccggtagcgcgtttgtggtaaattggttctcgaggtggacgggaacatacc

SEQ ID NO: 125338 - DNA, 511 bp, Arabidopsis thaliana columbia
agattatgacgtcgcatgcacgcgtacgtaagcttggatcctctagagcggccgctttttttttttttttttttttttttttttaaaaaacaaggagtttttggtttaaggacaaatcttccaaggtcttggcaaattaacatctggaaagtttttaccatccaccaaaaacacaaacctactttttttcctccggtctttaactcgatttcaaatttttgaaggaaaggtaatttccaaccagttggacctgggctcactttccgggaacaaagttgggggcaaaggcccaacctttgttgttggctggatcggccaaatggtcagaaaggttttttatcggtcccttaccagggacaatggcttgaacaaaaattccaaacttagaaaacttggccaatcttccgtttttgagctcctttaccttaaactaaggaaaggcctttgggtcggtagccaaccccaatgggtcaaacctgccaccggggtaaagcaagtcctgggcctttcc

SEQ ID NO: 125339 - DNA, 532 bp, Arabidopsis thaliana columbia
  unsure (1)..(532): unsure at all n locations
nnnnnnnnnnnnnnnnnnnnnnnnnnnnnnnnnnnnnnnnnnnnnnnnnnnnnnnnnnnnnnnttttttttttttttttttttttttttttttcacacaaaacgctcacacactctgaaaagagcttgttcacttgttcctcacacaagcataacgaagaactctgtgactcatacacaacacgagagctgtgttcttattacagcgaccagtgttttataacattttaaaggggatgctgaactcactggcactgaagtcaaatggttgaaaaatttgctgaagcaaaagcagtcttgagggcctaaagtgtggcacttacagatctccaagacacaagatgggtcatgaatgtctttatgtaaaccggtctatagttctggaagtcaagggtataagcatgctgccagacatgaatggtgagccatgggaatgagccaagcacaaggggattcacaggcttgggagttgtcactactgggagtcttgtatttgaatgaacaagccaggcccagacattttcaaactgaag

SEQ ID NO: 125340 - DNA, 455 bp, Arabidopsis thaliana columbia
  unsure (1)..(455): unsure at all n locations
atgacgtcgcatgcacgcgtacgtaagcttggatcctctagagcggccgctnnnntggttnnngtnnnnnnnnnnnnnnnagaggtactgatctaagaatgcattctctaaaccatgatcatcaactggtatttggttcaaaacattgaaaaacagaattccgaagatttaaaatagtccccaacctcaaaaccagaacttaggagttttggttttttaaaagaccttaaggtttttttaaaaaaggttttaaggtttaaaattaaaaaaccccggattctttttgaaacattttttttataacttttgggggggcccccttcaaaaaggggtctttggaggggaaaaccccccggaaaaaatgggcccctcttttttttcttaaaagtgttaaagaccccccctttttccaaaggttaaaaaaaaaaaaaaggggtgttcggcttttttaaaaa

SEQ ID NO: 125341 - DNA, 360 bp, Arabidopsis thaliana columbia
  unsure (1)..(360): unsure at all n locations
atgacgtcgcatgcacgcgtacgtaagcttggatcctctagagcggccgctnnnntggttttttttttttttttttttttaacagtataaataggatttcttgatttatgtattctgcaaccaaataaaccaaaaggtaacacaaagaagacataatcaaatcaaacaactctctactagtctaatcacagaatctgatgctttctttttctttccataaaaaacacaggcaacaaaagagatgtggatgaaggaatgttacaaaacagaagaggttttattcactttcaagtgaagagtcctgatcaagattcgttcccacaacaagaaccgggtctggcgcacgcccatgaaccctga

SEQ ID NO: 125342 - DNA, 552 bp, Arabidopsis thaliana columbia
  unsure (1)..(552): unsure at all n locations
acgaattctannnnnnnnnnnnnnnnnnnnnnnnnnnnnnnnnnnnnnnnnnnnnnnnnnnnnnnnnnnnnnnnnnnnnnnnnntntttttttttttttttttttttttttttttagagataaccgatttgatcagacaagaagagaaggagaaagacaaagtgcttggatagcagtaattataataacatcgacatcaacagattacaacgcaagtctttcttcattaaccgagcttggcaagaacattgttcaaactcgagacagtttctgagtaatacttctcagcatctgggctactctttgatctcgccgcatagtccaagttgtcaatggtttggaaaagctttgcggtgagatctttaaagctttgcttctcttccttaggcttagcggagataacggtgttgagatcgtaacggaggtacgatgctcttaaacggagatcgttctgaacatagggccaagcttttttgtcgataaatgacttaacgttgatgatctctttagcagaatctttggctctagctgcagcttctgttggtgacaatg

SEQ ID NO: 125343 - DNA, 550 bp, Arabidopsis thaliana columbia
  unsure (1)..(550): unsure at all n locations
cgattcctattaggaacnnnnnnnnnnnnnnnnnnnnnnnnnnnnnnnnnnnnnnnnnnnnnnnnnnnnnnnnnnnnnnnnnntttttttttttttttttttttttttttttggaaaccacgcattactatatgtatatgtatgtatattcataaccaaaacatcccaaaagatagattatctgaaacgtaattatacataacccacaataagatagaaaacagatctatctagtagctgaaccacacaacatgagtctccgtcaattcctttaagtttcagccttgcgaccatactccccccggaacccaaaaactttgatttctcataaggtgccagcggagtcctataagcaacatccgctgatccctggtcggcatcgtttatggttgagactaggacggtatctgatcgtcttcgagcccccaactttcgttcttgattaatgaaaacatccttggcaaatgctttcgcagttgttcgtctttcataaatccaagaatttcacctctgactatgaaatacgaatgcccccgactgtccctgttaa

SEQ ID NO: 125344 - DNA, 530 bp, Arabidopsis thaliana columbia
  unsure (1)..(530): unsure at all n locations
nnnnnnnnnnnnnnnnnnnnnnnnnnnnnnnnnnnnnnnnnnnnnnnnnnnnnnnnnnnnnnnntttttttgtttttttttttttttttttttagaattactagtaatctagtatttataaaccaaaacctcaggcttggattcgaacacccatacaaaatcttttggatacatacaacattactcccatagatatatatattcactcacgagcaataacaacttcttgttttgcaacgttcttaccatggaagagtcccacaagagcttcaggacctttctcaagcccatcagctacatcttccacgtacgtgatcttcccttctttaatgtgcggaagcacaaaatccaagaactttgagtatttctcgtagaaatcaaacactgcaaagccttgaatgcggattcttttgtagattatgttggataggttgtgtacaccttcttggttttcaagattgtactgtgagatcattccacacacagcgatacgtccgtgtgggttcatgtttaatagcactgcgtctagc

SEQ ID NO: 125345 - DNA, 536 bp, Arabidopsis thaliana columbia
  unsure (1)..(536): unsure at all n locations
nnnnnnnnnnnnnnnnnnnnnnnnnnnnnnnnnnnnnnnnnnnnnnnnnnnnnnnnnnnnnnnnnnnnnnnnnttttttttttttttttttttttttttttttaaaactgaaaatcctcaacggttagattaataaaagtatatatcaaatcatcatttaatgaagcaaaaatactctgctctaagagaaaaaaaggaaataaaccaagaaacgaaaaatatatcacgctcttgttcttcttcttcttcattcttgagaaatcaccttcatcttctttcttcttcgagaaacgaaaaataaacaaaaacatctctttctctttttaatacctgatcgcgggatgaatgatgattcgtgattggttgaattacttctcccacatcctctatgtcagccccaatcgatgatgatttcagaacacaagcggagaaggaagagattgggggcagtgaaagcgaagagcacctaggaaggttttgatctcgacctaggaggaactctaacatgaggaagaaaccccaatcaaagaatccat

SEQ ID NO: 125346 - DNA, 494 bp, Arabidopsis thaliana columbia
tggcgtcgactgcacgcgtacgtaagcttggatcctctagagcggtcgcccttttttttttttttttttttttttttttttttttttttttttttttttttttttttttttttttttttttttttttggggggaaaattaaatgttatttgtttttgagcctgaaaatcggtacatttttgaagcttgaaacccaaaaggaaaaaattatttctgggtgtaaagttttcggggagaaaaccatttggtaaaaatagttgatggaaactgtttttggtgaggcaaaaacattcctttggtcttttggtgacccgatgatcccattttggcaaggagtttaactgcttttggatcaaacaaaaatgtcttttggaatgactgaaaaaaacctgtggggattattgttacatgaatttttccggggtagcaatcatccacaaaagttccaaatatgatgttggcccatgggtttgccaaacttgtgacaacctgtga

SEQ ID NO: 125347 - DNA, 504 bp, Arabidopsis thaliana columbia
tgacgtcgcatgcacgcgtacgtaagcttggatcctctagagcggccgccctttgggtttttttttttttttttttttagagacttcaacatgtataatagatacaactcaaaatgcgtctttaatattacagcgaacgaaaacagagtataaggtctaacgtcaagagaaaaaaacagagcattgacaccaaagcaagcagaaggcttttgtttatggtaaaaaccgaatgaggacgagtcgtggcatctgtcatccccggaacatcccattgaacacaaaggcgttcccatcagcattttcagatatctgtagcgccgagacagcctgagcagcaatcaaatcagctgatattcccatgttgttatcccaagcacccctccttgtgaatggcgaccaggtactatcttctagtccatagccatttgacacaaacccaatcccttgaaccgcatagctagcacagctttggcgaggaacgtaattagttctttcattttaaac

SEQ ID NO: 125348 - DNA, 518 bp, Arabidopsis thaliana columbia
  unsure (1)..(518): unsure at all n locations
actctcgaagacttatggcgtcgactgcacgcgtacgtaagcttggatcctctagagcggtcgccctttgggtttggttttactgaatgccaaacaaaactcaaaactggtacaaccgatctaacattctcataacaaaacgatacgctaagggggggcctaaaaacatgaaacatataactaacaacaagagactccatcagaacaagagaacacaaatttttttttggaggagaatnaatcactgaactccggcgaaaagaagcactgcaagatacagagattcccgagttgttgttgagaccttctcggaaccctgaatccgactcataacgagaccatcccactgatctctgagctggacgtacgaactgagaaataccttctctgacaaacaggacgttgaggcggatagcagaggattgggcacaaaatcttgcattagaagggacaggcaaacttaaagacacccccctataagccattaaatcactgtacggacccagtggttgtgggat

SEQ ID NO: 125349 - DNA, 510 bp, Arabidopsis thaliana columbia
gagctatgacgtcgcatgcacgcgtacgtaagcttggatcctctagagcggccgcccttttttttttttttttttttttttttttttttttttttttttttttttttttacgagggcatgaagcacatttttcagaaagtttaaccgaccgactcataaacgccaaatccaaaaaaaaaaaaaaaaaaaaacgttggggtttccaatcacttattttttagggaaaagtccagccattgggattttagcctcaatctggaattcttcgtcttctccatttttggtcttcctataatccactttgaaatcataatctccgaccatgaaatcctcctaataagctccaggtttcttaggtttcttcctctttttcttctttggtttctgtggctttggattaaacatgctttccggtgggtatagtttgacgttttgcctccccgactttgatttctccttcgattttactgccttttactcctactaccctccaattgacttatcataatc

SEQ ID NO: 125350 - DNA, 495 bp, Arabidopsis thaliana columbia
gcacgcgtacgtaagcttggatcctctagagcggtcgcccttttggtttggggttttttttttttttttttttttttttttttttttttttttttttttttttttttttttttttttttttttttttcccaaaaaaggggaagcttttttccaattgaattttaggcaaggaaggggtttaagtttttcaaaatttttttttggggggggggttaaaaaaaccaggggggttttgaggaaaacctccttggggggcttctttttattccccctttgggggggagaggcaacgttggggcaaaaaacaagttctttgaatgaaaaatcggccctttggctgttaagggcttttttggggttccaaaacaaaaatgggcctgtaaaaggcattccttggttgaacgggaacggcgtaaaatgggaccagaaggggggaggaactaaaaccaacttttcagggtccaaaaggaccagggttgggaatcaaaccccgga

SEQ ID NO: 125351 - DNA, 601 bp, Arabidopsis thaliana columbia
  unsure (1)..(601): unsure at all n locations
gggagacacacacaaagaggagcgcaggaggaaaagaagacaaagacacacaccgcccgcccgcaccccgaggaaaaagaccaaacccaaacaagagagcccagaaacccacgaagaagcgagaaacagccccgcaccccaaacaaacaaacgaaacgccccgcaccgccacgacgaaaaacacagaccacacgccgaggaacccacgaagaaggggggggccagaccaaaaagcacaagcagaagaaggcacgaagacgacaaaaaaaaacaccccacccgcccaaaggaaagaaaagcacagaaaccgacggcccgcaaagacaacccgcagcggccacgagagagggccgcacgagagaccgagaccaaacaaaaagagcaaagaccaagccccgagcacaacaangccaacggagggacgagaacaagaagcgcagacgcgacaaacaacacccacaccgaacgcgccgcaccccccgggggaagagcccggagacccgaagacgcgaaaaaacggggggaaaaaagcacgccccacgccccgaaaaaaagagacagaacggcgcaagcgaaccaccaggcaaggcgccccccacgg

SEQ ID NO: 125352 - DNA, 533 bp, Arabidopsis thaliana columbia
ccaaaatttacgggaacatacaagcagccggagatccccccctgcgaaaaagcctccccgggggggccggggttagacgacagaaagacacgaggaaagaagaggagagcccgccgcgcggcgaaacaaaaaacaccgaaaacaaggaagaccgccgagaggggaggccgcgccccccccagagagagccgccgcccgaagcggagaacagcggcagctaagtttttggggggggggccaccggaccgacgccggagagacagacggaaagagcagcccaccgccacgagaagggagacgacgctgagcccaaggggagggccggacgagaaaagacggaaggaagacggaccgcgacagagccgacccccgcccgccccacacccaagacagacaaaagaaaggagaggccaggacacccagaggagagggccccccgggaggagccgagaccgaagggaagccccggcgcgagacgcgccgcccccccgaaaaaacaacgacccaccgcgcgccccaaagaaccccacaag

SEQ ID NO: 125353 - DNA, 612 bp, Arabidopsis thaliana columbia
  unsure (1)..(612): unsure at all n locations
ggggggaaaacaaaaacccaaaaaccaccccaaggcagggaaggcttgaggaaggggccccgggcgcaagcgcgggggggaggggacggagaaaagggaggcgaaaagccccaccggaggaggaaaaaaaaaaccacccgaaccgaagcgagaaaacacccacgggaagagaaggggccggccccgcaccaaaggggcgcagagccgcgccagggagagacagacgcggcggggaagacgccctttttttagagagggggcaggcacaggaacgaaagacgagcccgagcgagggagagaaccgccgccgcccggagaggaggagggggacaggcgagaggccgcaggaaaaagggacggacgacagaggggaggaggcgcaggagaagcggccccgaaaaacgaaagcggaggccgggcaacaacagagagagacgcgacggagacaaaggcgcgggagagagagggcgcggagggcgggagcggaggagcccgcacggccgnacagaaaaggcccaaagcccagaaagagaaagggccgggggcaagacgccccgcacgccggccgaaaaaaaagcgacccccggcaggagccacccaaagaaggcaccg

SEQ ID NO: 125354 - DNA, 669 bp, Arabidopsis thaliana columbia
  unsure (1)..(669): unsure at all n locations
agcccaaaaacaattaacggggaaaaaaacaaagaggcccccagaaaaggcccccgcagggccggaaaacaacaccccacagaaacacacgcgggagaagcgcggcgacggcggcgcggcggggagagaaggagcgcaaaccgcccccccgccaccgcgaaaagaaaaagaaacccgaaaccaaaccaaagcccccgaaaggaagaagagccgacgccccacacaacacaagcaagccggccccgcgccacacagaagaaagcgcgacgacaacgcgaaagacatacaagaagagggggccaaccaaggaagccaaggaagagcaagcgagagccgcgagaaagaaaggacccccgccgcccgcacgcaaagaacaaacccgcacagcggaggccacaacgagagcagcgaggagagagacaacaggaacacgagaagcagacagacacccaaagcagaaaggagaggcggccaggaagggacggacgagacgccgacaaagaaaaaagacgaaaaaaagagagccagcaaaacgcccccacagganagcgccccgcggcggcgaagagacccaagagccgaacccgaaaagacgccgcagaagacacccccccaccagcgaaaaaagaggaggaggccgccgagggaggggcaaagagaccaccccac

SEQ ID NO: 125355 - DNA, 508 bp, Arabidopsis thaliana columbia
cccatacgactcactatagggggagctggtacgcctgcaggtaccggtccggaattcccgggtcgacccacgcgttccgccacgcgttcggtgaactttcgtctttattaaccctttcgacgaccagtggagaagaaagcgagaccaagaagccaagatggtcagaaaccaattccaccccgatggttccacctggagttcaaccgggcggttattccaagtggaattctccatgggagccgtgaagccaggatctggagcaattggacttaaaacttggtcttatggtggtcttgcttggggttaccaagcttaattggagctttctttggattaaaaggagaacttttaaggcgattaccattttcggtggtgcgcatcggtggttttacaggccaccggtgggtgttggtttgggatttgaaaaccggattcattaattacttctttacctaagaagtttctctttccggtgggtcggtttggtggtcaatttgggcgataaagc

SEQ ID NO: 125356 - DNA, 479 bp, Arabidopsis thaliana columbia
  unsure (1)..(479): unsure at all n locations
agctactacgcctgcaggtaccggtccggaattcccgggtctgacccacgcgtccgcggacgcgtgggtgcaatttcaatcccttgtctcgtcatggattccgtcttctctaacgttgctcgtgctcccgaagatcctattctcggtgtaactgttgcttacaacaatgatcctagtcctgttaagatcaatttgggtgtctttgtcnaccgaactgaggaagggaagcctcttgttcttgatgtggtgcgtaaggcagagcaacagctagtgaacgatccgtctcgggtcaaggaatacattcccattgttggtatttccgattttaacaagttaagcgccaagctcatcttaagtgctgacagtcctgcgattacagaaagtagagttactacagtccagtgcttgtctggtactggttcgttgagagttggggctgaattttttaaaacacactaccaccaaagtgtcatttacat

SEQ ID NO: 125357 - DNA, 622 bp, Arabidopsis thaliana columbia
  unsure (1)..(622): unsure at all n locations
gccccaaacaanttccagggggcaaaacacgcgggcccaaagaaatgccccccaggagcaggagacacaccccgagaagaccacaccaccacaaggagggaagagggcgacgcgacggggcgcgcagaagcggacgagaccaccgccgcccccgacgccgaagaaaaaaacaccacccaacgccggaaccaaaagccggccacacgaaagagacgcgcgcgcccacaggacaagagggggcggcggccggcgcagagaaagaaggcagaagagcgcccggaggagcacacaaacagagagaggcacagcagcgggcaaacagggaaaaagacagcgaagaaaacaagagaaacgccccgcgcccaccgggaaagaaaaggccgcacgccagaggccgcagcgacaacaaccgccgagacggaaaacgaagcagaacacgagacacacacgcgccgaacgaaagagccggcggccagacccgcacccccgcgcaccgcgacgaaggcggagagcgagagaggacacgcgcccaagccccccaccagcacacgacccaccacacgaccccgagaaaacgccccagagacggaaagcaggaaaaagcgacgccgacacagacccg

SEQ ID NO: 125358 - DNA, 588 bp, Arabidopsis thaliana columbia
  unsure (1)..(588): unsure at all n locations
ccccccaaaancttttaaggggggaaaaaccagacccccaggaggaccccccaggcgccaagaaaacaacaccctccaaacacaacacgggcaaagagccgacacgcagaagagaaaacacgggaagaacaagcgaaaagaacccccccccccgccaccgccaaaaagagaagcaacgcgcgcgacgccgaaacccgagaacacacccggagaacaaccgcgccgggcgcccccacccccaaagaaaacacccacagcccccacacccaaacaaagcccacccgcaccgcgaaagacagagnctttcttttctaaagcggcgggaacaacccccgccgcaaacacacacccccgaaaaaggcaacaaaaaccccccgccccacaagaacaagaagagaggacaagacccagacgccacgaaccacaaacgccggacacaacaaaagaagacaaacaccagaaaccccaccccacaagaaaaaaaagcaacaccaccccacacacacccacaccccagaacaaaaaaaaagcgaaaagaaaagagagcccgaacacacccacgccacagcacccacgcccgagcaagaa

SEQ ID NO: 125359 - DNA, 645 bp, Arabidopsis thaliana columbia
  unsure (1)..(645): unsure at all n locations
ccccanccaacccccccccgngaaccgaaaacacaacacccanaaaagaccaccggcccgagaagacaccaagccacagaccaacaggacaacgaaacacaaaagggcaccccccgcgcgcccaccaggggaaagagaagcacacggcaaaaccaaaaccgagaaccccccccgcaagaaaaaaaccccgccccacccccccacagaaacgcccccgaccaaccaccgcacagaaacgcgaccaccgcacaaaaaacccacaatttttatacaggggggcggggagcacagcacaaacaggcacaccaggcgagccaagagaaaacccccccccacccgcacaaacaagacacccccacaccaaaaccccgcaaacggacaaaccgacaccgcgaaaacaaacagacccacaaacgccgcccgccggaaaaagagaagcacccgacacgaaacaacggcaagcccggagaagaacacagaacaaaaaagacagaacaccgagcgacccggaagagcgggcgccgccgcgacgagaggagaacgcccccaaccccaaaacacaaaagaaccggggcacccagaacccgcccccacgcccccaccaaaaaaaccggcgccgcgcgggcgggcgccaccaaaaaagcc

SEQ ID NO: 125360 - DNA, 481 bp, Arabidopsis thaliana columbia
gacaccccattacccccaacccacaccccacccaaccaaaagggaaacacccccgccccacaccaaaaaacaacccccaaaccaaaccaaaccccccaaaccaaaaaccacccccccccaccaaaaacacccccccaaccccaaaaaacccaaacacaaccaaaattttttttttttagggcggcccaccagcaaagcaaaagacacaccaaaaaaccacaaaaacccccgcccaccccaccaataacaactccttcaccacaacccctacaacatcaccccgacactaactaaaatataccagacataacttcacccccgaaataacatacatcacaccccccttccccccatcctatacatcactataaccaactatagagccaccataaccccccgttatcaatcccgccgcccctattataaaaaaaaccagagaacattaaaataaaagacccacccctcaaaatcgccccccctt

SEQ ID NO: 125361 - DNA, 566 bp, Arabidopsis thaliana columbia
  unsure (1)..(566): unsure at all n locations
aaaccaaaaaacccccaaaaacacccccccnggcaaaggaaccaccccagagaaggccaccccgcgcgacngccacgagaccacaggcacacaggaaaaaaaaagggaaaaacaccccccgcagcagcagaggaaaaaaaccaacacccgaagcaaaccccccaaggagagagggacggcaccccccgccaagagggccccggcccccccgaaaagaacaggacgcccagcggaacaccttctcagaggggggcacgcggaccgcgcaacaaacggacagacacgaacagaaaccgcccccgccccggaaaaaaaagcgaggaccaagaccccgaagcagaccgagaaacggaagagggacaacaagcagcgcggccgcgaaggagacgacaacacgccgcaagacccgagccgcgcaaagcgggacagaaggagagcggggagccgagggccggggggcgcgaacagggagggaaagggccgggaccgaaacggagagcaccgccagaaaacgcccacgcccccgcacaaaaaaagggacgcgacgaagacgggcaaaaaaagac

SEQ ID NO: 125362 - DNA, 521 bp, Arabidopsis thaliana columbia
  unsure (1)..(521): unsure at all n locations
aagggccaaagacaaacggagaaaaaaaagaacccccccgccgaaacagaaggggaagcggaaccaaaccgaaaacccacaagaagaaaaaagcgccccccaccccacgaagaagacaccccgcccgaacaggagaccagagccgggcagcgaaccgcagtttttttacagcgggggcaggaccaagagaggcgagcaagccccggcgcaaagaacacaccgccgccccccgcgggagagaggagcgcgcgagaagaagagcggcgagagagaaggcagancgcgaacaagcacgcaagcacaacgaacacggagcccgagaaaagacgcggacgcacaccacgacaccccacagaaccaaggagaaaagagaacaggaagagaccgcccccacgcccgcccgagcggagccggggaccgagcgacagaggacgccgaaacccaaaacaacgaagaagcggggacgacagagcaccccccccgcgacaaaaaaagaggcgccccccccgcgccgccggccc

SEQ ID NO: 125363 - DNA, 399 bp, Arabidopsis thaliana columbia
aaaaacccaaagaaccccccgagaaaaagaattttagaggagggccgggatcacacgagcagcacacaagagaaaaaagggggacacccacccccaaaacaaaaaaaaaccccaacagctaacataccaccgagagcaaaaacacagccccaacccaaatgcggcccaccccccacgaaggaaacaaagcaacgaaaattttttttttgggggggcaagaccgggccgaaagaaacctagagggaaaatagacccccgcccagaaaagaggaagccagaccaaaagccaggctgggtcgcgggagccaagataacagagcgaaaaaagagcccgacgaaaataaataccaaccccattgcaccccagcgacagaatacggaagacgcaagagacaaacc

SEQ ID NO: 125364 - DNA, 678 bp, Arabidopsis thaliana columbia
  unsure (1)..(678): unsure at all n locations
accaaaaaaaanntttaagggggaaaaaaaccaagagcccaaaggagacacccacggagacagaagcaccaacccccgtctaagaaaaccccgggagaacagccaccaaacgcacaaaacaaacgaggaaaaaagaagaacacaccccgcccgcgccaaaacgaacaaccaacaaaccccgaacacccaagccgaacccccgcgcagagggaggagacaaccccccccaccgccagagagagcaacaccacacgagccaaggaaaaaagagagcgcgacgagagcggagggaaaagaaagagcttctctacagagggggccagaagaaaaacaacaacaacaaagacaagaaggagaccgcacaccacaaagagaaaagagaacaacaaagccagaagccacgaacgaagaggacgggcagacaaaaagacacgaaagcacaagagaacgacgccgaagaaagaacacacccacaggaacaccacgcccacacgaacaaaaccaaaaacaaaaataagacgcagaacagccgacccacaggaacgccggacgccacaaaagagaagccgccaagcacctagacaccaaaacggcgccccacaaacacccggccccagcgcgacacaaaagaacagaaaagcccccagaggagccccccaaaaagaggcccccccacac

SEQ ID NO: 125365 - DNA, 596 bp, Arabidopsis thaliana columbia
  unsure (1)..(596): unsure at all n locations
atcccccaccgagacaaggaaatttttccgaggcgggcccgcggtacgcgaacaaacaaaccacacgcgcaacgacgaaaaagagaagaacaacacccgcccacccccaactacgagaatagatatacccaacccgtaaccaataaccatagaacccacgcaagagtataagagcgaccgaccccacaaacagagaaatagagaagacagaacaacaagaaaaccaagacacagacaaaatttttttttttaagggggggccaaccaaacaacaaaacacaaaacaaagaacaaaaaaaagaaagaccccccccaccacaccncataaaaaagcacccaaccaaaagcccaactcagaaaccgcaccacgagtagaagaacgtagcccaaaatctcccccgacacaaaagagagagtacacacccgcgacccacaacacgcaggcagcctcgatgcaccgtgaaacgagaccaaatcactccccaccatcgaacacgccccccccgccacaggaaaccgccatacacagaaaccaataaacacccaccgacagacacccccgcaccaccaacaaaaaacaccaccccccccccccc

SEQ ID NO: 125366 - DNA, 534 bp, Arabidopsis thaliana columbia
  unsure (1)..(534): unsure at all n locations
ggggaaaaccaaaccccccnaaaaccacccggggcaagacgcaaaccttcggaggggagcccgcgaaacccccacgccacacaaaccaccaaaaacgaggaaaaaccgcccaaaaaaaaaaagaaccacaccccgacccaacccccccaaaaaaacccaccccccccaaaaagcaccgacacaaaaacccagccaacacaaccacttttacacgggggcacaccacaggaaggagccggaccacaaaaacacccccccacagcagaagacaacgggacaacaaaaccccaaacccagacccagccacgaaaacgaaacggacgcaaaccacaacccccagaaaagaaagagccacccaccgacgacgccgacaccagagagagacaaagagaaaaaagagggcaggcgcagccccccaaggggcgcacgaacacgcgagaagaaccccgaacacaaaccccaagggcgggccaaaaacccccccccccaccaacaaagaaagacaccccccgagagccccacaaaaagcccccc

SEQ ID NO: 125367 - DNA, 555 bp, Arabidopsis thaliana columbia
accaaaacccaaaaaaccccccgaggaagaagacagccccttaaaacaaaccgcacagagcgagcaacggagaagaagggcacgaaacaagagaaagaaaccccccccccaaagcgaaagcgggacgccaagcccaggccgaaacccccgagagcgggaagaaagaccgcccaggcaaaaagcagaccacacgccgcccaaccaaagaaccaagcagacacagcaaaagagggagtttttaacaggggggggagaagccaccgcgcgcgcaccagccgccgaaaaggaaaagccccccaccaagaaaggcggaccgcgagcaaaacccaaaaacaaaagcgcagagagagaagggaggcacgacagagccgacgccgcaaagaagggaaccccacccgagccccacaacccgggggagccggaaggggaaaaggccccaaaacccacacgagagcccgccccgcccggaacccccagccgaaacggaaccccggcacgagacccccgcacccggcagaaaaagccagcacaacgaacccccaaaggcccgccgca

SEQ ID NO: 125368 - DNA, 506 bp, Arabidopsis thaliana columbia
agcggaccgggaggacaagggggcgcggccccgcgcgcgcgaacgaaaaggaaacagcgccccacgccgggggcagagcccgcgcagacgagagaacaccggccccccacgccagagcggacccagcaccgcgccaggggggaagacggcggggagggagaaaccttttttttggggggggggggccaagacccccgcgaagcgaggcgcgcgccacaggagggacaccccaccccccgggaaagagggaggcgaaagacgaagaccccgaacacacccggagcgaacaagagaggaacggacagcgagaacagcaccgcgacagaaagggagcggccaagcccgcacgcgccacgaccgacgaagggccgaaacggaggaggggaggcacggaagccccgcgccggaacgccgcgccgcgagcccagagcaccgaagccccaagaccgaagaaaggcggggcggacagcccccgcaccgacgccgaaaaaaacaccgaccccgcg

SEQ ID NO: 125369 - DNA, 489 bp, Arabidopsis thaliana columbia
  unsure (1)..(489): unsure at all n locations
cnnnnnnnnnnnnnnnnnnnnnnnnnnnnnnnnnnnnnnnnnnnnnnnnnnnnnnnnnnnnnnnnnnnnnnnnnnnnnnnnnnnnnnnnnnnccttttttttttttttttttttttttttttttttttttttttttttttttttttttttttgtttttttttatttttttttttttttttttttttttgtggaagctaagcccctttaattttcccaaatgaaaggtttagttaaaaaaatcaaatgcccaaaataaatttttaaaattggggttggttttttaaaatttaaaagttttaccactttttttttgatgaaaagaacttcccctttttcttggtttttggcacttttttgttgctttttttggggaacaaagaattttccttaaaacaaatttctttaacaagtgcaaaagttgttccctgggttttacccgccacccttgttgagggattttcagattttttttccctcgctttcgggag

SEQ ID NO: 125370 - DNA, 616 bp, Arabidopsis thaliana columbia
  unsure (1)..(616): unsure at all n locations
caccaaaaaaanttacaggggagagaccaggcccaaggaggccccccggagcgggagaacagcacgaaaagaacaaaccgggggaaacgacgcaccgcgcggccgacgagaagagaagggagagggcgcaccccgcccgcgggagggaggagaaaagacccaagcccagaccaaagcacccggcagaggaagaaagagggaccacccacaacaaaagaagaccgccgcgacacacaagagagacgaacagcacgaagcaccagcgacctgaccaccgggagcgacaccgacgaagaggccaggccccagaacgagagaaaccccaccacgacaagaaagaagagcgcaggaccaaggcccgcagaaaacagccaacaagagaagcgagacaacgaaagaacacaacccganagagagaaaagacgcaacacccccacccccgccccagaaagcaagaaagaggagaggggaggagccacccccccggggcgggacggcgcgcggcgggcgaaggaccaaaagccaaaaaacaaacaggggggcggaagaccccccgccaccccgccaaaaaaacaacgcgcgcgcccgcaggccccacaagagaggcccccaaaag

SEQ ID NO: 125371 - DNA, 367 bp, Arabidopsis thaliana columbia
gcccccccaaacacagaccgcccccttagaggaaacccgggaaaaggccgaagaacggacccacacaaaagaaagaaaggagaacccgccccccaccagaaaaaagaaaaacaccgcaacccaaaccaagagcccccgcggagaaagaacacgcagcgccccccccggaaccaccccccgcacagccacacaaagagcacgacgcgcacgaagaaagcagaatttttttagcaggggggggaaccgagcgaaggacgcgaaccgaacgcagaaaaggaccccgccccccccaacacaaaaaagacaccacgacaagagccccgaggacaaacgccaaacaaaaaaagagaacgcacacaggaagcgc

SEQ ID NO: 125372 - DNA, 438 bp, Arabidopsis thaliana columbia
tttgggggggagccgtggcgcgaaaaaaatatgtgggaaccaattgagtgcgggatgcccatagtgggcctcccgtatggctgtttattgccccggtgatgtatgcatcccgggggtagttggggacagggggagatgacggcaacattgtaatatgtaaaaacacgcgcccgacggatttgcgtatatttgttatcagccactttatcctatcccttaacccctgtctatgacgatttgaatgttgtcctcgcacacgcaaggtatcgttactcggcctcctgcgaccagcaaggaaaccgggttgcgctcgcgggggtagcatcgggatcgtgagcgacagggagcgcggagggagggtgggtgatgtctgttagacctatgtgtgcgagaagagacgcgcgccccccgcacaggaggtagtgaaggcgacgcaga

SEQ ID NO: 125373 - DNA, 496 bp, Arabidopsis thaliana columbia
  unsure (1)..(496): unsure at all n locations
nnnnnnnnnnnnnnnnnnnnnnnnnnnnnnnnnnnnnnnnnnnnnnnnnnnnnnnnnnnnnnnnnnnnnnnnnnnnnnnnnnnnnnnnncctttttttttttttttttttttttttttttttttttttttttttttttttttttttttaaacaaaaaattagctccaataatacatgtgggaagctaaaaaaaaagagcttttcttgtaacaacaaaaattttttgcccctttaacattcaaaagtttttttttttgtgtttaaaacttttccccgtttcctactaataattgtaagccctgcaatacacgtttaccaaatgcccaatcacatagattggggctccatattttttgcgattgaaagccttaaagtttagagaggggttgcagccatatagcttttgggatacgcggctgtatttgttggaaacaccattgggctaactccttcacctttgagattgggaaccaacttttttatgggcaaacccaag

SEQ ID NO: 125374 - DNA, 476 bp, Arabidopsis thaliana columbia
  unsure (1)..(476): unsure at all n locations
aatacgactaactttanggaaagctggtacgcctgcaggtaccgggccggaattacagggttgacccacgcgttcgttcacgcgtccgcaaggagggcatttaccagattatgctccacaccctgctattgtcttgaaaatggaagatggaactggtcttatccttccgattatcgccttggagatgcctagtgtgatacttatggcagcaatgaccaatgttttttttacatgatcaaccatgtataaagtggggaaggaaatggtggacaagatgggttactaagttacacttgttcaagtcaccaaaagaattcacgaggcatattttgtccaattgttcctttcaaaagagggctatgcctccgcaagtgtcaattttgatcttaagcctttagacgcaaacaatatcgctttttgaataaccattcctttactatatgattaactgactttggctctacggatgaaatgaa

SEQ ID NO: 125375 - DNA, 488 bp, Arabidopsis thaliana columbia
ggggcgccgcggcaacaataaatttgtcccacgcatgaggggtgtcccggtgttccacccgggtctgtgacaaccccgtgtgttcaaccgcggtgccggcgagggcggcgcgcataacaggagatgagaagtacgccgccctcaccgcctcctagtaagaatacacacggatagcctaacgatatacctcgagtgacagaaggtgtgctctgccaccgcaatgtattttcttcgctagtcgagaagaaagatcgatcccgacggagatcagccggacagacagccaggccacacgatacagtgacgggtgaagagaacgacgagacgagaggagagccccgccgccgaggaaggggaagacatgggagcgataacggacgacgagccgccgcaggctcaaggaaagaagtaaaaggaaaagtatcccagaagaggggacggagcccaccggtcgaccccccgcattcacgatggatttcctatgtcga

SEQ ID NO: 125376 - DNA, 502 bp, Arabidopsis thaliana columbia
  unsure (1)..(502): unsure at all n locations
nnnnnnnnnnnnnnnnnnnnnnnnnnnnnnnnnnnnnnnnnnnnnnnnnnnnnnnnnnnnnnnnnnnnnnnnnnnnnnnnnnnnnnnnncctttttttttttttttttttttttttttttttcctataaaaagattttcttcttcattaaaattggttaacataacaacattttttatcaaaaccacctcttatggtacaagtcaacatttcaaacctaaagttttttgaaattgtttcaaaccaaccaaaccgaatttgaatttagattttatccagcccttaaaaccaaaaagtttcctttaaaaaaaagggaaaaccaaggtcccagtttttgtgttattttccccatccatggaaaaaaaccagaacttttcaaactttattttatccggaccaacttattggttcccttttttgcccaattgaaatttaaattcattggcttcccaaagcttttaccttttggtggttacctcttaagaaaccttttaaaccccccc

SEQ ID NO: 125377 - DNA, 389 bp, Arabidopsis thaliana columbia
  unsure (1)..(389): unsure at all n locations
caggnnnnnnnnnnnnnnnnnnnnnnnnnnnnnnnnnnnnnnnnnnnnnnnnnnnnnnnnnnnnnnnnnnnnnnnnnnnnnnnnnnnnnnnnnngccgcctttttttttttttttttaaaaaattcaaaatctatttaatttagaaaaccttagaacctgggtttcacttccaccaaacatttggtttttttttaacttaaaagggatggcgtttccggaaaagaagaatggttctttagaaaatttgaaaagaaattcccaaacccccaaaggggtgatcttccaatcaacgatggggaccctaacttcaaccaccggttcaatggggaagggagggaaccttttgaccaccttaaggaaaccggaaagaacttttacctgcctgggg

SEQ ID NO: 125378 - DNA, 497 bp, Arabidopsis thaliana columbia
  unsure (1)..(497): unsure at all n locations
cnnnnnnnnnnnnnnnnnnnnnnnnnnnnnnnnnnnnnnnnnnnnnnnnnnnnnnnnnnnnnnnnnnnnnnnnnnnnnnnnnnnnngcggccttttttttttttttttttttttttttttaaataggctctaacattgaaacaagaaaagggctttttaaattggtttattagtaccaattccaaagggttcaattaagggcaaacaaacagaacaaaccgaattatgttttaccacagaaccccaaagatttttaaaaggagaaaaagaaagaaagggcccaaattaaaaacttccggagtgttaaaccggacaattggttaattcaaaattgaaaaaaaaaaacaacttggaactttccaaaaaacccattcgaaaccactttaaaaagtaccggttattcttttaaaggtttccaaagaattttattttttgaattaatggaaataacaccgtaggggtccttgtttgaagttggcttctaatcttaaaagtat

SEQ ID NO: 125379 - DNA, 302 bp, Arabidopsis thaliana columbia
agccggcacgcccgccggcaccgggccggaattcccgggtttacccacgcggccgagggatcctaattaacataagctatgagtgcgacctacctatatctcactatttgcaaatgagcataaacgtaaacctacacttatacaatattcaacgggttgaacaaaggtactgtctaacgaaagatttctcgatgggacgatgccttttttctttgtggtgtgactatagctcagagacataatgtacaaaataaaccgggcatatcataccgggaccgacacacaaacaggggctaatgtac

SEQ ID NO: 125380 - DNA, 578 bp, Arabidopsis thaliana columbia
agcgggggacccccaaagcgggctgccccgggggggcggggaccaaaaaaccaaaaacccagaccgcacccgcgggaacagaccggcaacccgacccaaagagccaagaaccaccaacgaaaaaacgagaaacaaaacccaccccaccacacccagacacacacccgagccaaaaaaaacaacatcctttttccggaagaaggagaaagaacacccgcgcccgccaacaacgcccaccaaaccaacagcaccaaaagacgaaacaccagaccaacgacacaaagagccacccacccgccggacgaggaagcaagcacacacacggcgggaacccaaccacgacgaacaacgcccaacaacgacccaaaacccaccaccaagccaccacgcgcgagcggggcgcccccacacaccaaacacccgcaacaaaccacgcccgccccgcgccgaacgaaagaaacgacagcaacaacacccccagaacccgcacaaccgaacgaaacgcgagaagaacaacaacacaaccccaaggacacaaaagcccacagaccacacaaacgcaacgcaccgcgagacgc

SEQ ID NO: 125381 - DNA, 425 bp, Arabidopsis thaliana columbia
gaggacgcctgccggtaccggaccggaatgtaccgggttgagccacgcgaccgatggagcgaaggaaaagttagttaaggaggtagttgcgcgtgcaaccgaattgatatttcttttgattggatttgataaatcgtttaaggcaaagacacaagattgcatctagcttctcttacctgcctattcacaagagctactaatctttttcgcggaggcttctagaaggcctctcatgttacaccttctaaatcagagaccagtgcatttaggccccgctgaggatgttctaagggttgcaggcatccttagggctggatatcctggaattagcgggttgagctggcatcggcaataacatgtgaacttggtgaacaccaccggatgtatactggctagggaccttggataagaccagaataagcctt

SEQ ID NO: 125382 - DNA, 475 bp, Arabidopsis thaliana columbia
ggggagctggccccccgcggaacccgggcccacatccggggtcgacccgggttccgcccaaatattcacgcattttaagataattgtagggcacagaataccgaaacacgaccgtgtggtggacacttttgtacctcaaatcatggctgaaatacacggaacctctctcattgacacgggcacaaattgtgtcgatgcctttattcgcgaggggtatcacgcccagatgaccattgcgcggtgccacatggagcgccgacactcaccctaaagctgggcagaactctcgcggcgtgcgtgcagctcagactctcttttggacagggctcttgtatatatcatgcctcaatctcaacgacgcgctgcatatgagaacccaacacttcgaacagggtgcaacccgtaaactgctttgtacaacacctaaaagcctacccctaatctcttgcgcgagcgcgctccctctcctcgtgat

SEQ ID NO: 125383 - DNA, 640 bp, Arabidopsis thaliana columbia
ttgacgtcgcatgcacgcgtacgtaagcttgggttcctctagagcgggccgcctttttttttttttttcagcttaatatggtaattaaaacctttgggttttccaattccagaccaaaaccccaacccgcggggtttggctttttattaaaggatttgggttccgtttggcttcccaaaacgcaaattccttttggattttttagggtagtattgttaaatccgtaattaatatttaccattattggggtcaaacttcaaaactttttaaattacgtgcggtttttaatttaacgaaccgacccacttaattgtcgtttggaacaccacgtattattttccattcgaggcggacttaacggggcccggcgacaagttcactgggtttccggaacgaaacgatgtgacttccggccttaaacgccgtgactggctccgagactcgtatatcttccatctttagctcttgaagacgacgcacgtactccggcacgtgtaagagatcccaaaccacacacaaacctcctggcttcacaactctcacaatctctccgagcactctcattctctccgccgcagcttccaccgacttctgaccatgctctttccccaccgtgtgaacgaacaccgacgagaccacc

SEQ ID NO: 125384 - DNA, 387 bp, Arabidopsis thaliana columbia
ggagagcagcggcccacgcggatctgcccgataattctaggatagatgcaggggagcagcagcccctatatgagctacgtacgggtggtccctgcgcgcatcccgacgctggtactacttatgctgaaggtcgagctgagcgagggaagagctgcctcagagactaagttgacgcctgctatctaaccgcaaagtagctcttcttttttcaagacgtgccccccattgtggtcacaagaacagaagacctacaccacatgtgatctacagacagtacaggggaataaaggaggggtcgcaacgctgcgcgccaccgtggaggaagcgctttgccagagctgcatgatctttgatcatacatgggaaaccatggcaccatcgtggtta

SEQ ID NO: 125385 - DNA, 289 bp, Arabidopsis thaliana columbia
agcccaccccacacataaaaaaaggcgccaaggatttgaacacacgcaaacccccctaaagggacatacggacatccccggagaggcaatatcccccaccgaacaaacaatcgaaactatcggcttcaaacccgggagacacacacgaggcgggtatacacacagtaagccacccacggggactcacgcgcttccgcacccaaggagaacaggaggtaactgacacatatccgaacggcgaccggacccctacgatcttacaaaagcccaacaccaaggagccccagaa

SEQ ID NO: 125386 - DNA, 341 bp, Arabidopsis thaliana columbia
  unsure (1)..(341): unsure at all n locations
acggaaacaaaaacaagcaaggatgattgcgaacaggctcagaacgagcaaaccacggaatcgtgcccttctctttgggggggcnaaccccaaacagattcactgcgtccttgcgggctgcgcacccaccgaccttttagcacccaacgcaccccagatcacaactcgcactaatccacgcccgcatccccataaccaaacagactagcaccccccgataatacggttagacaaccgttgcacctccccaataccaactcgacagctaaacgcaagactgcaacgccaccatacaaaagccaaataccaaaactcccacccaaccaaatccgcaagacaac

SEQ ID NO: 125387 - DNA, 409 bp, Arabidopsis thaliana columbia
ggggaggggccgcgcgggggccggaccggaatccccgtttaccagcgacgtggcctaaatggtgctgattaaaagaacgcttttttctcggcccaggccagtagaaaattttggagatagattcggatttagtggaaaagaactttttggaaccttacaatcggggtctcaccctatggaagttgtttcggtggctaataacccaccaaactaaaagttaggtgtcccagacccgtgcgatgaaggccataacatcaatttcgcgagttagcgatggaaactggcccttttaagtccggcgggatcaaatccacgtttggacacgaattcgtgaacaaaaatcggatcctgtgttcgttgtaaagggcggtggcaacttgtagtcattgcctgtgaccggctcccgggg

SEQ ID NO: 125388 - DNA, 429 bp, Arabidopsis thaliana columbia
gcacggaccggaacggaatacccgggtttgcccaagcgtacgtccacgcgtccgagaacaactagagggatattacacgtgtcaaatgaggggaaccgaggaacctcctactcggtttagggatctactgccttttgcaactaactaattacccattctccttcattgatggacacagagattgaacttttttttgtgggggtaacccaagtatggccaaaatttggaaatgaggatcagaaacgaagacttatagaaactaaatccgtacggtagagagactcttaggtcgatgatttatcgctaccttcgtaaaaaacggctcacagaatgggtcccagtttttgtgtgcacgtgatccaattccgaaatggttgatgaattcgtttgttaagaaattggtgttattttaagggtctaggggtttgg

SEQ ID NO: 125389 - DNA, 494 bp, Arabidopsis thaliana columbia
  unsure (1)..(494): unsure at all n locations
aaagggcgcccccccgctcgtgccgagcagaatccaatgtatcccaaattcccctggcacttcggacacaggtaaaaaatacactggtgaacatctcctccacggaagcttgcatagacggcaccnccgctccgttgattctgggacagatatcaactggcggttccgtnttagactgaccggcgtacataggaaagaccaacacacgagaccttgttttttattgtgggaagatgtggagaggaacaagacacctctagagacctgttagctttcgcgccattctcattgaggatgtgttcgtgtactcactgtgtgcgcacagcacaggtgggcccacaagatctaggaccgacacatgtgcaggagtaaaggtgtatatgtaacatagagcgtgtcgccctaagaggactcgtgcagagactcgtgacacagcgttctgtagcggccatctcaccgcgtcttgggtagcaaaacgtgcccaaaagagtagt

SEQ ID NO: 125390 - DNA, 606 bp, Arabidopsis thaliana columbia
  unsure (1)..(606): unsure at all n locations
gacaaagccggaaccggccaggatacaccagagctcaccccggcaccaaaacacggcgccaggacgacggcaccgacaacagaccgaacagacaacacagacgcaacagcccaaaacccaacacacaacaacccagcccgccccagcccgaaaacgccaccaaacaacaaacccttctcacgggggggggggacccccccacacaccccaaaaaacccagcgggtcccaaccaggcacccgccaccccagcccacgctaaagcccaaccacacaaaccgcacaataaatcccccccaagcacacacaagacgaaggagaacagcgcgaaacaaaaacaaaggccaagagacccgcaaacgcaacagaagctcacacacgaggcacggaccccacaacaaaacacacacaccacaccgacgcacgcaaaaaccaacaaaaaacgcccgggggacacaacccncaacccacgaccacccacccaccccaaagccccgacccaacgccgcgcccaaacaccacgccgcccccccgcgcaaccaccgcccaccactccacaagacacacacccggaaagcgccccacaagcaccacaccacacccccgcg

SEQ ID NO: 125391 - DNA, 501 bp, Arabidopsis thaliana columbia
ggggacgtgctgcgcccggcaaggcaagtacggtaatagcctactgtttgatggggcttatttttaggggaaagacttatgtttttgaattttgaccccattttcaacccctctacgcaaagttagaggcttgggcatcgcataaggaatggaggatcgctgttggtgcgacttaaaagccaaaaccggcggaatgagccaaccgttttttttatggttgggtggaaaaggcactcctccaaaacccacataataggtggcctagggtggagccgtgaatttggcccttttggtctcctttagacatagcctaaggcttggttagggcctgagatgagcaggaggccatccttcctaattacgccgcatatatcgaggaaatgaccctccggtgtggggcctgtaatagaacagcacgagagctatttggttcagaaacttgagaggacccttaaaagagaacgagttctctccccccatacgcaattatgtattgttatg

SEQ ID NO: 125392 - DNA, 402 bp, Arabidopsis thaliana columbia
  unsure (1)..(402): unsure at all n locations
agccgagcggtcgcccggggggaaaaagcccagccaaagaggaaacaaaacccccgagagggcgcaggacgggaaaaaacccgcaaagggaaagaaagacaaacacccagcgcaagaaaaacgcaancccccagcacacaaacgcaaaaaccccaagcaaaaacacaaccacaacacgaacaccaccttttttccgaaggaggggggacaaaccacaccaccccacaacaccagacacagcaacaaaaaccgcccacaagcgggagcgaacccccccacaacaacaaagaacagaggccacacccaaaaaaacaaagcacccagcaccacaaaggacacgccaacggcgacgcaagaggagaacaaccccaaaaaaagcaacgcgacccgcaccaccagccg

SEQ ID NO: 125393 - DNA, 397 bp, Arabidopsis thaliana columbia
acgctactctgcccgcgtgctccagacgagaatatgtgctttcgcctagtggacaaattgcgctaagaccgacaagcatctgatacttgctatgcttgttgaccccctctccactgctagaacctcatcacattattcatgggtatttcattttcgatattagatttttcaaaaccaacattacagaacttcggagatcttctattgtctatgttatacctggcagcctttaaagggctcttagaccttgtaccatgccctaccgttagcagaaagtctgatgctttacggcaaaaacactcgaagtgaccaattcctagctggttgctccctctccctataaggcaggaccgccatgttatgagacctggcctgaggctcaatgattccccactct

SEQ ID NO: 125394 - DNA, 457 bp, Arabidopsis thaliana columbia
  unsure (1)..(457): unsure at all n locations
ggagagcagcaacgccggcaggtaccagtccggtattaatgtctatatccactagctcactatttctttgagcgaccttattactgggtgatgtcatgtacacacgagccttgattcatacactggccacgagatctttatagccccatgtgctgaaactggtccacgtacagactaagatcaaatgggtgaaacttaccctaaatttttttgaaggatcttcataactgtgactctcctgtccatgacaaactttgctttaaatacactgatgattcctactgtttgcattgtcacttagtcgcatggtgagagcttgcatctagcaagagactatggcacaggaacttgtctcaaactttagtggtggcgctctctagcttcgctanatgcaactgtacaacctgtgacagccactatcgtgattcctgggtgagaaatcttggcgcgggattct

SEQ ID NO: 125395 - DNA, 520 bp, Arabidopsis thaliana columbia
  unsure (1)..(520): unsure at all n locations
ccagggggagggaaaccaagagaagagaggcaggaacaggcgggggactgagggagcggcaggggggcacgagaaaacaaagcgacgaaaaccggagccgagggccccggggggcccacgacaacaaacggccaaagcccgactctttcttgggaagcagacacnaacacagcaaccacggagcagaaaaagcacggaaacgcgggaaggggggaaccgcggggaaacaaacaagagggccagaagagcccagagagacacaccgcgaaagacggggggagcgggggaagcagcgccagagagggaacacagcaacgccggaggagaaagcggcaacaacaggccgcaacgaggggcaagaaccggaaaaacacaggccccgaaaagggcgcgcaaaacgcacacaaccacgacgaaagcaaaaggacaaagacgcggaggacggaacgggaagacccgggaagagccccgaacaaggccggagccgacagggacgagcgacaagacaaaaggaaccagc

SEQ ID NO: 125396 - DNA, 527 bp, Arabidopsis thaliana columbia
taggggctctaaagatcacttatgggaaagctggcacgcctgcagggaccggtccggaattcccggctcgacccacgcgtacgcggacgcgtgggcgcactttatttcccttgactagtcatggatgccggctccactagcgtgtgctcgtgcgtccgaagatactattgtctgggtaactgtctgattacaacattgatcctatatcctgtgaagatcaataatgagtgtcggtttcctacacgcaactgaagataggaaacgcttcgttgttgcttcgatgtaggcgctgtacggcgagagccactagctatcagaatcgatccgtcgccggtccacagaatacattagccatagttggctatcggcgatcttaacgaggtaagcgccacgctgagatcatgtgctgacagatgtgcaattactgaaagtagaggaactagcgtacaacggtggactggtactggtcccccatacgggggtgctagagccctcagaacacgctaccaccacagaagaatttacat

SEQ ID NO: 125397 - DNA, 522 bp, Arabidopsis thaliana columbia
agctctaatacgactcactataggggaaagctgggacgcctgcagggaccgggcccgaatttccgggtccacccaagcgttccggaatggaaattttaagcttccgtcgagaaaaaaagggacactcagacaccggaacggttagcgtttatttaagatttttatccagccaaagtcaaatacttggatcctccaaccatggatggggattaagacccaccaaatttcaccatggacgtccaaaaaagtggtggttcttccactaccctggctaagattcgtggaccattacatcagcgtccctaaggattcagccaagcttgtcgaaggggttcttcaggggagcagctctcgaggggttgtagatgtcaccaacacctatgcagggccctttaaggaggatgacaaagacccatgcatcatggtttcttgagcacaactacaatgagtgattgtgccacatgtacactaaaatttgtgccaaagagcatgttgtaggttggtacaacacaggccctatac

SEQ ID NO: 125398 - DNA, 426 bp, Arabidopsis thaliana columbia
gccccctgcggaaccaggcccctaatcgaactttaacctcacggtctattaaccgggagcttgcattttgggtaaaattgcttctttggctaataccccggttaacgaaatccctccggggccagtgagccgttggttttgtatggctaaccccgatcggggatgaatccattttgaatgcccagccccggcccgttttctgtggatgacgccaaaccggaaacccgtaacaatttttgttcacgaaaggcctgtgcccacgcatatcctcaccacctttgcttgagggtgcgggtccccccccttgtccctggaacatacttggagttgataacaattgtacagccccaagccctgatcggtagaaaattcctccaaattattataccgccagttcctccactcctctcattcagccctattggg

SEQ ID NO: 125399 - DNA, 420 bp, Arabidopsis thaliana columbia
  unsure (1)..(420): unsure at all n locations
nnnnnnnnnnnnnnnnnnnnnnnnnnnnnnnnnnnnnnnnnnnnnnnnnnnnnnnnnnnnnnnnnnnntgcctttttttttttttttttagaatagcatacacacgcgttttatcatacattacgggtggggggatatnnttcttagagttgatgagaccatagcggtctgagtacatcatacgatattcacattggaggagttaaggagtgacatgtgtaactgcgaacaccaactctatgatgatgatcatggggcataatcatgagctctgtatacttgaatggctgatcgcacttgagagtgagcatcactacggcgattgacatacatcctgagaacatcgagatctcatgagaagcatctctacgcatccgtatgcacacccatgattgcgctcgatccctgaacctgagatat

SEQ ID NO: 125400 - DNA, 510 bp, Arabidopsis thaliana columbia
  unsure (1)..(510): unsure at all n locations
atgannnnnnnnnnnnnnnnnnnnnnnnnnnnnnnnnnnnnnnnnnnnnnnnnnnnnnnnnnnnnnnnnnnnnnnnnnnnnnccacgcgtccgcccacgcgtccgcgagcacgtcgggtggtatcaccgatgttagtgatccaggacagtggatctacatctcgaagtatggtgcgacagcatgatgagactcactgacatagcttacgcctgacgtggtcgccaccgtagatgaaccttattgagtatcatggtgaccaatgtctggctctagttggacttgaagatgataaacatagccttacagagaattcctcagcttggagagagacatcgtagtccgagcatgatactctacttacggagtaaacggatacaggatgggccacacgatacactgtagctgtgctaccatccagatatcgatgctgatagctctgaatatgcgacttgaatgatatcttcatggcgtatgggaatgggtcctctgcggttgatgctcaccatgct

SEQ ID NO: 125401 - DNA, 462 bp, Arabidopsis thaliana columbia
  unsure (1)..(462): unsure at all n locations
ggaaagctggnacgcctgcaggtaccggtccggaattcccgggtcgacccacgcgtccgatggatctcgctaaacagatgcttgtggtgcaaccaaactcatacgcactagtggtgagcacagagaacataaccctcaactgggacttaggcgacgaccgatcaatgcttctatctaacctgattcttcgatcggcagaaactcttttcttttgtttaaccgatactatgatcgtatgcgacagatatgagctcaacatccgtcgacgcacaaggagctgatgacaatcttttggctggggttatccacgagaagacaagcactctaagtaatgaaccctaatcggagtgtacctttttaatatcctaatggggatagttggcaaaactgtgatgacaaacatctcatctctggagacaatctttctacgaatgcacaagctactaatatacttcgggaatc

SEQ ID NO: 125402 - DNA, 445 bp, Arabidopsis thaliana columbia
gtccaagggggggagtgtcagaggcgacagaatttaacgcggaggtctcttggagtagttctttaccgtgttgtactctattctggctttactacgaggtactgactgccaatttttgctctccgggcaaaaacataccaacggaaacaattttaaccaggtgggtgtaagtccacaggggggatgcaacttaatgttttttcgggggggcaccggtcctggatctcaatcgaccaagctcctgtagctgagattgtttacggaacgtgcttgcgttacgcttgaatgaccgcagcagtttttcctatgaatgccttgcagattcttatttttctaactactgaagcatcgacctgtttagtttccaactcaaattacggtacccaatatacgttatataaacttgattacttttgtcttttactgaaaaacccttcgtttgacc

SEQ ID NO: 125403 - DNA, 491 bp, Arabidopsis thaliana columbia
gcccattaagcgaggctactgcctgggcccagggcagtccgtggacaaaaaaccttactgcatgacctcccgctatcaaggaactgtatgatcaagtcgatgcacagagtgctgcagatgagactccgtatgccactagatcaggacaccccagttctatatatccatgcagcacgatcctgcattccactgaccgataaatgactggaccaccttttattttatggccaggagaccaacccacactcacttatctgagtacctggaccccatgtcccagcgaatgaacctacacactgcgacatgaaacttggtatcacagacagatctgcttaccacctataggcctcgctgaaaaacactccgtccccaagaattgtaaagcctgccataatttgtaccagttcgccgtgctgtgcagcgggcgctccgccctgagactacctcacgccctaatgcctgccttccgccgccatttcccgcgcttaagt

SEQ ID NO: 125404 - DNA, 492 bp, Arabidopsis thaliana columbia
ggaggctctacaccggctggcgccgcgtcagcgtgaccaagcttgactacgctgtacgctaatcctccgctgcatccatgacggaaccagtcttcatttacagcattcatggaacatgtgttctgagaagatgctggttctatttctgcagctgcacaagagtaggtttgtgctccgaatgggttagagctgaatgagactctcttgtttccgggggagatctgtggggttccttttagacccgtggaattgcattcgggttgatacacggacaatatctcctcctgtgtctccaaactcatatctagggatcgcttggaaggcactatatcttggccccctaccaatgaagctttatccatgctgcctggactccgtcgacgccatgcagtggttttcttccctcactgcagggggatcgctatagttaacgatttctcctggggttcccccttttgcaaatgtattttttacacgagataacccaggatt

SEQ ID NO: 125405 - DNA, 115 bp, Arabidopsis thaliana columbia
tacaccggtctggccactcattaccagacaccatccgctgcgaagactgtcatgtgctgcgcggattctcgtgcacctcgctaagacaagagcctccgtacattatctcaagtca

SEQ ID NO: 125406 - DNA, 578 bp, Arabidopsis thaliana columbia
  unsure (1)..(578): unsure at all n locations
gagctttgacgtcgcatgcacgcgtacgtagcttggatcctctagagcgggccgccctnnntttttttttttttttttttttttttttttttttttttttttttttttttttttttttttttttttttttttttttttnngggccggaaaaaaaaacttaaaaaggcctccccttcccccttggtttttttccttttaccaattcaaaatttaaaaccttaacctttttgcctccctgcctttttttcttccggaaccattttgaaaaaaattttttggccccggccttcccttgttttccttggtttttttctttaaacccctttggaacccaaacggacctttttttttccaacctttaaaaaaacccttgaaaattttcggacctttagggttgttcccaaaacctttccccttaaccccagggcaaaaacaatgggcggggtgggggccacccaacctttggttaaccaaccaccttggttgacctggtggctgccccatttgatttttgagtaacctgtttaaaccgttcccccttccccccggttttgaaaccttcgatgggacattttcca

SEQ ID NO: 125407 - DNA, 586 bp, Arabidopsis thaliana columbia
gacccacagaccgctttcccgggggaagggtcaacaaaagaaaaaagacgacaaaaaggggggcaatacacgccagaacgccaaaaaaacgggacccccgagccaaccccaacaagccaaaccacgccccggacaccacgacgaacgcgcaacaacacaaaccagtttttttacggggttggggaaccaaccaccaccacccccaacccaacggcgcacaccattacgccaataactcgcgaccccatccaatacgacaaaccagcggcccccaccgacgaaaagaccaacccctcaaaaaacaaacaaaaacgaaaacagtgagaactacacacacccgcggcgcgctccccacccacctgacgacacccggtaccacactggctacaacacacccaccacctaatgacccataatcaacagcaaacccaccaaaaccctcaccaaaacaacacagcgaaaaacccagcgaacacaagacgcccagaatctacaatagaacaaaccttcaactaaacaaaaacagagcgacaaggcacgacccttccgcgcgaacggacaacaaccttcaaaccccacgccaaag

SEQ ID NO: 125408 - DNA, 507 bp, Arabidopsis thaliana columbia
gcccgcgccgaacgatcaccctggcaagcttttaccaggccacggggccaaatcgttggtttggtcggaaggagcggtttggggagtctgaagtcccttttcgtgcctatagaatacgccgattaggggcccttgcaaaccacactggtctctagcaattcctgaaagaaaacacattccaataaaggaggttcattttttatcggagggtcaatacccaatccggcgagttggtgaatttacatgttcgatccaaccctcaccttggttcttcgcgccctcggccccaccgggcaagaggaaaggggcccttaggtccaagccccgagctaccggattggaggaagccgagtggaatgccgctcggaacctccatgccggctgccacacagatcttgggcccatttgtgaaacaatctcccaccgtgcttgagcaacccggtgggcctggttgcctggacccaccgcctcagcgggcaaatgtaggccagttatcctaaagggtgt

SEQ ID NO: 125409 - DNA, 575 bp, Arabidopsis thaliana columbia
  unsure (1)..(575): unsure at all n locations
acgcgtacgtaagcttggatcctatagagcggcctccctttgtggttgtgggcccagaaatagaaacacacggttgtataatggagtacatgtggggggaatttgaccacagacaggagaccattcgactagaggacaacatacgaaatccacaactgggggagaagccgtaaaaaatggcaaaactggacacacccatttttttttgggtgttggnggggccaaanccatgaacctgctaaactcggaatgggctcatcacccgtgaagagaaagcctcactccaggggattgaacaaaaccctggcgaaaactgtatacatcagagaaagaacatgtaagatctcgtaagacacgcaaaaagggctgatatcctcacactagctttggtaacgaaaatcctcacaggaaaataaacctgccgggggacaaaccctaaaccccctaggaaccgtaccccggaggtaaatacacggttcacgtatgatttgccgggagtggaactagagaatcccttgtgttaaacctcctcaataacgtggacatattaagggtgactgaaatacgggattttg

SEQ ID NO: 125410 - DNA, 489 bp, Arabidopsis thaliana columbia
ggagaggcggggacgccggccggtaccggtccggaattccggggttgacccacgcgtccgcccaggcgtccgcggatgtcagcggggctatgcctcttttgctaacacagcgacatcactcctcctcttcggtgtggaactctccaaccctaggaggctgattgcagtagctaacgccgtcattgcctggcactctggtaaaaactacttatgtagcgagctgcacccaaggtaggatttattagagaaatctgtcgcagagcagacatacgaacagtgactttctcatccaggcattagttattagagcccagggctttaagattcctgacggaataagcggagtcagaagggagcacacgatgggctgtgacggataaaccaccgcgatatgcatgctggagccgctttatacgaatgggacaatatagaaggggcgttaggctttgggcccatggcggcagatgctccgatggataagaatgttaa

SEQ ID NO: 125411 - DNA, 478 bp, Arabidopsis thaliana columbia
ctcacttttaggaaagctggtacgcctgcaggtaccggtccggaattcccgggttgacccacgcgttcggggcctggggttccaacccatatgtttaggaaagttattagtatcacaaaaactcactgcaagctaagacttacagccacccttgggagagaagacgaaaggattacagatttgaactttcttattgggccggaactctatgaaggctatttgtttgaattaggtaaaggaagctttaatgcgaatgttcagtgggctgaaggatggaggtccatgaacaaagaggtttttgcggaattttttaagaaagaaaacttctagaaaaagcaggccccttattgcatgaacccttaccaggtcaaaacctggtaagttttgaatcggttccatgaaccacaaccggggggataaattattgttcttgcaaacaaactttttgcgcttaccgaggttgcgaagaaacttccga

SEQ ID NO: 125412 - DNA, 321 bp, Arabidopsis thaliana columbia
agaccattctccaaaatgcctagtattccatagagacttggcttcttttggacccaggggcttggattcggggagccccgactaaccttcccggattttgataataatggaagcgtttgacgtctatgcccaaataacacaggagtgccttttttttgacccgaactaatgcatccaaactgcatcttctggtatttaagcggggggccataggagaaccaatagtcccctagttgaacctcaacgccttacctttttttcggtgagctcactttagagcaattcttcgggagactcaaaaagtaaccttcatcggagatt

SEQ ID NO: 125413 - DNA, 426 bp, Arabidopsis thaliana columbia
tctaaggtccgcagggaagctgcgacggctgaagtcctctgtcggagtcccaggctggcccacgtcgtccgatgcagctgaccaactgctatagatggtgctattccggacgaggctcgtgtgtcagatatgcacacaactatgagttcagcacccgccaaccctctatcgcgctgtctgattgcacttcgaggctcgaggggatatcagactgatatcagtgcgggcacacgtgctgggtaacaacggaacactgatgagcttttcttgataggggcgatcgaaaagccctcatcatccgtgatgctcatggcatccaggcttatcccacggcgaaccatgaccgcggcgacttgtaggttgtcgattgtgcgatgagacgcgagagactcaatgtgggtgtatgtataagctgtccatgacaga

SEQ ID NO: 125414 - DNA, 488 bp, Arabidopsis thaliana columbia
ctaaaggtccgctaggggagggctcggaacgcctgcaggaaccgggcccgatttcccgagttgacccacgcgtccgtctcacgctacaaggaaggttatttccaaaggcatgaggctgaccgggctgtagcaatagcaaggtcaaaaggatctataactgtacctactctcttgccattggactgacactgtcttagtcgtatcaaacacaccttcctccattttagaagagagatcaatcatgactttcgtggtgctcgaacagagaaacgttctagagctgccaaatcagccatcgcctggagggcgcagatgactatcattgtatgcatcgccaaagcagtcatcatacacgtgcataatgtcttagacgagcgctgcatccacccatatgagcaagacgcactaaattgagctcttacatagcagacacgaagagctggattaagatcgtgacacaccggtgttgacagggcgtttgcttacct

SEQ ID NO: 125415 - DNA, 468 bp, Arabidopsis thaliana columbia
aggaaacggtccgatataacagccttgaacaagacgagctgtctgaagttactgaagacagtcagaatcatccgaccgggacatctagccacgctcaataaccctctgtgactgactctcactgtgagacactatctctcttgagcagcgcccacgtctctgttctcggatggtgaaccagagctttttctttagggggcaaatgaagcaaccgcggcgcatgtgcgttctttattcctccagaggtgagcggggcacgatacattccgaggggccgcaaataaggattacccggcggtctgacctattatttggctgggggcgatgagggaattccttggtgcattggagatccctaatacaaaactgtgaaagcggcttgaagggaggtgcgagctcttttatataactgtcgatgtcaatatcgggaggtatgaacggttttggagcaataaaacctcacgcatt

SEQ ID NO: 125416 - DNA, 292 bp, Arabidopsis thaliana columbia
  unsure (1)..(292): unsure at all n locations
ccccttccgtaagctggaatcctttaaagcggccgccctttttttttttttttgaacctttgtccaatagggcttagagcgcgaaaataaggggtcgcgtcaattgtaaaaaggctntttacttccccaaccgaaaaggcttaattgcgacgtcatattggcactattgccacgtctcaatatcaattatccataatcttatattagctgtcatatataacgactaatagcctccagagccatccaactaatattaggcgtcgaggcccatggaagaaccaagagacggccg

SEQ ID NO: 125417 - DNA, 530 bp, Arabidopsis thaliana columbia
ccggctctatacaactcctttagggaaagctggtacgcctgcaggtaccggtccggaattcccgggtcgacccacgcgtccgcacgaccaaaccagctttactctcttttaactaagaaaattgagacgcgcatacattccgaattggcggagagctatgccagcgtcattgcactaagccatgttccataataccgatcatacgtttacgcaccatgaggccagaacctaacgtgaaccacgaccactatatggagactttaacttcgatcccggactcagagcgtcactaagacactggattgatcttccacaaacctattggccatactgacaatcggcgactacctcacggaaagtggatctacggtcaataacatcacgacttctaacgtgacttcatatctattccaactggagtactctccacctgtgctgtatccacctagagatattcagcgcgcgcgagatttccattcagcgatgctacgatcccacgcgcgaccggacaatgtataacactaagtcat

SEQ ID NO: 125418 - DNA, 572 bp, Arabidopsis thaliana columbia
agatgcactactggggaaaacacagcccgacactgctctatgcgcagaatagcattgttcgatgtcgctgctctctgccaatgtgatacgtactcgagctcgacaccgattatacaggtcctgatagaaactcaacaccgtagtgcgagaaccaagcgctgatcggtggcaacctaaggaagaactggtgattccttatggtttgaaggcagccaggaatttgccacatttatagtgttcgcttggaacggagggcaccttaggccttatataattcaagtatgatactagtggacctctaatgtctgctaagaacagtcgtaaggacatgttggcctcaaccagcgtgccatacttcggcaaccatagtttcacgcttagcaagacgataaaaaccttgtaaccttaaacaccctccaaccgatgtattacgagaaacctctgtctcaaatctcgtaagggatgtattgtccagaacattattttccacccctcttttgtttatgctcccatcaaattgctcacttcgctaaatctattcatcaacgagataacatcatcgggttagattc

SEQ ID NO: 125419 - DNA, 572 bp, Arabidopsis thaliana columbia
  unsure (1)..(572): unsure at all n locations
aaccaacaaagcgggcttcccaggcgggggagaaccccanaaacagcagggacgaggcgaaagcgggccgagggacaagccggacacaagcgaacaaggccgacacgcaccccccgccgaaaaaaccaaggaacccgagccggccccccaaagcgcccggccttttttaacggggggggcaaagaacccgcgagccccgccccaaaaaaacccacacaaaacgagggcgcgaagaacacagggaagaagccggggagggacggggcaacaggagcggccacagcaccaaccgaaaacagcgggaaacccgaggaaaacgcaacgaaccggacggggcgaaacgggaaaggaaggcacccagagaaaaaccccgcagaccggccgcccgccacccccggccgaaaaccaaacgccagagcaaggaccaccgcagcgagccaaacacgggggaaccccgagagccggacacccgcaagggggcgacaaagagggcacaacaccgagaggaagggacggcgagccaaaggacgagcgcaggcccaaaaagccccaaaaaaaacaggggaggcaaa

SEQ ID NO: 125420 - DNA, 518 bp, Arabidopsis thaliana columbia
  unsure (1)..(518): unsure at all n locations
agagacgaggagaggagaaagagggcgagggggcagccccggtcatgtgcccaaagacaccattagggaggcaggcccgcccgcgagaccccgaaccgaaatccccggttcaaccaaccacgtcgacgcacgcttgggacccaaaaacccgagatgagcgctcaatcccaacaaaaacagcccccagctgccgagcgcaccgcgcaaggaacacgaggaacgagcacgaaagccagaacgggaccggaacaccttcgacagaagcacgataaaggcctcncacagacaaagcaaaccaaactgcgacacggcacgaccgcaccaggaaaaacacccatgtaaaccaggagctagatcatggaacacagcgtgagaaccccggcaagactgagagaccaaggcccgcacggaggaccatagaccttgccggagggagaccaacatcccggcgcgctcacaagccaaagacaacccagagagctcgagagaccccagagatgcacgcggagcgaggcaac

SEQ ID NO: 125421 - DNA, 394 bp, Arabidopsis thaliana columbia
cccgcgcgcacgaaccggtgcgaactcccgtgttgcccaagcgagcgataaccagaatgacaagcatatactactaagtgacgaacacgaacctggaagcctactatcaaaaacccggactgagataaagccacattcaacatgcaacgggcagcaagggctgtgccagcagaccacatgatgactgtcttccaggggaacagacgggccctaggctatgtaaggatctttcatacgacaatacctatggaactgatgacggaaccaatggggcagaccctgttcttcactgtgagagggagacccgacgttaaaaaatgtgacagaagacatgggaaaactcctactacctggaggaaggattcccttgcccagcacataacaaatcataaga

SEQ ID NO: 125422 - DNA, 443 bp, Arabidopsis thaliana columbia
tttcgtacaataaggaagccactagtatggggtaaagtgacgagtactggtgaccacagcagggcccttattatgaatgaccaaaaattgatccaacgcagcggacggaaaattggtgcgtccagctaagttgctccttttcaacaaagcaggttttttagtgggtggggacattaacagacggggagtacgaaatcattccgatgcaccggcgttgaattgacttctgccgtccccctgtaacacaatacacgagctggacttcacgtgcgccaccccctgcattggtcgagtattacggttgtctagcatcccttagattgctacagaagccctccttaaagaacatgtacttaaggttctaggtgaaacctgaagacggcgaaacggtcaccttccccgaaaaaactccctcggattttgcctagggaggcataccccgg

SEQ ID NO: 125423 - DNA, 454 bp, Arabidopsis thaliana columbia
gaacccttgggagttgcacttactccgcttatttaggcgcgtaagcccaccacattaataccgactggaccgatgacaatatattgactttcggtcatcgacatctgcctgacaagagctaacgatataatgctatggcacaagcccaccctcgcatgttggttcccttcaagtgtgcttggctcggatatatgtttatcgggggcggtaacacacaggagaacacttttcgttccgcataattaaaggattgtgagagagaacaatttgggacacccctgcccaacttcccttgagcataacgcctggtgccgcattgctttcacaaaattcgaggtttacgggattatgcgattcaccaccagtattacgtttagcctctgttcctcattgattccagaaaccccgaaatgcgcttgagcacagagaaatatataatctcccaatccaaatc

SEQ ID NO: 125424 - DNA, 424 bp, Arabidopsis thaliana columbia
aaaagggcatagaaagccacagcagcccagaccacgacagagcaaacgagcaagcgacaccacggaacaccgcaagcgaacacacagaccccagaaagcacagaaaacacgacgcaacgggcaacccccgacaacaacagaccacagaaacagaggaagaacagcacaacccaaacaagagcgagcgaccacagaccccgagcacttcaacgcggggagacacacacaaggcacccgacacgcccgggggcaaacaaccacaacacagcagccagagacggaagagccgcgacagggcacaaacgagccacgaacaacggccccggaccacaaaccaccggaccacggccacggccacaaaaagggcgccagagcacccacaggcacgcacgacacaacccaagcccccgacccaaccgcgcaa

SEQ ID NO: 125425 - DNA, 372 bp, Arabidopsis thaliana columbia
  unsure (1)..(372): unsure at all n locations
cacccaggggcgggncccaaacaaagactttagaccaatgaagactcgcacgcgctacagctgcgacgggaaacctaaaccaaacccctgcctatgagtcgccgggtcattcgtcatcaggcacgctgacagagcccagggctcctaacactgctcgctaccttacgccaaaatcgatacataaaactcttttattggaggggggatccaccccttgcctcacaagactcacttgaataatcgcccacccatggaatataaagccccctctaaggtgcatccacgctgagtaacacggagattgcctcttccatctatcgctactctgtagagagcagcaatccccttgtcgcggcgttgcagcctactggc

SEQ ID NO: 125426 - DNA, 164 bp, Arabidopsis thaliana columbia
tctaagatcacactagagggaagcagcgccgccagcacggacacggtgcggaattgccatggtttgcccgcgcgcgttttttactcaatacactattagagggatctcagtcctgtgatctcacattgcgattctgacataacgcacgttatctggattctgtg

SEQ ID NO: 125427 - DNA, 455 bp, Arabidopsis thaliana columbia
ccccccggcgggaaccggcccggaattacaggttttgccaaccctgtcctgactaccttcttaccgcatcaacttgacatgcttgtttatagtaaacttcccaaataaatttcataccgacaattatggtggatgggctccctgaacacatagttcctaatgattgagcaacttcaatccttggtctttcaattaatggcagaatattatctgagcgggtccatctaccttctttaacagatctttgatttggatatattgacactacagcggtaaatctaatataactaacaatggttaattccttggcgtcaaaacatccggaaatcatgatagataaacaagctcttggagtagtgaccagtcttatcgataattgccgaattttatgggagtcctaaacagcatgtggccatgttaggtttacttccctattctaaaagactataactatt

SEQ ID NO: 125428 - DNA, 465 bp, Arabidopsis thaliana columbia
  unsure (1)..(465): unsure at all n locations
ggggcggcgccccngcggaccggaccgaattccgggtttcccagcggacgttaatcgtttgggctattgagggtgtaagcggagattagtacttacagtgacaacattcccggaatggggttaacaactttcatcgattgagagtagcttacgccctttggttggcatatagaggagttttttttgggggggggaaccatgcttgtagttcttgagaacccaatgccctgggtaagccagaaccgcaattcttaacaaggaaatttcctttcataaggccctgatctccattctctttggaaagaaaccctcctacgagtggaaccctgggacaggttgccatattacttactacgtgatagcctctgggtgagtccggctttaagcgggcgattcgagattgttagggtccctcagtgagcgaggccctcgaagccttttgtaacattgtggggcccaattaaa

SEQ ID NO: 125429 - DNA, 470 bp, Arabidopsis thaliana columbia
ggaaagcaggcccgcctgcaagtaccggaccggaattcccgggttgtcccacgcgtgcggaccatcttgctgacaacaatacacattggtgagacaacttcttatgaaaacctatttatggtggtgcacgatgtggctgccccctcgaataagacctccgttgccatgcttatgacatctctggtgggcactttcttaccagacgcttttttaagacagttaaaactacaacctaaccgtaccaagtttattcccggccgctttatgacactttttctatcctacaatggtgtcctgaacactgtttcatgctaattagattctacatcttttcacgttttaccttttcctttttaggtattaagaaagggattggttacggggctcttgtaaattggctcccaaggaatccggtttattcgttctccattcccactgtgggttatgcgggtttggtaagctcattagat

SEQ ID NO: 125430 - DNA, 475 bp, Arabidopsis thaliana columbia
gggagcagcgacgcctgctggtgcccggtccggaaattcaggatttttccacacatgcaaattccttctagtgagacgagcaacttaatccgatgattacagaacgtggttagtaccttggaacattggagcctatggactcattctgactaccatggttcctgtatgaatgtggtgttaacacacggcacttacagatagaccatatcttttgttacaagagaacacatatctgattaattacacaagcataccgacctatgttcttgcgctccatctcacacataaaagggactacgaacttactttatccatcaaaggaactttctgcagatgaagtggacttctgacctaagacctatgactggcagaaaacgtggccttacaagcacccttcttagcccagtcattggccctttttaggttggccattttttataaggaaaaaactgggtatttctcttcctgagtttag

SEQ ID NO: 125431 - DNA, 641 bp, Arabidopsis thaliana columbia
gcgacgaaggcaggaacccctagagcggccgtcccccgggggccgtgaccaaagaaaaaaggtcgacccgactcccagggccggaagaaaaacccaaaaaagcgggacgggccaccacccagaacacaccagagggtggggggaaccccgcatagggccgcaccacaacaaggggccccccaaagcggggcccggcctcgtatttatacagggggggagcgggccgaaagcccaacgggcgaagagacgaaccaccccgccaagaacacacagacgggcttccgcacggggaaaaggcgcccaaaaccccgacccccaggagggcggcaacccggacgccgggaccgggaaacatggggaaccggccaaccatccccccaaaacccggaaccaccccgagggcaggaaaccaaaccacaacccggcggggaacgggaccgaaccccagggccggacccacagggacgaccaccggaaaacgagaaccaggcccgccaggcgccccagacacaccccaaaagacgcaccccaaagagccggggcaaaaacaagggcaaaaccgacaccgcagggaaacacgcaatcccccccaaccccacccaacagcacgacccgaagccaaaaaggccacacccgggggg

SEQ ID NO: 125432 - DNA, 472 bp, Arabidopsis thaliana columbia
acgcccgccggtagccggaccggaattcccgggtttgcccaagcgttcggccacgcgtgcagaatgaatgtacatgattgggggttggagtgaaaaaccctgtaacctggggcattgatgaggaattcctgtcttatcttttggatacctaggaaaaacgctgcgtaaagaacagatttgggacagggtggccggcttttttttaccttgtgagaccggataatgttcattccgtagaggttgtacacttgggtttcgaacttagagactctcccttaggctatttccgggccgaggaaattttggaggaaattttcttttaacaagtgggcaaggttcccaaaccaatggggggtcctataaggctacggagcggtttttaaaaatttttatatggaattgaacatgggtgattcattaagcctgtgacaaataggaaggaaggcgggcctttttaaggaagcaaggctta

SEQ ID NO: 125433 - DNA, 364 bp, Arabidopsis thaliana columbia
  unsure (1)..(364): unsure at all n locations
agacctatagaacttgagcctccctcgtagctgtcttacgcgctttttttttaacaactatctataatcatgaatgacatgaatacaactgaccttaatgtatttgtggagaagcaagatatactnctgtcacagacttgccacacagtatcattcttacaatcagtggaaccttaaaaaataatttaatttccaaatgggcctaaattaataaactttgttcacaacttttcgggaaaaccctgggggtttgtgaaaaaaaggccttaaaaaaaaaaaaaaccttgaatattccccccgaaaaaacctttttaggaaaaaaccccccaaaaaaagaaagggttttgcccccccccccccccca

SEQ ID NO: 125434 - DNA, 532 bp, Arabidopsis thaliana columbia
gggggcccccccggcgaaccccgaccgaaatacgggtttaacccagccgccctcccaacaatccagtcggaggtacatacctaataccttgcacgataccttgctgcgtgattggattgggggacacctacctggttattctgggacagtgattatacgtcgtgcgatatatcatagtgaggaacatactcgtcacagaagaccagccttttttttttggggggcacacactcatgcacacaaggaagagcagcggaataagccgcacataggtgtgcttacacaatggtatatccctgcaccttccccccctccatgagacgaacagcatccttgtgtcgcctatcttgtacattcctcctcagacgcagagtttaatgagccgtcgggaagaacctaatatactagggtagtctcgcccactgcccggtgacactcacacatccatgtaccccagacacgcgatcggaagccatgttcataacggtaagactcacatcatccagtcgtttctcggagagtaagatagcgc

SEQ ID NO: 125435 - DNA, 516 bp, Arabidopsis thaliana columbia
  unsure (1)..(516): unsure at all n locations
ttgagacttgacgccatgcccgtcgtagcttgatctctaagcgcgccttttttttttatagacagacttatcgntatatccaggcgtattggatcattgcatatttcaaacctgaaccatgtaaactgtgattttgtagtgagggaagccacaacgagtaatacccttacttgttctacataactttggtcgacaacagtaatcaaaaatcgttagcatatcaacttgtggtacacttgacatagattacatctcactctataccgaacgatggagtactacatcattactaagacctttaggctcacaccgactctgcttcngttatgtaccatctgtgaggtcttctgtcaagaactgcagctcttaaatacacgatctgctcacccttgagtatagataccctcctgaaaaattgctctactatacctgctaacactttcctttatgaactgacctagggtctctgttaccatatcttccataccatcagatgtgccgaactggacttgatcg

SEQ ID NO: 125436 - DNA, 513 bp, Arabidopsis thaliana columbia
cagctctaataccactcactattgggaaagctggtacccctgccgggacccgtcccgaatttccgggtcacccaccccttccgcaagaaggatccaatccaaaccaagaaacctccggccgagaagaaaaatcctgaaacctccagggggaagcctatcattggcctttcattatggacggctggggcctctcttctttctgcctatctggtggatgccataaagggtgcctcagcctcatggaatataccaatagctttaatcagtaccatcttgcttcctatagttggaaccgcagctgaccatgcaggggctatcatgtttgccatgaaagacaagctggatctgtctttgggagtggctattgggtcctcgatccagatttccatgtttgcggtcccattctgcgtggtgattggatggatgatgggtcaacagatggaccttaacttccagctttttgagacggcgatgctgttcatcactgttatagtagtagcattttttctccag

SEQ ID NO: 125437 - DNA, 449 bp, Arabidopsis thaliana columbia
cgaagctcccgccccagcaaaaaccacggccagaagttcagtgataaccggggaggttcgtaataacaagccaaattaaacaacccaaggtcgatgacaaacaaacgggcttacttccaaatcaaccgttaccctgcgggccttccccaaccggcttaaggcaccggcctcgttagagaacgccaggacacgaaacgatccaaggctttttccgagcgccctagtgggagacccctttcgggcgaggagccaactgcccaatgccttgtgggccgcggggatccgaatgaagcacactttcatttgcgaatacaagggctcgctcccggaatgaagtatggtttgcataatgtcaagcaaaccggttttcttagctcatacgacacacggtaacaggaatgccaagcccgtctgttgacccccaactcacgaaagaacacaaacggcgg

SEQ ID NO: 125438 - DNA, 313 bp, Arabidopsis thaliana columbia
  unsure (1)..(313): unsure at all n locations
gtaagctaggatcctctagagcggcttttcctnggggtggtgagcccaagcaaaaaaacctgtcaatcaaagcgggggccccctttgagcaccagcaccaattttcaatatggggtgggttaaagagttgtgactatactaattccgagcatgcggaggccgctatacaaaaacaaaggcgaaaacaatttttttttatgggagtcagacacagccacgcgcaacgctggccccaaaacagcaaaccgacgcgggcgagggggaaacccgcccaccagagggccggcggcagccgagcccacaaagggcgggg

SEQ ID NO: 125439 - DNA, 485 bp, Arabidopsis thaliana columbia
gcccccgacccaacaaggcctggcccgacacgccacagtttgcccccagggcctttgcagaggagaggcacattatgggttctgcatagatgcggcaaccatgattccgagcccgccttgaaacttcaacattgggatccttcttcacaatggagaacatggcaaaagaactttatgctgcgacactaagggtacccgtttatggttttttcacgaggtcaaacggttgtcaaagataaaggaacccctaacgaggatccataactagcttaaaccgaagctcctgcttaacttttcgagtgcaccctctgctattggagccttctcccagttaagggattatttccttcgctgttctgaatcccgaaccgacaatgacgccaaggttgatttgttgaaatctaggagccgcaaggcgttggttccgtaaaacccttccacactactggggcaccgccatacagaccgccttgaataattctaaa

SEQ ID NO: 125440 - DNA, 594 bp, Arabidopsis thaliana columbia
  unsure (1)..(594): unsure at all n locations
gaagcnnggaccacagagcggctgccagggggggaaggcacacaaaaaaaaccccggcccaaaggggcagataagggagacaccgacccaaaaacaacaccacgggaaagagaccaagccacaagcgccacaccggcggaggccgcgaacgggaggaaaaacacacccaccgttttctcgganagttgagcgcccacacacccagcccccagacaaaaacggccgcaaccagcggaggagggagcgccacccaaagcgacagcccccacccacagcgaaccaccgcggagcaccggacaagggaccaccgaggaagccgcacgccacggaggggagacgcgaaggacccaaaacacgggggggcaaagaccacgcaaaacggacacggccccgcgaaggcccaacacccaagcgcaaccaacacggcaaaaaaaagagccaaagacccaacgcccggcgcgcaacagcgcggggcaacccccaacacacccgcaggagccccccaggaagcaggaaccccaacacgacacagagcccggggagaagaacaaaacgcgacgcggcacggaagcccgaacgacagccacccacaac

SEQ ID NO: 125441 - DNA, 389 bp, Arabidopsis thaliana columbia
gggaagctgcacgcatgcggtaccggaacagaatgcgggttgtccacgcggtcccgaaactggagcccgcttttagttggttatggcgatgttgtggggttcggccctaagatccactaaaggcttgacgatggtctacgccgcgtagggaataaaaaaagtaggcagaggccctatgagcccttattggcagacgaatgattttttggaagcatggtgccggccatggttctacctttatggaacaaaaccaaggatcttgggcttatgccgatatgagaagggactactacactaaggtgaacccttatatgcatggcccgccacgaggctccaacggcttttatgaattaaaacggattcctaggtttctaccctcccgaaaaaaa

SEQ ID NO: 125442 - DNA, 488 bp, Arabidopsis thaliana columbia
  unsure (1)..(488): unsure at all n locations
caagaaccgcgccgaaatacacgatgtaacccaagcggacctatcangcatactctacgcaaacatatgtggttagcactacataaaggaagggaagatctcttcgattaaccatgtttagataacctatctgcatcactgtgagaaagacctgctttggactactgtggataagtccgatgctaaaccttatttatggaggtgacagtaggtttgacaaaatactcacgttatctatctgcatcatatgagctctcttcctgacattataacatgtgactcactgccggaacctgatctgatgcaaaaatggatgaggatggacgtagtgaagacttacttgcagagaaagttatttgacattcgggcccatggactcaaaacgttcgagacctccctgtccacaggaaatgactcactgcgataggccctagccgctaaatgcaccagaaactctggccaccgagctgtgtggaattggtcccttt

SEQ ID NO: 125443 - DNA, 409 bp, Arabidopsis thaliana columbia
gaagcgccgcacagcccgcggaaaacccagaattccagactggcgcactgggggaggatcctagatcgcgatagaaccgtgttcgttcggtggtttccgatactctacgcaatatggggggagccgcaaaacacgtcccaatgataacactgcccatgagtttgcggattatttggtggtaacccaacgggaactgggtaattttctaaagggcggtccacttaagccgccacccggatctgaaaccacgtctaagcagggatctgaatctgaaataaaggggaagatggttcgatatcctgggtaaaacagttcgcataacccaacaaaagaatggttggggccccaaccaggtagaacaaacccattaaaggaaagaatccgttacatacccccttaaatcgaagac

SEQ ID NO: 125444 - DNA, 497 bp, Arabidopsis thaliana columbia
gtcctggacttcaggggtttaccaaccggtcaactattcggaacccccttggagcattacacgcatttgggggtccattggccggtttattaggaaaaggtccgatctgccccgtaggttggtgctaattaaagagtggtaaatcttcacaggtacaaacgtgtggtcccacacactcaacttttgttttattcggcgtgcacatctatcccgggtgattctggagtgatgtcataacatggaagatctgatataggctatgtgactagaccatgactcaaagatctagaatctccaacgtatcacggacggggagggtggtttggccctctgtgtattatgtcttaaatagagacaccttagagccttcctgtttaaaatgcttctcggaaccggatggtgtccaggcgtaacgttatcctgaggctacaattccccccggccggggaccttgttcatcccataccgtccttacacaggaaatgattgaatacggc

SEQ ID NO: 125445 - DNA, 209 bp, Arabidopsis thaliana columbia
ggataggcaggtacgccggcaagtaccggaacggaatagccggttcgccccacgcgtccggtacgggaaaataaagcaggacgtatagacttgctgggcgagatacggctgacatgggacccatgatgcatgaaagacactcgctatgggagcggaatcctcatggaccctgctcggtgactcatagacactttggcagactatcagat

SEQ ID NO: 125446 - DNA, 629 bp, Arabidopsis thaliana columbia
  unsure (1)..(629): unsure at all n locations
gaagagctttgacgtcgcatgcacgcgtacgtaagcctcggattcggctcgagttaaagtgtcatttttaggattttctaagaagaaaaaaaaacagggaagatctttttaagcttctctttcctctctcttctaatcttctttcctcttcctaaacctctctcaaggttcttttttcttttttccagaaggccaaaaattcctttaagaacccggttttatccaacccctttttattattcttcattggccaataattggtttccccattggggattcctataacccaccggttgctctttcgttaaaaggtattctcggttggcacttaatgtctcctatggaccggaccactaaaccgtttttacccggccgggattcgattctaatgatcggtcctaccggtccgtatcactctcaaaagcaaaacttgacctttagctggattaatcaaccaaaggacaccaggttcttcaccatgttgcctataagtacaccgagtaatagtaatggtgttgtcggaaacatcntggttcgaattcgattcagatgatacatcaaccggttttgaancatcccggtttgaggagaatccgattcctcctcctgctccttgtgaagagcagact

SEQ ID NO: 125447 - DNA, 409 bp, Arabidopsis thaliana columbia
aacaaggccgaggccgcgtggatctattttctgagagatacagactaaacacgctcgcaaacgtatggtccaccctcatagattaagcggataaactggcttatataatggctattagcctgactaggccgcctaggatcaactggagctcgctcatcttttttttaggggtcaccctggcagaaccagtctcactgaccaccggtgttatcagcaaatactcgcccggcgcccagccacagatacatagcatggtccatgtctggctgaccaacccgtggtaggccttgtgcccgcgacgctgccctaccgcgaaccctcgagatgcgggccctcgcccccactgccgataagtttcaagacacgcccccgagaatctgccgagccgttagcgcagatgcacttccgc

SEQ ID NO: 125448 - DNA, 371 bp, Arabidopsis thaliana columbia
cgtcctggccagaccatgacctgcaggctctcacatgaggacttgatcgtcgaagattatttctggaacagctgccgaacgacgtttgagcgcttccacacgacactcttctcacgtgatcgaacatgctatgtctcatctccggctcttctaagggatagatctccttctgtgagaataacacgaggagccttagcattttctgaaacgtagacagctaccccacatatttatgcggaggctaggcgatctcctgagccaccgagatagacaactataggccgagaccttgaagctctgcttaaaatatcaaaatattcaccctcgagactcaccatagatcgcaatttgcttagaccacagaccgagga

SEQ ID NO: 125449 - DNA, 331 bp, Arabidopsis thaliana columbia
ggggaggcggggacgccagaaggcacgcggccggtttagcaggttctagccacgtaacagatacttaacaggctaaatgtatagttattcagcatggcacaggtgtggggatatatcccgtgagctatattatcatcttaagtataagagcgatgctggatcgagagggacgggcacaggtatatggatgatatcacaggccttgcaatttttcgtcgatcgatgcatgcagaatgaatctatgctagttactaaaacatatatgatgatgacaacttcagatacgaaacacagatgtttatccattcacgatgactcgtctcttaggaca

SEQ ID NO: 125450 - DNA, 613 bp, Arabidopsis thaliana columbia
cccttcctaagcctggaatccctaaaacgggctgcccttgggtttagagaccccattttatacacagacatttaaggacaaactttctttattttcaaaataccaatccataacaaaaatcctttcaaaccatccaaggtccaaccctatttacaactggggggaccgccacccgggaaaaaaataattcaaaaatttttcttcccgagggggggaaaaaccggcccagaagttttcagaatgtggaagaaccacaaattagaccccgccgggaattctaaacctcgaaccaacgcccaaggccaaacccttattagaagatccattgccatccgaacactaccgcggtttaacaaaaacaaacttccattgaaaaaaatcccccccaaccattccccgtaaagggggaaccccttaacaccttaaataaaccccaccttccaaccgtcaaccccccaaaccttttgaatgtctccccctaacaaccggagaagccgctcgggtcaaataattcccagaaaaacccccgggccccggcaaatataacacaacccgcgggggcaacaaaaagcccaaaagcagacgtttaaggggaccccaaaacaacttgccc

SEQ ID NO: 125451 - DNA, 416 bp, Arabidopsis thaliana columbia
acgaccgggggacccggtccgaactccccgactttgaccggatgcgtctgacttaatcccctgtacatgtccactttcgttatcttttaggggattgagaatccgttaatctgttttcctacgtgaacctccgttgggcgaattggaggagtcgagctaaggtatatgtacctgccaacaccagaacgatctgattttggttccgtttgttaccagatctcataccatctaacgacgagtactagcgtctcagggtcatcgacagatcggatctagcttttgaagagcacaggatgtacgcttgtgaatatccctcggcgcgagtatttgacgggaacctctaatctaattggcggtatgcctctagacggagacgaacgtgctgccattagctgtgatcccagcttcatacgaat

SEQ ID NO: 125452 - DNA, 467 bp, Arabidopsis thaliana columbia
taagacccgtaggggggcgcccccccgcgggaccgggcccggactcccgttttgcgcagatttcgccccacgttgtggtacttaccatttgttgcacttttgactattgtggcttgtcaccgtgctagagctttgttcgaaggcacatgagtggactgaacgcctctacatggcttggttccataaacgtacggtttgatttctgtggaatgccaggcctgagaaaccacaagcggtcactcccttacgtcctcaatggaggtgatcatgcttcatttacaagctccgtgcgcccaagctctcctgagagactttgcacctgggtcgggatgagctccgtatggatcgtaatctaatgccgagcggataagttgggcggctcttacggatggactcatgcccttctattcactgatcgcgctgcatatggagggtatccccctcagtgctgcttggaacctgcatac

SEQ ID NO: 125453 - DNA, 207 bp, Arabidopsis thaliana columbia
ggggaacccgccgcggtcgggatgaaggcagatttgctacgactaatgtacagacacaggatataatgtaatattgagacgagtaaactgtgggtacactatacctgccaatccgaccgcagtagacgccccttcaaatgccatggtgttgccaaaagtcgagatgcagtctaacctgtattgctgtttatagagggtcaaatcgat

SEQ ID NO: 125454 - DNA, 362 bp, Arabidopsis thaliana columbia
  unsure (1)..(362): unsure at all n locations
ccaagaaccggnccggaagaaacgccctggncgacgagcgcagtctcagcaaccacacttttttgacatgggagtacggagaaagcatcttatcagttgtatgatccaacactactgtaacaatacttctgctgatccaccgcggtttatgaatatgattggatccttctatacccagtccagtttcgtcttttttttggggggaaagactgttcacgccaacgattcatgatgttatagaaaagctaatgacgtaatttaatacacaaatgtataattgacattcatcttgaaccacatgaacccaaacatttcttggctttttcccatttggaaataacggggtagaacttttactcttt

SEQ ID NO: 125455 - DNA, 149 bp, Arabidopsis thaliana columbia
  unsure (1)..(149): unsure at all n locations
gccggaatcggtcggcgtttcgggngactgaacctcngaccaagcnccagggcncgaggaggttctgcngacgagcanagggacaaggagcaaagaagagttttcttcccattgatgacgattgcttcgttgccaaggtccagcaggca

SEQ ID NO: 125456 - DNA, 630 bp, Arabidopsis thaliana columbia
  unsure (1)..(630): unsure at all n locations
gacgcgcatgcacgcgtacgtaagctcggaattcggctcgagatttagctgtcagctgaaatccttgcgaatgtgaagtttatccaagagaagcgtctgattgggaagtactttgaggagataagccaggacacggggaagtatgtgtttggtgtggaagatacgttgaacgctttggagtctggtgctattgagacactgattgtttggtgaaatctcgatatcaacagatatgtgatgaagaacagtgcgactggtgaaactgtgatcaanacacctgacaaggaaacaagaagccacactgagaacttcaaagtagccgacagtgacttggctttggacgtggaggagaagctgtcgttactggagtggcttgccaatgagtacaggcgttttggttgtgcgttagagtttgtgaccaacaagtcacaggaagggtctcagttttgcagagggtttggaggaattcggaggatacttcgttaccagcttgacatgactgcctttgatttcgaggatggagaagctcttgatgatgattcggattgacaatcaatcaaattctcaccatcgctggttggggaagatggcgctccggcatgcctgaaccagcttgcgcgggctgtcggg

SEQ ID NO: 125457 - DNA, 494 bp, Arabidopsis thaliana columbia
  unsure (1)..(494): unsure at all n locations
nnnnnnnnnnnnnnnnnnnnnnnnnnnnnnnnnnnnnnnnnnnnnnnnnnnnnnnnnnnnnnnnnnnnnnnnnnccttattttttttctttttggactcataaactaacacctcaatctcaatggggacgacctacattacattacataaggcgaatccatgtcgctaaaaaaaccttacggaattggtgatgagagactccaactttttttgacagccgtgcaccatacgagaagacaatagaatgaaaaatgttgtctgagctgcaagaacggaagacaatctgacgtctttttccacgaactggtgatacctctcttttctaatgtcaccaaagaagagctgagaaccggctcccggatttacatttagacgccctcatgaaacaaattttgagcgcctagtagcaggaacatacccttgttacaatctttggaatgaaataaccgatgatgttaacacctacaccaggatcttctggattccttggagac

SEQ ID NO: 125458 - DNA, 416 bp, Arabidopsis thaliana columbia
ccccgctggaaccgttccggaataacccctggatcgcggactcaacaaaacggcggacgtcaatgtttgggatttagtcctaccgatactgcacgggaacaaccaaaacttgggcccttaattggccctattaagatggtagcgatcaattctgggtaccgaccagtccctgattggactagtggaattgttgtaattaccgaaagaaagcctctcacagggatgatcgaagagattgaggtatttaacgacgcgaatcacctcttttactttcgtggtatctggccgaggaccgcccttcctttatacatgcatggcaagatggcgcaaagcatgccttctcttacgcagaattatttgtgttatgcgaaggagccaacgtcgtggacttgtcttactgacttgaaaacaagctc

SEQ ID NO: 125459 - DNA, 505 bp, Arabidopsis thaliana columbia
  unsure (1)..(505): unsure at all n locations
ctctaaagagtanttgttgcaggtaacaaattacatttctattagaaaaggtttatggttgatgatatagttaaacaaacttatctaaatataccatttccaactgcatattgcatcagagaattacttgctcaaaattacatcattgacaaactaggattttttaaatcttttaagcttaaattatcatcataaatcaaatttcattttgaaaaccaagaaaatataaacccgtaaaccttacacaaaaatgcttctcatgttgttgtagctgttttcttatttttctcttttggaacagatcatctttttgtttagttccgataaagtcataagtataatttgggaacatatactgttatcataacatccttgaaatttanaaatagattatagcttgaccaccaaaactatttgataagttgttgtctagaaacaaaagcatatttataatattttgataagacgtagtaactatgacgcgcactaatccgaaatccacagt

SEQ ID NO: 125460 - DNA, 511 bp, Arabidopsis thaliana columbia
  unsure (1)..(511): unsure at all n locations
nnnnnnnnnnnnnnnnnnnnnnnnnnnnnnnnnnnnnnnnnnnnnnnnnnnnnnnnnnnnnnnnnnnnnnnnncttttttttttttttttttttttttttttttttttttttttttttttggctctgggtaattaacatttaagatgctaatgttattgcttcacaagttttagtcaacctcaaatacatcgatgtcactatctaaatagacatctggtacttcatcattttttttctcttgatcttctggctctgttccttcttgttctctttgcactgctcgagcaattgcggattccaaccttgtgcttacagtttcccatgacacaagcttttccatgaatgtatttatgtattcagctcttcggttctcaaaatccaaatagtaagcgtgctcccaggtatcaatggtgagaagtggaaaataatcccatacgagcggatttactgcattgggcgtcttcactataacaagtttcttgtcttcctcctttgggagaggattaacgg

SEQ ID NO: 125461 - DNA, 501 bp, Arabidopsis thaliana columbia
  unsure (1)..(501): unsure at all n locations
nnnnnnnnnnnnnnnnnnnnnnnnnnnnnnnnnnnnnnnnnnnnnnnnnnnnnnnnnnnnnnnnnnnnnnnnnnctttttttttttttttacagacagcacaagcagctttaaagccaagcaatatttgtttatctcaaccgtaatgattcccataaattataaacaataatgtctacaagctgctcaatcatcagtcagcagtgaaatcaggctcaggaggcttctgcagcttcaccaaatccctaatctttgtgttccggttcctgtgaatggtgcgaagcgcattagccgcaaacttagtggcaagaaatgcagccccaatggagtatgaaggtccagcggttgagctggacacagccgcggcctcggcttctgcctcttccattttcttcctcttgcagtatctacgccaggcagcctggatgaaacaagcagcccaagtcctccattggtgagagtaaaacctgaaatgtgtgctgcacttgcctgctatgtaagc

SEQ ID NO: 125462 - DNA, 487 bp, Arabidopsis thaliana columbia
atgacgtcgcatgcacgcgtacgtaagcttggatcctctagagcggccgcccttttgggttgggggttttttttttttttttttttttttttttttttttttttttttttttttatttttttttttataattaaattttttttggaaaagaaaaaaggaatacccggggattaaaagccccaacgggaaaagaaaaacccctagccaattggtcatggggggggaaaacaaccgtgttccggttttttcccaaggttgaaaccctctgcccgggggggggttcgctccccaatggccaggaaacgaaatccgctaaacctttggaaaaccaaaaaaccggttttaaaaaaagaggggggctggcccattaaaaggagaaagggccctttaatttttgttaaaaacacgagttccttttcaaaaaggtggatccgatcccacggtagaaaaccaaaggcttaaaaaattaagtgccatgggaaaaaat

SEQ ID NO: 125463 - DNA, 493 bp, Arabidopsis thaliana columbia
  unsure (1)..(493): unsure at all n locations
gtttctnnnnnnnnnnnnnnnnnnnnnnnnnnnnnnnnnnnnnnnnnnnnnnnnnnnnnnnnnnnnnnnnnnnnnnnnnnnnctttttttttttttttggcaaaaaagaaaagggttacatttgtaaacaaactcctttgttgttctgggattatataaagtgaacaatacataaactggattatacattctttaacataagaaaaacagagagatcgccatgtatgatttttgtcttctcatttctattattaacgatggctgttattaaaattaaaataaagcattgtatatataataaatcaggcaaggccattcttgatatcctggacaagctttttagaaattgttctgtaagctttctcggatggatgaacgaagtcgtagaagacgtatttatctgggttggggcatggtattatagccgtaatcatacaacaacacccatttttctcattagaaaatccgtatcttctataatttttaataacat

SEQ ID NO: 125464 - DNA, 509 bp, Arabidopsis thaliana columbia
  unsure (1)..(509): unsure at all n locations
cttacaagactatgacgtctgcatgcacgcgtacgtaagcttggatcctctagagcggccgcccttggtgtttgagctttttttttttttttntaaaaaaaaaagagagcattattctatttttcgccatgcttaacgatcaagaattttagctctctctactttcattttccccctcatcaaaatttctcgatgttgtttcgtttccaccataatatggacttacttgtctgagtatatatatatatgctaatttatttctctgccccgattatttatgcctaattattttatttacccccaatcccccatatatatatatataaactcatcagtagaagaactccggctaagtcactagaactccggtggagaaaatttggccggcggtgtaaggagaggttganaattttgatctacatctctctttcctttcatcatttgctatatgactcgatcgacactctgtgctgcaaaatgctttttctcctctgtaaataaatatgtca

SEQ ID NO: 125465 - DNA, 440 bp, Arabidopsis thaliana columbia
tgacgtcgcatgcacgcgtacgtaagcttggatcctctagagcggccgccctttttttttttttttgggagaggaaataaaacttttattgcttaagaaaatggatccactggacattataagtttaaagaacaatgttttcaactgatgctgagaagttgtgttgcagaccaagactgtcccggctctagcttgacatccccaagcttttttttgtggacgcacacaaagactctgtaacaagcctccatctgagtatgcgggttccacaagaccgcattcgaccaatttgggtttttgatgattattttatcacccaagccattatcaaactggaattcattgggagcatcaagatagacggtttccacaaatccaggaaaagagactgcctacctgtcttctttaccctctattgggttcttaggggctggatcctt

SEQ ID NO: 125466 - DNA, 502 bp, Arabidopsis thaliana columbia
  unsure (1)..(502): unsure at all n locations
nnnnnnnnnnnnnnnnnnnnnnnnnnnnnnnnnnnnnnnnnnnnnnnnnnnnnnnnnnnnnnnnncttttttttttttttttttttttttttttttaaataaacttagaaaggtaagtatttctcaaaaaaaaaaaaatacaaatgaaagcaaaatcaaccagtgttttaagtaagatgaacaaaaacgcaaacttgtgttactttgaactttatgtctttatcctttagaaaaataaacaatcacttgcaatttaaaaccactcagcggaaggaaaaacgcaagttatcaattctctgcagcagcacttgcagcactcaagtccacagacaaatcaagagtctttccagtgatcttggtgtacatgtcaagtacatctacaactgtactctcgaaatgtgttgttgcatcgtaagtagcagagatgaaacagttatcttcttcttgaatattggttggaacgtatgtgtcataagaatgatagaagatctcatcagtaggt

SEQ ID NO: 125467 - DNA, 517 bp, Arabidopsis thaliana columbia
  unsure (1)..(517): unsure at all n locations
tgggatttgcggnnnnnnnnnnnnnnnnnnnnnnnnnnnnnnnnnnnnnnnnnnnnnnnnnnnnnnnnnnnnnnnnnnnnnnnnnctttttttttttttttcattggttacattgggagataaaaaacgactctgttagaactgaaaagttattacaggttttattaattggccaacattttaagaaaaacagaccatctaaagaggtctttctacatgataaacaacgtgaaacgttctatggagagattaagaaggttcgtaagctttagactgaaactgctgaacaaaagtgccatgacgtatacattcacggcccaacttcgtggagactaggcttttttggcaacatcgccatcggtagtttgatcaaacccgactggaccattctgtgcgtaaccgtattatgaatcttcaaattgatcgtcactgccaccaaattgctcatcgcctcccaaaccgttttgaggctgacgatccgcattattggctaatgggtggttgctatcaaacttgt

SEQ ID NO: 125468 - DNA, 522 bp, Arabidopsis thaliana columbia
gaatccattagggtgacacttattagagagctatgacgtcgcatgcacgcgtacgtaagcttggatcctctagagcggccgccctttttttttttttttgtcaaacaagatcttcattcattcaatcctcaaaagaaggaggttcatacacaaagacataagataatacaatgaaattaaagataggggcttcatgagtttttcaaagagatgtgtacttttaaaaaaagcttacaaggattgaaagattcgaccatgaagtcgggcttggcgaaatccttgcaaacaatgcatccgagcttttgatcatgtgctccacggaggaggatgttgggttggtgaggttgaaaaggaaacggtaaccaactctaaaagacatggtcataatgccgtacttttccaaacaaacagaaggttgcaaattatccaagcaaaagattaatacatgactgaccttgataattggtgtatgggtagatagagagttgtagaggcttcggtaacacctactccgtagaaata

SEQ ID NO: 125469 - DNA, 476 bp, Arabidopsis thaliana columbia
  unsure (1)..(476): unsure at all n locations
gacgtcgaacgcacgcgtacgtaagcttggatcctctagagcggtctccctttttgttttttttttttaaaagtaaagcgatacataacaggtcggcccagataagtattacatcgtgcaactgactattactgccagaatctatcaaaaaacaagacacggactttgataaagattgtataaagaaaggattaaaccgtagctcattttttctgggacanaacagatataaacagactcactcaggttcttcctcgtcatcagtgtcacctacaaacatggaagccattttcatcgctaaatttgcagctatttccctcctctggaaatcaggcatcaatcgcaagttgtcccggatgtttcctatttctgacatcaactgttccacatcttcaaactcgtaacatttttcattttctgtgcccaaaggtttttcatctgttactattgctctgtcagtgtcattttgcagctct

SEQ ID NO: 125470 - DNA, 297 bp, Arabidopsis thaliana columbia
  unsure (1)..(297): unsure at all n locations
gagttcatgccgctacctacttgatcttacacggttcctttgttttttttttttaaaaaagaattcataaaggactccattacaatcaccctaatattatgatttgatcttacaaactctgtatcatacccttttgcaactaataggggaaaaaatacccaccctttatatggtgcggaaccaccccaccgggcacggacaaagaccttcttacactagtctttacccttcaggagtccttccganaatgaaaaaatagaaataaaccttttcttttggaaccaattttgactaaac

SEQ ID NO: 125471 - DNA, 512 bp, Arabidopsis thaliana columbia
  unsure (1)..(512): unsure at all n locations
nnnnnnnnnnnnnnnnnnnnnnnnnnnnnnnnnnnnnnnnnnnnnnnnnnnnnnnnnnnnnnnnnnnnnnnnnnctttttttttttttttttcagacaacacaataagttgtcaataagatttcagacaacacactaagatttcagacaacacaataagatttcagacacaaaagcaattcaaacacagcactacacaaagtataagatttcagacaacagaaagagcacataatatttacttcagtaaatatcttggtcttggcatgaacagaaagtccacctgatccagtgctctccggattgtcccctgaacccatatgagactgttcctcttcaatcctagatgtcacttgcttgtagatctcctctgacttctcattgatgaagcttccatccgctgttctgtgtgtctcatctagcagctcaaggaaatcaggagttttttctccagtcttctcacaccgttttcttacacgagctttgtatgaggtctggcctgaacagtgttta

SEQ ID NO: 125472 - DNA, 288 bp, Arabidopsis thaliana columbia
  unsure (1)..(288): unsure at all n locations
tgggttggtggggccttaagaactatgacgtgctgccgcgtacgtagctgatcttagacggcgnctttttttttttttttggacactagcttctctagaagacagtccaaaaggtccaaaaggttttgccttttaaacccttaatttttaaaattgggggggtttaagccggggctataactttcccgaattccggggggggggggggaaaaaatggggggaaaaaggaaaaaaaaccccctttttttttttttaacccccccggggggggggaccccccaaaaaaaa

SEQ ID NO: 125473 - DNA, 327 bp, Arabidopsis thaliana columbia
  unsure (1)..(327): unsure at all n locations
ggttgttagggccttagaaggctatgcgccatgccgcgtcgtagctgatcttaagcgcgctnntttttttttaaccattctaagggacccccatcactggtgggagggaccacccaccttcaggcttttctaaaaactaaaggttttaaaaaaaaaccaaaccaaaccccaaaaattttttggggaaaaaatgggagaaaccccccctttttcccccgggggggggattggggggcccgccccccccccggggggggtggggggcccaccccttcccccctttttaagggggggaaaccgggccccccctttttttaaaaaaaaaaa

SEQ ID NO: 125474 - DNA, 487 bp, Arabidopsis thaliana columbia
gacgtcgcatgcacgcgtacgtaagcttggatcctctagagcggccgccctttttgtttttttttttttttttttttttttttttttttttttttttttttttttttttttttttttttttttttttttttcccaaaagcccaggcttgaaaaatttacccaaaaaaaaagaaccccagggtttttaaaacccaaagaaaagtgcctttttgttgggggggccccaaaccagaatttaagggactgaaccacccaaaaatttttaaaaaatttccccgcccggcaaaaccagtaaaaaaaagatacccggcgcctacccaattgggcagggaaacgaacaaaagggggcctaaccaatggagcattgccacaggaatcctagaatttgacgggtttacccaaaaaacaaacatttgggttgggttgggaaaaaaaagaacagttggggaaaaacttgggaaaaggaaaaatggggcagctctcgaaa

SEQ ID NO: 125475 - DNA, 517 bp, Arabidopsis thaliana columbia
  unsure (1)..(517): unsure at all n locations
nnnnnnnnnnnnnnnnnnnnnnnnnnnnnnnnnnnnnnnnnnnnnnnnnnnnnnnnnnnnnnnnnnnnnnnnnnctttttttttttttttttgttccccaaacacatgtgactcctacgctggaataatgcacgttatcatcgttccatacgttgatccgaattctgatgagactagatgatgataatctgctgcctaggaccagatcggaggactttagatactagctactggtacgacgacagaagcttaccttgatgcttcaacaatcaaaccaagtccagcgtagctctgctgctagctaaagagcactcggtttgattccgtttgggttacacattatggtctttttgacattgaccaacgcggaaaaactccaaagcaaaaccttcggatcagcttatgaccgtttgccgaacatccattcttaagatatccaaagctcgaatgggggaaagtatacgacctggtatacgtccacagaacatactgatgagcactaggctttgattatctt

SEQ ID NO: 125476 - DNA, 527 bp, Arabidopsis thaliana columbia
  unsure (1)..(527): unsure at all n locations
tgcttgcggattgctnnnnnnnnnnnnnnnnnnnnnnnnnnnnnnnnnnnnnnnnnnnnnnnnnnnnnnnnnnnnnnnnnnnnnnnnnnnncttttttttttttttttttgattgttgcgttctcaaaacaatatagtaagagagaaacttttgccaaatacaactgaagcaaaatgtatcatatcataataccaacttattcattttttcagagttgcgactggaaaagcaaaggacttttaaattgcttaatgagctcattaggcacttttcttcacctctgcggccttaatgatgtcgataaactcaggctttagagaagcaccaccgaccaagaaaccatcaacatcggcctgtccacctagctccttgcagttaccaccattgacggatcctccataaatgatgcgggttgtagcagcgacatcagcactcacgttcttggccagccatttcctcagctcatcgtgtacttcttgagcttgggctgggctagcgacctttccggttccaatggcccacactg

SEQ ID NO: 125477 - DNA, 513 bp, Arabidopsis thaliana columbia
ctttaggtgaacacttattagagagctatgacgtcgcatgcacgcgtacgtaagcttggatcctctagagcggccgcccttttttttttttttttttttgacgaggcaaagaattattactgatacaaaaaacacagatgtttttttctataaactgagagatttcaaacaatgaaacaagtgaagttttctcaaggcaaaaaattaaaagaaaaacaaaaatgtggtggatctaatctaaaagtggcacaagtaaagtaatagtacaactccttctcactgctttcacctgcacacataatacaaaaactgttttgttaaaaagaaaagaacattttcagaatttgaaatacataaaatctcatttaaccaattttgatcgagaaaaaaagatggtatagcaaatgaataaatcctagcattctgctttcaaaatgctctgatcaattgtttggtgtatgcggttccagttacggttggttccagttacggttatggctattttgggtaacc

SEQ ID NO: 125478 - DNA, 435 bp, Arabidopsis thaliana columbia
ggggtccactctctagagcatcttgacgtcgcctgcgcgcctacgtaagctaggctcctatgaggagcggccgcccttttttttttttttttcgagaaaccaaaagagagaagaacactaggaggggcgatgagcccgcttctagatagggagggagacgagaattcatctgattagcgaggggcccgaggaggacacaggctctcttcatgagtagagataaccccagaccccacgaagagagtatatcttttttgtgggggaggcaagcaccgattccccccgggattagactataagaggttatcaaacccctaatcgatccagggccttatcaaaccatacgtctgttttattatttcgcgcccccacacccaccctttcgcacagaacattaattttccccctaccgccccctcccggacgttacccgct

SEQ ID NO: 125479 - DNA, 503 bp, Arabidopsis thaliana columbia
atctctggcctctcgtgcgcgctcacatgagcttgggtcctctagagagggccctctctttttttttttttctttttagaagtccacaggacaccacccggggcggtaaaacgtcgaccctattgagtgaagatgctgtgggacgactcctcgagcaaggtggagcaccaggataagcatacagaaagaatcccaggcccccgcacggggccttttactatgagagcaggtgcatgatctcccgccgaggtcctctgtagagacggagactcgccgagcggccgcatccttcaccggagccataggctttctatagctctcgaaccgatccataagcgcggctccgggatcctaagccacctaggggtcttgagatttcccatgatcacctccctgggggaatgcggccccgtgccccgttgtaggagcaacagccccgatttaccggacaagctaagaagcccgccccggttgtaaagtaccccttttccccaaacctaacc

SEQ ID NO: 125480 - DNA, 531 bp, Arabidopsis thaliana columbia
  unsure (1)..(531): unsure at all n locations
ttcttgcggaatactannnnnnnnnnnnnnnnnnnnnnnnnnnnnnnnnnnnnnnnnnnnnnnnnnnnnnnnnnnnnnnnnnnnnnnnnnncttttttttttttttttaagacggtaaactaaaaactctttctatgctggtccctaatgtagataacaactcatgttgcgaagcaaagggtacctggaagataaataatgtcccccccaaaatcatagtatttcctgaacaagaattattaccagcagagttgtttttgggaccttgaacctccataggataattcttgatactacctacagaacccattgtctgagagctaagctgtgaactcgctgaacaaccctaaaagttgcccgtgctcatgggatgcattgcacccgagcttatctgaggactcataggaggactttggatcacttgatggggactcattggagaactctgactcatttgctgtggactggactggtgaatctgctgctgggctattccagctgatggtgaccctacttggagtggtgatagta

SEQ ID NO: 125481 - DNA, 497 bp, Arabidopsis thaliana columbia
ctatagaagagttatgacgtcgcatgcacgcgtacgtaagcttggatcctctagagcggtcgccctttggggttgggggtttttttttttattttttttttttttttttgttttttttttttgtttttttttttttttttttttattttttggttttttttttttttttgaaaaccccggtttccggtttttttaaaggggggggttcgggggcagcctttaactcatggggggggaggaaaaaccaaaagggtgttgcccacaaaagggaaagaacttgctgggggaaccctggtaaaaaaaaaaaaaaatgttttttaaaaacaaaaagtgaatttgatgggtttccccaaaaaattttttggggggatttttttgttattaacgtggccttgggggggaaaaaatttcaaaggggagctttgggggctcttttttaaaagggggtttaagagggaggccccctttaggggaaaaaaactcctggcccggtttta

SEQ ID NO: 125482 - DNA, 522 bp, Arabidopsis thaliana columbia
  unsure (1)..(522): unsure at all n locations
nnnnnnnnnnnnnnnnnnnnnnnnnnnnnnnnnnnnnnnnnnnnnnnnnnnnnnnnnnnnnnnnnnnnnnnnnctttttttttttttttttttttttttttttttttttttttttttttttttttttttttttcctggcccccaattgtaaaatcacaattctttgcaaatcgcaactttacacggtttctggacttacatacacttgatttctcgttcactaacaataactttaccgaaatacatcggaatcgtgaattgtaaatgaacattcttttttttatcaaaatttaactcaccatccctgtgtgtgtctaaaaatgtaggcagaggctggtttcttcattcattgagttcttcatcatcattcattacaaaaatgtccctccaatgtatctttaaaaccagcttcattagtcttaaacatcaccggcaatggaaaccttacacctttcgcagcacaagcttaatgtttcggtttaatccgattctccaaactaaacgagaaatactgaggaaact

SEQ ID NO: 125483 - DNA, 521 bp, Arabidopsis thaliana columbia
  unsure (1)..(521): unsure at all n locations
nnnnnnnnnnnnnnnnnnnnnnnnnnnnnnnnnnnnnnnnnnnnnnnnnnnnnnnnnnnnnnnnnnnnnnnnnctttttttttttttttttctttaaacatatcaacatacaattagcagcatctctacaagtttacacttctctcataaaacccaactctacgaataaaagagaaggtgttttcatttatcctcttcgtctaattgcatccaaactctcagcagagacaaatacagcttgcttttaacgtcacaaggctcgaaccagacgagctgcaaatgctccatctagtgagtgtttcactgggtttgataaaaagaagccttgtgaggttacaaaactcgacggtacaaaactggttactggatctatggtgaattcaggatgtcttaagagaaatgcttcgacccttccttcattttcctcggggtctatggagcaagtactgtataccaacaccccaccgtgcttcaccagtttggaggcagaatcaagaagctcatcctgcagtttagtgagc

SEQ ID NO: 125484 - DNA, 339 bp, Arabidopsis thaliana columbia
  unsure (1)..(339): unsure at all n locations
cacgcctacgtaagctnggatcctctagagcggttgcccgngggggaaaaggcggaanaagaaaanancncancacaagaagaanacaagccancanaancancaanggaaaacccgaannaaacaccncaaaacnngcaanaaagcnagcnncncnagncanngaaggggagnccancaaacnanngcanctccgctcgttggggtggaggcccananncancnaanaacacanccaacncngcngcnagngcagnaccngagggcaccaaaanngnanacccnccaccanancancgannnagaacancggcncccgnnnnccaacccaggaagaaa

SEQ ID NO: 125485 - DNA, 548 bp, Arabidopsis thaliana columbia
  unsure (1)..(548): unsure at all n locations
tcgcactgcaccgccgtaccgtaanngcttggatcccctctagagcgggcctgccctttggggtttgggtggtttcaacttacataaaagcttcaaattgccggctactgtcttttgatctcacaccgggctgaagcctcacacaaagacagaagtcgggcgaacgcaggccagaagccaagggaaacacaaggaagaaaatgggaggtgaaccccgggcccgttcctggtgggaagagccaacccattggatggtgcacgacgaaccacaacaggtcgcaagctgcgagacccttgccagagaaggcccccacatcaccactgaaagaaacaagctgccggccacccagatggtggcgggaacttatcatagaagtgagccaggggcccctaatgcccgtgagaggcgcccccaaagccaaaggtggcagaacgaaccatatgtatgccacatcaacctgctaaatcgccgacgtgagagaacgatgcacttgtaattctataaaccagtgctatacacgagggcggataaaccacacccggtgggc

SEQ ID NO: 125486 - DNA, 135 bp, Arabidopsis thaliana columbia
agggcatctagccacggccacagcacaatctgcctctatctatcttatattccatttactaaactgcataacctcgcgctactgatcttcgattactgaccaatagtatgggtggccgaggcgaatagagcgagg

SEQ ID NO: 125487 - DNA, 662 bp, Arabidopsis thaliana columbia
  unsure (1)..(662): unsure at all n locations
nnnnnnnnnnnnnnnnnnnnnnnnnnnnnnnnnnnnnnnnnnnnnnnnnnnnnnnnnnnnnnnnnnnnnnnctttttttttttttttaatacaagtttctggagttatatttattttataagaaaaatacaacccaagatcaagagtaaagcttttacacttgccaaacggaagaatcctaaaccaagtgattcagaaatctctatgagttccctatgggtaccaaaaaatttcaattgagagtttaagcagcaggaggcctgagttcttgatcacgagatgtgtcacgaacggattgaggcatataatgccacattggcatgtaaccgtaacttggataaacagccattttgttgtggttaaatgcagctggaatatgaggtatgaaccctgaagatggagccgtcatagactttaactgttgttctgtcttctctttatccgccttcaacaccagcttttcctccctcagctcgttcttctccgccttgagactcttgatctcctctaaagcttctggttagtttcttcaagcttaagagcttcatctctaagttgattcaatatacggattgcatcatcgagtatagccggtttatcagtcttaggagtcctnccaggctccnaaaccgagctcaaatccataaacctctcatttagct

SEQ ID NO: 125488 - DNA, 562 bp, Arabidopsis thaliana columbia
  unsure (1)..(562): unsure at all n locations
ggattcatcnnnnnnnnnnnnnnnnnnnnnnnnnnnnnnnnnnnnnnnnnnnnnnnnnnnnnnnnnnnnnnnnnnnnnnnnnctttttgttttgtttttttttttttttttttttttttttttttttttttttttttttttttntgggggggaaaaaaaaacacaaagaagatcatgggtcatgcgtggatcataagcatttgaatgggttatataacccaaaaatgaaaagggggagagagtataaaagactcaagaatcaaaatgaatctctgcttttattgttttgttagaaaaaaaaatttaatcgggccacataatatatggggttggggagcttgaaggttcttttggaaactggacaaccaaaaaaggtgttcttttgggcacccatctctccccaaacttttgacccaaaatttggaagccatgtcctaaaatgtgttttgtattggctcacacttttttttttaatattttctcccctaaaaaaggggttacaccagcgtggggaaaccggtttaaataatattttggacgggggcagatctgagattctttt

SEQ ID NO: 125489 - DNA, 374 bp, Arabidopsis thaliana columbia
tgcgccagagttctcctggcccgcgttcataggaacccccccacgaggtgggttcgccgccgtcctgtatgacccctcacggcactgctactcagagtacatctctcttctatttgatcccatgcaccctctccacaccagagtacgccatgttagttaccagctctcatccacgcgtgagggttcgtcctttgtccagtttgtgtatatgcacttactacttccttactgccgtcgttcattcgtgtttttctgtctttagtgtattgtgagctcttttctcgtttatcttcggaatttctactttgctgagggagaggtgtacggctacctcggcacccagagttagtgtatgcggagaccccggcccacat

SEQ ID NO: 125490 - DNA, 185 bp, Arabidopsis thaliana columbia
tacgatagtgggccccccgagccagagacacgcagccacgctcgcgcgggcttctgacgctgtcggggcgcgccccgccgcccaagcatgacgcagcgcgggcttgcgtgctgatcaagggaccagccgcgcgcgcagaacgcgtctgcggatcgacggagccgcagggtcacgacaggtgggcg

SEQ ID NO: 125491 - DNA, 650 bp, Arabidopsis thaliana columbia
  unsure (1)..(650): unsure at all n locations
nnnnnnnnnnnnnnnnnnnnnnnnnnnnnnnnnnnnnnnnnnnnnnnnnnnnnnnnnnnnnnnnctttttttttttttttttaaaggaaacaattaaaccgtttgattacatataagactttacataatccaacttttatatgaagctactacaaacaagattcaaagattccatctaatcttcaatcttcatcttcaacatccttcaatatctctccacttaagatacactagcccagctctatagtgcgtgaacgcaccagcaacaaccagaacatgaaacaactgatggctatgtcctgctatatcgaatttacccggcatccatctctctgggatcctagttgcataaaccagagctcctaacccataaagcaaacccatcaaaatctcataacctgtcgtgtgaagggcttcaggttggtcccaaaagattatcagcttgtgaagaatcggagctaagccagagaatcccattccaaagaacagagacgccctcaccacccgaaactccgggctttggaaaaccgggaggagagaaacaagcacagtggcgattcctaagatggttatgaatcctaagtagaggttgcagaagaaaggatcacacatgaaggagtaataaaccgggagggtagaagggaagtcgc

SEQ ID NO: 125492 - DNA, 579 bp, Arabidopsis thaliana columbia
  unsure (1)..(579): unsure at all n locations
gtgnnnnnnnnnnnnnnnnnnnnnnnnnnnnnnnnnnnnnnnnnnnnnnnnnnnnnnnnnnnnnnnnnncttnnttttttttttttttttttttttttttttttttttttttttttttttttttttttttttggggggagaagagaagccctttctgatgaatatacctttatttaatcgcttacagaaaattttttgtacttttgtaacactaggcacttttacattttttttaaactcggttatatatcatttggaactttttagaactggtacaagggttcccttcccaatattcatagatatatatcctggggagttaatttaatttctcaacggcgggattcttggtgtttttgaactgggaacagtcctttttaacggggatgggaaagctgagagtaagagaacaacggggaggaaggttattaattgcggggggaaaaaaaggaagatgatttgcatttcccattattttaatggacagacacactttttttgtttctccactatcctggctattcctcgatcctggagacgtaaacttgacgacgttgttcaagtgggtcacgcctttgc

SEQ ID NO: 125493 - DNA, 644 bp, Arabidopsis thaliana columbia
  unsure (1)..(644): unsure at all n locations
nnnnnnnnnnnnnnnnnnnnnnnnnnnnnnnnnnnnnnnnnnnnnnnnnnnnnnnnnnnnnnnnnnnnnnctttttttttttttttttttttttaggctcaaacaacccttagtgcattactttgtatgttcgaacataaagagaaagaataggcgacaaagaaacagaggttaggtgagttttgggtatgtttgggagcttggttaatcgttagttgttactatactagctcaagaaagagaatattgtttctagtggattctaaaactcctcattttcaaccactgatgagtcatcttcatcattactaaaccggattatagaagaagactcatacatgcttttggacctgcaattttgggttgcaagcatgttgacttgtccatgatgtgagatctctaccatcacagtttcatcatttgatggcagtggttgtttccatggctctccatctattctcatataagcatgcttcgccgcacctttcttaaactctaatcgaactcggtttgcctgtgcaagtcttgtcccatgaccatttggagagagcagaataagaccatgccaagcatttcgaaacccaacgatttcgatgagtccatcgtcaacgaatggtgcagttaggcttctatcacgttgtttc

SEQ ID NO: 125494 - DNA, 662 bp, Arabidopsis thaliana columbia
  unsure (1)..(662): unsure at all n locations
nnnnnnnnnnnnnnnnnnnnnnnnnnnnnnnnnnnnnnnnnnnnnnnnnnnnnnnnnnnnnncttttttttttttttttttttgttagtaaaataacctttcattttccaataatggtggtcttgtatatataaacctttcactacacnntacatgtagtaaaatcatctcacgttaaaccatacaaaggctactcctacttacgacaaacatctaacggtaaaacatctaacaaggacttgacttttgtctgcatgtctttggttttgtctcttttttcaataacaaattcaatttccaacaattgaacttggatacaactgtgcaccttgccccataataactggtttaaactttaaaccacagagtaaccggattttggtttgttcacggatgtaattgatcctactaggattatcctacggatctcaaagcttaaaactagacaatttcttgagcaatgagaagcaaaaccaatctgaacattgctgatgcatcggttgaacatgtcatccagaaaccaaactaggaagagagtaacatccatgctccaaacactgggaaggtaattagtgcagatgccatgaaaaacaccacttctctgtttgcgagagccgctgtgatctcggttctttcatctcatgctcgatgaagccttgcac

SEQ ID NO: 125495 - DNA, 327 bp, Arabidopsis thaliana columbia
agttaaatacttaacgccgacatcggtcacgcgcagtgatcggaacgtaatagctatgtcactgtccgagacgcccctatccccccaaaacagtacgccctcgagacgcgaattggtgtgtgtactacgtcacaccgcgtgtatcttcctgcctctattgccacgatctgctaaccagagcgggacgggcccttaagagattacgcgcggcacggagcgcaagcgacagaagtggtatgcgcatagttggatgaatgttgttacgccccacggtcgcgccccccgaatatacgccagaccagtctatcgagtgacagacccgacctt

SEQ ID NO: 125496 - DNA, 182 bp, Arabidopsis thaliana columbia
  unsure (1)..(182): unsure at all n locations
gacgtcgcatgcacgcgtacgtaagcttggatcctctagagcggccgccctttttttttttttttaatggagaattaggtcttgtttctaatacttctcgtcatatacgaagtattgtatacaaatgcatacanttgactatgtataactgtcttatagtgaaacaaatgtntcagcattag

SEQ ID NO: 125497 - DNA, 660 bp, Arabidopsis thaliana columbia
  unsure (1)..(660): unsure at all n locations
nnnnnnnnnnnnnnnnnnnnnnnnnnnnnnnnnnnnnnnnnnnnnnnnnnnnnnnnnnnnnnnnncttttttttttttttttcgccaaaataatataatatattaaaattaatatacaaaaaaaaaacctatttctaaaaagaacctcgaattttaacgagagacaaaacagaaaaaatatatatagcatcgttaattattaaatcatgtaaacgagtgtccacatttctcgtacaagtacaacaatctatcacctaattcttcggaattcacctggccattttttatctgaagatgcatagagtaaaagagtcgctctccatgagaccttgaagatgaagcacccacaagaaccaacccatcttcttctacaccactcaagacattcccaaacgaacatttttcagtctgtaacgatgaaatttggaccatcacttcagtctcactgagcctagtcgaagaaactgtcgacgcatagcttgtaaccccttcctctgacttactgttttggtcggtgaaacgagatctctttgacccgaaatttgaaacgagagctcttctttcttcttcatgagctntttaacttgctcttgcagctctggtatgtacttcaatgcttgtgaaactgttgccgaaacacttaacttcttcgtttgattg

SEQ ID NO: 125498 - DNA, 628 bp, Arabidopsis thaliana columbia
  unsure (1)..(628): unsure at all n locations
atgacgtcgcatgcacgcgtacgtaagcttggatcctctagagcggccgccctttntttttttttttttttttttttttttttttattatgtttttttttttgggactacaaactagggaccccaaactaggtttaaatttgttgtttgaaaaaaaatttgggaactcaactgggggagctcaaccagcgagttgaaaggaactagctgtttttgaatggttggcggacaattttgtaagttcaaactaatgaggttcccctccgggggggggcttccatatcgggatttgttgagctagattggttggactaggatttttggcctgcattttttttcctaaatttttcttactaaagttaggggcgttccaagtggggaatttcaaatttcgagttttgactttggttttgggactttgtacactggtttttggaacctggttttttttatccacacccatttctcctccccccgggttttttcattttaccttttttattcaaagaagtttcactttggaccttttctttggatctttgacatctcttttttcttgggaagggtaagaagcgacacttaagaaattacccgttggcttttttgagaacccttgcttgaggacgggt

SEQ ID NO: 125499 - DNA, 649 bp, Arabidopsis thaliana columbia
  unsure (1)..(649): unsure at all n locations
nnnnnnnnnnnnnnnnnnnnnnnnnnnnnnnnnnnnnnnnnnnnnnnnnnnnnnnnnnnnnntgcctttttttttttttttggctcatatttatttttattagataactgaattgaaatgtctcattacaattttatgtcagagaactctctagtgcattgaaagggttcaaactcaaattatacaaatttagtcttcgaatggaatgatgatttcttctttttgttgttgtagtcagaagaatgatattatctcacaaggtggtaacagaggaagaactctgaagctgcctcttgacaagatttgtgtagattccattaaggctgagaagctcatcatgagtgcctttctcagccacctcaccatctgatataaccgccacacagtctgcagtcttgaccgtcgataacctatgagctatcaccaacaccgttcttcccgccattaacgagtccatcgcatcctgaacaagatattcgctttcagcgtcgagtgcactcgtggcttcatcaaggagcanaacactncgggtttgtaagaagcgccctcgcgattgcaatcctttgcttctgtcctcctgagagccgtaatccacgttctcctacaacnagtgttgtacttatccggaaacgcttcaatgaactcgtgt

SEQ ID NO: 125500 - DNA, 641 bp, Arabidopsis thaliana columbia
  unsure (1)..(641): unsure at all n locations
taaagagctatgacgtncatgcacgcgtacgtaagctggatcctctaagcggcgccttttttttttttttaacaaatttggatccttatactagtaaatcaccccgttatataatttatgggtgatattcggccatcaaggtaaggttatattcatttcattttcacaaaaaatggaaaagcaattgattccagacatcaggaactccatgtacacaccaatgagtacagtcagaatacgatgccgggtttttcaaccggtcttcatttagaggttcccagaatttccggtacaccgatggatgaccatcttttcgatactcagacaactgagtgatgtttataactgagacctttggtcccaatctctccaaaactctcttcaccatcctcattgtcggaatgtccgacccacttccccaataactctcttcctctattggtttcttctccccgtagcagtttccttcgcttcccgggttccattctcggctccattgatgtgtaggagacattgtaacgaagaaaactcgctttttgtttggatcgacattgttagcaacccaatcaccccaactatccattgccatctncattccctcggcgctcttcacctnctcgcatgaccctttttcttcactg

SEQ ID NO: 125501 - DNA, 647 bp, Arabidopsis thaliana columbia
  unsure (1)..(647): unsure at all n locations
atgacgtcgcatgcacgcgtacgtaagcttggatcctctagagcggcccgccttttttttttttttttttaaacaaacactntttgttcttgggttatataaaatggacaatatttaaaagcctgtaatttgaattatacattgtttactataagaaaaacgaatagattgtcatgaatcttatacatttacatatatttatcgatatggtgataattttcaaagattataataaaacattgtaggaaataaggaattagctaggcaaggcctttcgctatctgatagacaataggtttagatattacttcgtaggctttctgggaagggtgagcaaagtcatagaagacgtatttatctggatggaagcatggtattattgcattcggcatacaacaacaagcttttttcgcttctgtaaacccataggccataggatttttgacaagatccataagagtaccgtatatgtcgacgtaaacaaactttgcatctttgaaatcatattctactgcgtaacttgtaagacctttctgcaatttcatgttgaagtcctccgtaattctattcaagaggaagttacccattcgaatacccaccgaatgaggctcgatggataggcaaacatcccacaggcatcactccca

SEQ ID NO: 125502 - DNA, 440 bp, Arabidopsis thaliana columbia
acgtcgcacgcacgcgtacgtaagcttggatcctctagagcggcctgccttttttttttttttttttttttttttagttcatcacaggttcaaaccaaagtctactaaacataagaagagtcttcccatccgttctacattaaaaataacaaaccaaactcaacagagtactcaacttttgtccgcactgagctaaattcctaagagcttgctacgaaaacaatgacctgaaattcccaagaaccagcaagatcacttgttattattcgctgcaagtttagctgcaacttgctcctctgacaagggtaagtaatatatcctggggatcgcttttgtcttcttaatagatcatcaagagtgacaatgggaggttcttgttcctcaggggctataggaggagggggaggcagaggaagacgttctacaccgtgaggtgggtt

SEQ ID NO: 125503 - DNA, 654 bp, Arabidopsis thaliana columbia
  unsure (1)..(654): unsure at all n locations
nnnnnnnnnnnnnnnnnnnnnnnnnnnnnnnnnnnnnnnnnnnnnnnnnnnnnnnnnnnnnnnnnnnnnnnnctttttttttttttttaactaacttctattctttttttctttaagaataaaaaacatgcatggcatgagaacaattggaataacctctgtttgggagagagactgtgatctcactctttttgacatctattgagagaccaaacaattatacaacaaatcaccataagcttctctttctgttaatcaaataccctcttggcattttcacctggtatcaccaatcatgtttcatcatcgaaatcatcattcactgagttctcttggcagataaacgtgttatcctcaaccggattggaaacaacagcaggatcaggctcccatatcgttggctcattaccctgagcggtgttctcaccatcttgctcctctgcagcttgttcagtctcattacacagttggtctgttgcaccttgatctccgtccaaaccagtgggctcaccagtctttggttctgaacccatctcagtttcggtttgttcttcattcccaaggaaagctacagtgacagcttcttgttcctctgtttgctccgcagcttccttctttggtctcttccacttctttgtggatgaagtaccatca

SEQ ID NO: 125504 - DNA, 650 bp, Arabidopsis thaliana columbia
  unsure (1)..(650): unsure at all n locations
nnnnnnnnnnnnnnnnnnnnnnnnnnnnnnnnnnnnnnnnnnnnnnnnnnnnnnnnnnnnnnnnncttttttttttttttttttttttttggatccaaaataattcagtatcttaagcatactcttagtgtccaacatctattgcgtcaaaggatcttaaaaaataaaagagacacaaagcattgtggatacaaatgaacgtttaaatcatcaatggaatatattttttagaactacattcaacaaagcttagctttgaggtcctttcttagtatttttcccgaaggagatttaggaatggaagcaacaaagaagaccttgtgcaatctcttatagaacaccacctgtttggcaacatattctttaacatcttcttcagtgatatcatttccatttgatcgcaccacgaaagccaccggaacttccccagcgacttcatcattttgcggaacaacagctgcatcggcaattgaatggtgattgattagcaaactctctagctcagctggagggacctgaaagcctttgaacttgatgacttctttaagtcgatcaacaatgaaaatctcatcatcttcatcaacatatccaatgtctcctgtgtgaagccaaccttcttcgtctattgttgctgaagtggcttctggatc

SEQ ID NO: 125505 - DNA, 639 bp, Arabidopsis thaliana columbia
  unsure (1)..(639): unsure at all n locations
nnnnnnnnnnnnnnnnnnnnnnnnnnnnnnnnnnnnnnnnnnnnnnnnnnnnnnnnnnnnnnnnnnnnnnnnctttttttttttttttaagaaaagaagagctcaataattcaacatatatctgtacacacataattgaataagatattcgacacatcaatcactataggttacattataaccacacaaattaaagaaaagaaaaaaaaaaaactaatatcacgagattctcattcaatgactactacgtccgccacgagctttacccgtactcgacgaaccagttccggatccggatccggatccagacccaccagctgtcgaaacactccctgagcctctagacccaaagtaaagatccgagaggtaattcccaatatcttcaggggtatatctggaaatagcctcattatctccaaccataccatatgcaaaccggttcatccggtaaaactcggtacaaaccagcataagtttctgactcaacgtgattttaatctggtccctaagtttcgggtcgggttaacccacgaagtctgtttccggtacgacgtctcaaactcatcgttgaatctcgccaccaaaaccttagcttcctccggcgaaatctcatccgtcggaatctccggtagtaaatcc

SEQ ID NO: 125506 - DNA, 580 bp, Arabidopsis thaliana columbia
  unsure (1)..(580): unsure at all n locations
cgcctacgtaagcttggatcctctagagcggcttcccttggtttttttttgctaaccaaaagattatttttcacagatacagcttatgaatcacaatgcatcaaggtgcagagatgggtttcataacattctagccaatcattaaaaaaaaaaaaaacaacagaagaaacaaattattatttncctaatcaaaccgtcgaaaacggatgaaaaaccctncttatacccaataccaataaaagcatatcattctctcaagcatcaatcttgagattcacatccctggaggaagagttcccatcgatgcttctgctttcaacttcatcaaaatggtcttcacgggcgttatcagcgagcatcagagcaaccaaccagaaaaggcacgagtccaaagacacaaaggcacctccaccaagcagaccggtcttagccgtggggcaactggtttctaagtttcggtgaacattacgggtcaagtgaagtttgtctgtaatggttggccagagcaacagaatacaggccagtccagatgttatcaaggcaattgttgaagaacacagagaagctggtgctttttgac

SEQ ID NO: 125507 - DNA, 452 bp, Arabidopsis thaliana columbia
acgtcgcatgcacgcgtacgtaagcttggatcctctagagcggccgccctttgttttttgtggctatttatttatttttttttcaaagccaccagtgttgtgtgaaaagccgataccctacagacattgagattatcactcactaacgggggtttttacaaaaggagacggaaaaaaccaacaagcgccaaaagattagaacccacccttaatcataagaaagcaaaaataaacacatccaaaaaatgatcacccaacttccggttgcttgggtcaaaacgatatcaaacgcgcaaaaaacccaccaaggggtcccgagcattgtggaggtttaccttattgggggccaatgcccggaataaaacgccacacacatgaattgcgatctagaacacatgaatcacacttgccaaccgggaaccattcgggcgagcggggaccctaccaacctc

SEQ ID NO: 125508 - DNA, 631 bp, Arabidopsis thaliana columbia
  unsure (1)..(631): unsure at all n locations
nnnnnnnnnnnnnnnnnnnnnnnnnnnnnnnnnnnnnnnnnnnnnnnnnnnnnnnnnnnnnnnnnctttnttttttttttttttttttttttatgggcctattgatcaaatttatcttaaacagtttaacaattttaatacaaagctattatatagagaacttagctaatttcccataaaaaccatagcaaattatataaaaatgtcttataaaacatttagtcttctcaaacaaaaacatttccgttcacaaaccttccactgtctattctcttgtcatcaggttattgcgtaattgatatgcaagaacagcaccagatgattgctcagtgagttctcaagaaaattcaagttgaaatagccaaaacaagatgtgaaatttcaagaaatttgctggagtctggagacagcaagcaaaacagtcttcatgatcttcttcttcgcttcctcttttctctgtcgctttcatccgaactagaagaagatgatgagcctgactcagattcagactcggaatcagaactgtcagatccagatgatgatcctgattctgattccgcaacttgcttctgccgttgcatgatgaggcttggcatgttcttcagatactctctcagattctctgtgatgc

SEQ ID NO: 125509 - DNA, 307 bp, Arabidopsis thaliana columbia
  unsure (1)..(307): unsure at all n locations
acgtcgcatgcacgcgtacgtaagcttggatcctctagagcggccgccctttntttttttttgttttttttttttttttttttttttttttttttttttttttttttttttttgttgccacaaatacaacaaaggttgaaactcacaatgctttacaattttactagtttctcagcgatatagggaagtagcccaaattgctgatactctggtagagggcccttccaaactacaaacttttaagtacagtttctaaaacttgcaagtctcaaatacagaataaacctagtttagtgaaaatcactct

SEQ ID NO: 125510 - DNA, 474 bp, Arabidopsis thaliana columbia
  unsure (1)..(474): unsure at all n locations
gcaccacgcgtacgtaagcttggatcctctagagcggccgccccttgggtttgtgggctcttttttttttttttttttttttttttgcggttctttttttacgggactaacctactttttggtgacagggaaaacccactcccaattttaaaagaaacggtcaacccgaagatcctggggcccaccgagggggaaaaccttgcgtcctggggggaggatccgccgggaaacaagcaccataaccgaggggggatgcacaattgcaacaagagggccagggccaagagggacccaagggggaggaaaaagagggccccacagnaggggaaccccgggatattacaagcggccgcccttgtaataaatggggccccccaagaatgtcctaccgagaaagggcaggacaccgagtccccaaacagggtgcgtaccaagatacccaccacagatcgggagaggaattgggctgccttt

SEQ ID NO: 125511 - DNA, 642 bp, Arabidopsis thaliana columbia
  unsure (1)..(642): unsure at all n locations
actatagaagagtttgacgtcgcatgcacgcgtacgtaagcttggatcctctagagcggcctgccttttttttttttttttttttataaaggaaatttaaaaactaaactcataatttaactgattgttacaataaggttcatcgtttttttttcttttacatgtatatagtaaatataaactataacaagagagtactattacacacaatgacacaacgtatttttttgggatatgnggnatgtgcagtattatacttcacatgccgatcaaactcgctaataatccaaacaaaggaataacgatcgaagtcagcattttcacgtcatggatgctaggaaaatctgattttggctggctaatcggactgctgactggaggaggagcggtaagagtatgatcagcaagacgagaactattttgatcactattgttatgactattttggtcactattgttgtgactgctagggcaagaaattgaaaggtatgtgtgattatttcgaggagaatcgtcgtcgacagtacttggagattgtagtataccggtcattccatgacatttgatagaacctaagctacatatggtggcggcttattatcttgacgttattgaaaagtagtttgatcttcaacattggag

SEQ ID NO: 125512 - DNA, 346 bp, Arabidopsis thaliana columbia
cagagctactcgcattcatccgcacccacctcagcactgtagcatcccctcgattacgcttgtagtcgaggtgacttgcgtagtgtggcgattagcatgtcgacgttgcctatgggtagtctgctcgagcatcacaagtgcgagcgtgtctgtcgctgcggcgcatctttaacgacggaattggaggctgtcagtccgagtaattagtcagcgacagcaataataaatatgtgcagtttgtctcgcagacgtcgtcgagcatcgagagtcgtagagaatgcagttactaccatattgctccaccccatgtctgcgcgtacgccgacgataacgaatcagagctgag

SEQ ID NO: 125513 - DNA, 663 bp, Arabidopsis thaliana columbia
  unsure (1)..(663): unsure at all n locations
nnnnnnnnnnnnnnnnnnnnnnnnnnnnnnnnnnnnnnnnnnnnnnnnnnnnnnnnnnnnnnnnnnnnnntgcctttttttttttttttatctcaaacaaagaaatgattatgtttaatcttaaaagggtttgttctatcaagaaaactgttaccggaaaaattccagctcccatgggatcaaaagcagaaaagaatgggatgcgaaaaggcattatttggccttaaatggtatgtcctttggggtcctaattatggctggccatggttgcgagaactgggccagaaccagacccttaatgacaccatggttttgccgcacatttaacttgctttgggtttttattgccatggcggccgtttttagtggcacccattgaaggtggaaaggttccaccggccttattcgttcttgttccagggggtgaattagcttcaacccgatcaacgccaaacattcctaggttagagagagtgaaggtaccagtgttgtactcctgaggctgcagctgcttggctcgagccttatcaaccaattctttccatttctagataacgaataatgtcaaccttatcagcgttctgaagcaccggagtgatcaaaccaccatcaatagcaacagcaacagcaacgttgatgctactattatacacaaaactgtta

SEQ ID NO: 125514 - DNA, 166 bp, Arabidopsis thaliana columbia
gtgcgcggacatagtatgagagggaccagagaggtgatgctgactgcgtcgcagcgctagcacgcggatacacagatgcagtgacaggtgacgatccgaacgctacgcagtatcacctcgagcacaccgacgatcacatatcactacttacggtgtccacgtactc

SEQ ID NO: 125515 - DNA, 105 bp, Arabidopsis thaliana columbia
ccacgcgctgcgccattcggacgtcctgtatcaattgtatagacgagtaccgcatctcccgtccgcaacagtttatattatgtattacgcgccccgcaagcctac

SEQ ID NO: 125516 - DNA, 605 bp, Arabidopsis thaliana columbia
  unsure (1)..(605): unsure at all n locations
cgcgtacgtaagcttggatcctctagagcggccgtcctttgtgtttttaaggcatacttcagaacctgatgattaaacatatcaagaacatagtaacactaatttacaaagacagtaaccacccaccaacattatgcacaccaaaaaggggtattaccgtgattaggacattttctgtttacgacataaacgaccaattagatccaccgaatnntaaagccgntatataaactaagttccatacttatatatagatagatagatgaaagtagcctaaagagaagccaagagcttctaagagactcaaaaacctcactcaaatcttcatattaatacttacagatttttttgtgaagttcagtagttgtctcttcacgcagtggacagaacttccagctctgcccaccagagtggtgaaagttttgggatagtgtcgtctggtgaaatccagtgatctctcgtaatctccctgtgacttccttcattatcggtctctgtttcgcgtctgctcttatgcagcttttgatcacttcacctatattctcaatcttctcgtcaaagctttcaattgtcggatccaccatctnccttaatgtctntcctct

SEQ ID NO: 125517 - DNA, 623 bp, Arabidopsis thaliana columbia
  unsure (1)..(623): unsure at all n locations
cgcgtacgtaagcttggatcctctagagcggcctcnccttgtggtttggggcttttttcatcctagaaaaatgtagatacatatataaatatataacagtgtaaatttggacaaaagagtccagataagaagaagacctgtactgtactaagaagagagacacaaagatcaaaactaaagaaggaagttttttattagacagactnnnnggncngcacagngaccataaaacaatacaaaaatgaacccgaccgcagatnngnngatgganccagnnnnaagactcangaggctggggnnnggcaaannncattcaatctattgagagcctagagatattgcatcttcttcttcctagtattcaggactgtacaggcttaccaaatgttcttcgttcatgctctttctcgagtcgtaccatcttacatgttctgaagaagcttgttgttgttcctcttctcttgtgccatggagtatcattgtccctgtgagcacagtgatgaatccacataactcagaggctacgctggctgcgtcttgcccagaccagtccttgaacattattgcactagcaacaattgtgagggttgtgaacattacataggatactggagaaacaatgg

SEQ ID NO: 125518 - DNA, 497 bp, Arabidopsis thaliana columbia
  unsure (1)..(497): unsure at all n locations
tgacgtcgcacgcacgcgtacgtaagcttggatcctctagagcggncgccctttttgttttttttatatcaaagaagatctaagtgagtatattcttttctcctatggccaagaggaattaattaccaccacgacccttaactattcactattaattctatcttatagaccaaaaacagctcaagtacttgagtatgaaaatnataantatttgcgataagattgaagaatcaacaagcgttacaactctttctgcaggtaccgtagtaatcaggagagccaatcatatagacagggtttttcttgcactccccaagcttagcccatcgtccacagttttcgtcttcatcactgcattccccactctcctcaattcttgcttgtttcttcgcatagatcagttttgttgccactaacagttctcctttcaccacagggcacctcaaatgagtgcttttcccatccaaagatgcattcaagagcctggtgaagaacaa

SEQ ID NO: 125519 - DNA, 425 bp, Arabidopsis thaliana columbia
ggccgcccttttttttttttttttttttttttttttttttttttttttttttttttttttttttttgggaaaataacttaccccttaatttaaaaaattcaaattgggggaaaaaaatttccatttggggtttttttttttttttgcctcctttttatgatttttttttttaacgggaacccaacaacacaggtgaaatttaattttttttccaaaccttttaaatgatttcccaattcctttccccaaaaaaggagctttgcaaggtaatccctggatttttccacctttttaccagttccattaccaccttttttagtccttttgccaggatttttcattaaatttgaagtagtctggttttcaaaaagccttttttatactttttggacaagcttgtttacaattttttccacttccggtga

SEQ ID NO: 125520 - DNA, 517 bp, Arabidopsis thaliana columbia
gacgtcgcatgcacgcccgtacgtaagccttggatcctctagagcgcgcgccctttttttttttttttttggtttcgaagaattttctataaccaaaaatttataatcaaacaaaacaatatactggacaacgttatattttgcgtcatcagtagataacttcaagaacactgttttcgcctaaattcttcagaggaaagtgtttgatcttgctcctgcaacctctcagaaccaggtcctggtttcaacaccgagtcgtcaccttgcacagagcactgatcattgccattagctgaactcccgacacaccatcctcctggtgcaaaccggtgtgtccgtcccaatagctctttatcgatcttgtctaacgcaggatcgtttttgtggaacttgcgtgcaaatggagctttgctcttgaccatattgtcaaaatccttcaacgagagagatctagggtgttgctttggaggactgtcccaagcaatgtagtgaaggtcgtgaccgattgcagtgttga

SEQ ID NO: 125521 - DNA, 181 bp, Arabidopsis thaliana columbia
cttccgtaacctgggatcctttaaagcggcctgcccttggggtttgaattcttagaagcgagaaaatcctgttcacccacaataaaaagccacccaggccaccatcctgggacaacgctatatttggcgtaatcacttggtacctttacgagcacggctttgacctaaatccaacgggggc

SEQ ID NO: 125522 - DNA, 513 bp, Arabidopsis thaliana columbia
  unsure (1)..(513): unsure at all n locations
gactatagcagaattatgacgtcgcacgcacgcgtacgtaagcttggatcctctagagcgtccgcccttnnggaaaagcttnnnacaacnananagaaaaaaacagaccggagaaaaaaaaaaacagaatncctgcgaaagccagaaaacacatacagaaatattttgttggacacaaaaaaaatggtggccctcccccacaccacaaaaagacacaaaattaaataattgggcgggggccaacagnggcngggcccattgccccaagaaaaaaaaagggaaaaggcgaccctggcgccccccccccacaggaggggcggagangggcgcacaaccaatcattgaagcaaagctctacttaattaagacaaccacaggacaagctcttgaggtgggaaagaaaagggcaagaccaaggaacggggaactggttcttggtcctgagccccagcgcccaccaaagaaagagaagaggagaatttctcggaaccacaacggatgaaacatttacga

SEQ ID NO: 125523 - DNA, 474 bp, Arabidopsis thaliana columbia
ctaccttagcctggatcctttagagcggtcggccttttttttttttttttttcaattaaaggtgtgttgatcttattaattagagggttacctttcatttgggggaattatttgaagaagggtgggttccatttttggttaccttcccaagccttaatggggggtttcctttctttccaaaccggttatttttaggcccagttttgaataaaaaaattatccacttacttgaccattcttatgaggaaccccaaaaaacttaaaaccattttgaggaaaaggagcaaagtcttgaaaccttcaattcaagtgattgaatcgttctctatcatttccttgacttcgttaaccacaaaatgcgctttgtggccgccaataccttcagctggtttttggccatctctccatagctgaatcgtcggcattttcgtaactcctgcacggaaaacaagtctatatggcacagcgttgact

SEQ ID NO: 125524 - DNA, 506 bp, Arabidopsis thaliana columbia
  unsure (1)..(506): unsure at all n locations
actatagnaagattatgacgtcgcctgcacgcgtacgtaagcttggatcctctagagcgtccgccctttgttttattcttttttttttttttttttttttatttactttttattctttctcttctttttttttttttttttttcaggggggaaaaaaatttttttttaaattcccaacccaaaaaggggcccaacccggggacgaccctaacaagatttttatggtttggggggggggcttattcaaaagcctttaagaatttacaaggcgttttcaaagttggggaaagggccccccaaaaaaaaaaaagtggcccatataatatcctattttcacaccacttttctttggcttaaagaagtttgagttgaacctccttggggggaaaaacacccccccctttggtttagatttttttggtcaaaaagaacacttctccccagggatcggttttttttctaaccctggccctttgccacacccgtggggtgccccccccaagaat

SEQ ID NO: 125525 - DNA, 510 bp, Arabidopsis thaliana columbia
  unsure (1)..(510): unsure at all n locations
tatagaaagattatgacgtcgcatgcacgcgtacgtaagcttggatcctctagagcgtccgccctttgtttttttcctttttttttttttttttttttttttttcttttttttttttttttttttttgggtttccaaanatggggggtcccaaaaattttttcttccattaaaaataaccatctttcccaagtttcaattcttttaaaaaaaccccttatccttaaacattttggcaaaaacttttactaaacccaacgttttttaaaaacaaattttgtttgtttttaaaggaaccgtttttttatgtaagattccccttaaacaaaaaccggatcttttactttttctggaatttgaggccccccccttgcttttcctgttccttggggcgggggggcaccaaccattttctttttttaaggccacccttaattgtgacccttccccggggcgattttaacccgcgaaagcccccccccgggtaaaaaaacccccggttttccttttg

SEQ ID NO: 125526 - DNA, 493 bp, Arabidopsis thaliana columbia
  unsure (1)..(493): unsure at all n locations
tgacgtcgcctgcacgcgtacgtaagcttggatcctctagagcggccgccctttgtttttttttttttttttttttttttttgttaaatcaacgaactnacgcaaaacaaagaattcgtgatgaagttcccatgttaaaacaaaggttgaaagatgttagagacacatcttatgagggggatatttgtagcaaccagacgccagtcgtcattaaactgtacacaaagtttgaaagatggtaagaccctctacatgagaagacactgggtggatcatgaggcgaagggtaatccctgttgcactcctttttgcctttgcttccttctcctgtttccaactggatacaacttgtttcatacactttaatcaacccgaaacaccaagacattgcaagagcttgcttgatgtggggacaatttgcacaacttcaccccactcaacatttccccaacctttacctccttaaagcttttgtaacgcgataaccgctctc

SEQ ID NO: 125527 - DNA, 435 bp, Arabidopsis thaliana columbia
  unsure (1)..(435): unsure at all n locations
gtaagcttggatcctctagagcggccgcccttnngtttttttttttttttttttttttttgnntnttttttttttntnnnnnnttttttntttttagacccaattttcttggaaggggaagatgagttttcaaaaatccccttcctagggatcacccacttttgtgtgttaacaaaccaagcggtttttatttatttgtgacctttttttacagagttattacttgcctacctcgggttataagcctgccatgctttccttttccgatcttagttttatttaccagaaaaattatctaatagttaactccctattttaatatttggcgttaccgggtgggtctttcttggagaacttttgcgccataaaagaacctcccctttaaacccaattagacttgaccattgccgcattgcccctctgctgaaaaccccc

SEQ ID NO: 125528 - DNA, 509 bp, Arabidopsis thaliana columbia
gacgtcgcatgcacgcgtacgtaagcttggatcctctagagcggccgcccttttttttttttttttttttttactaattttcatatcttcatatgacatgccatggaatggaagtacaaaatattctaaaattaaattagctgatcacaattgcctgatcaaattcaaaacacaagttttcttttttttaataactcaaactgatttttcttttcttcaaaagggtctttaagttcatcttcatggtcaggtccttttagttgcggaactcgtccatgaagctcttgtggaactctgtcagacgattcactatcgctggaatcttgtcttcttgtggaagtattgtgcatctaaagtgccatgttccaggaacctaaaccacaatgaatccaaaacccattattcaagttcgatccttttgtaagacatttaaagttatgaagatttggttatattttacctgtccaaagccagaaccagggactacaactacaccagtagcattgaga

SEQ ID NO: 125529 - DNA, 515 bp, Arabidopsis thaliana columbia
atagcaagactatgacgtcgcatgcacgcgtacgtaagcttggatcctctagagcggccgccctttttttttttttttttttttgttcccaaaatgtgctttcatactcgaataaacataacaagcaaacaataaagaaagtagagtaatgcaaaagagcaaatcgcgctctttctgatacaactttaagagagttttaacattaaccattcaaacaaattatattaccttcttctccttctgaagtagctttgcatcccaaaaccgttactagttgttcattcagattttatttccatggagaataatagcaaactccctctggttaacaaggtacttaagcagcagcctgtagcaactccctttcagcgcgttccctgatccttctctcgagctctggcctaaagtgtcttatcagaccttgcacaggccatgcagctgcatcacccaatgcacagattgtgtgtccttcgatctgtttggttacctcctgcagcatatcaatctcttccagc

SEQ ID NO: 125530 - DNA, 470 bp, Arabidopsis thaliana columbia
  unsure (1)..(470): unsure at all n locations
aaaaaaaaaanaaaagcgagaaaaaccccgttatgatatagnagacatctcgcaagattatgaggccgcacgcacgcgtacgtaagcttggatcctctagagcgttcgcccttttgttaaaactttttcatctttaaagattagactagggccctgtatcaccgcggtggttataagtgcaagatgcacaattgcaatgtgtagggtatgcgcgggctgatcaatcccttaaagctcaattttatggaaggcgagtcccaggaatttttatttggggggggtgctacaactggggctgtcccataacgcccgaggaacacagattccaccagggaggggatcgtatcatctccacttccgaaggacttttggacgacatgggtacccctagcgagacgcactcaatggttcaagggtgtgacgataaaatcggaggataaaataacatgcgccacttaaaaaactcttaa

SEQ ID NO: 125531 - DNA, 487 bp, Arabidopsis thaliana columbia
gacgtcgcacgcacgcctacctaagcttggatcctttagagcgggcggcctttttttttttttttatggctattttaccttggaagaattatatgccaaccaaaaggggattccatttgcgaaaccacatttcttaccaaaagggccgggacccctaattctggttgggggttttttcttttctttaaaagtggatccaggtctttttttcatttaccttggaacctaaagcttcttattaaaagaaagaaaagtttttgggttggggtggaaacctcccctcatatatccataggggaaccattggggtgggggggtgaactttccatgggattgaccgggccaataatccttttaatttcccaatccaggtacctccggattttgatttggaaaacgtgttatccaaaaaaacctgcaccacccaccctgattataaggacccacaaaaggttccagttgagtttggtggttccaactttgcctg

SEQ ID NO: 125532 - DNA, 484 bp, Arabidopsis thaliana columbia
ggcccccttccgtaggctggaatcttttaaagcgtccgcctttttttttttttttttggaaatctcaaccccggttggggtcggttaaggagtagtaaagcaaaagagagttggtgatgtcaaaataaaccacatccacatggttcacttaaaagtttctgcaagagacagatccgatattccagatatcagatattctttatggctcttctctgatacaactggatcatcattcagtggctgtggaaggggctggacagtggaagactcatcgagggccttcttcagctgcagcaccaacccatcttcctcatcattgtcccccacaacctctagatcccacactttgaaaatctcttgtgaagttactttgacaggatcctctgtaacattacaatcctcagcattgtcttcaacgtatgtgctcatgaaatcatccttgaatacttgagacgatactgacgctggtttttcttctttagcc

SEQ ID NO: 125533 - DNA, 481 bp, Arabidopsis thaliana columbia
gcacgcgtacgtaagcttggatcctctagagcggtccgcccttgtgttaatttttttttttttactttttttttttttttttttttttttttttttttccaggaaaccggattatttcaatccaaaatcggtttaagggtaaaaaaaaccccgttaaaggaacttttaccaattttagcccccaaacccaccatataatcccaagggatggacctaaccggaaacccttccccatttttttggaaaaaaaaaccaatttttttcaagaatcccttccatttctgaacaagtaaaaaaccttgcaaaccttttgaaaggttgggctttttaaaggaatttttggtgggccaaataaaccttatttccatcattggaataagttaatttttttaaaaccttttaaatttttggtaaaaaaaataaaaacccaaccttttttccaaaaaattcttaaaataacccttaaaaaccacaccttttt

SEQ ID NO: 125534 - DNA, 442 bp, Arabidopsis thaliana columbia
  unsure (1)..(442): unsure at all n locations
tgacgtcgcatgcacgcgtacgtaagcttggatcctctagagcggccgccctttnttttttttttttttttttttttttttttttttttttttggggggccacaaagatttctacttcaatcaagaataacaatcattacaaagtttcaatactcttaatcaaacacatatccgttaatcattttggctaaatcttctactaaatttttcgtgctttacaagcaagctttgtctgtttttaagtgaactgtcttctcatgtaagtatcctcatgaacaaaaacaggatcttttactttttttggaatctgaggctgccccattgctattcctgttccttgggtcgntggggcaccaacaatttgcttatttgaagtcaaacataaatagtagacaatcccaagggcaatagtaacaagcgaaagcacagcaccggtagagaa

SEQ ID NO: 125535 - DNA, 490 bp, Arabidopsis thaliana columbia
  unsure (1)..(490): unsure at all n locations
gacgtcgcacgcacgcgtacgtaagcttggatcctctagagcggccgccctttttttttttttttaataaaaggtgaatcatataataagcaaaagccaagaccgaaacgggttctgattcaagagtgtgacccaaataaaaacatcggtcataagagttttggcactcgaaaaactctgatgccgagtctagatctaaaaagatttttnacattctcaactgtgtttcaccaaaacgtgagatattttgctttatcccattcataaaatttttaaagaggtgaaaatgtgcaaataaaaaatgaaaactttgcgaaaagggagaggccacaatcagtggaggtgctcatcgtctctggcccgngaccatccggaggaccgccaggacaaaccacttacagctcaaagaactgagtgcaaaccgggcattcaaaggactttcctttgtaagccataaccagacaacattgtgctcttcctcgccttcaca

SEQ ID NO: 125536 - DNA, 541 bp, Arabidopsis thaliana columbia
  unsure (1)..(541): unsure at all n locations
agcaaggagccccaagagcggtcgcccgggggggaaaaagccccgaaaagagaagaaagaccccaggcgaggaggaaaagcccgaacaaaaaaaggcaaagaggaaacgagacacggccaaccaaggagaccgaacgcaggaacccagaccccaaaaagacgggaaagcgcgccgaacaacaagaggtcccctcccagggggggagggcaagcacacaaccacaacgccaagaccagaaacaagcaccgcaacgggcacggggggggaggggagccccccccaaaaggaagacgcagggaagcaggcgccaaagaaacggagaccgcgcccggggcgaccgcgcnggggaggacaccagaggagggcgagcccgggcgacaaaagaggaaaagcaagcacaagaggagacccgggggagcgggagagcggccacaggcgcccgcgcaaacgacacaggaaaggcaggggggcgccggagagcagcggcaagcccgcagcaacgaaaagcggagaccagacgagaaaccgagaggaaaaacg

SEQ ID NO: 125537 - DNA, 504 bp, Arabidopsis thaliana columbia
gacgtcgcatgcacgcgtacgtaagcttggatcctctagagcggccgccttttttttttttttttgagaggaaatataaattaaaatttagcagaaaaatacagcttaagtggagggttctcacttctcatgttagataaaatggaccaaagaatcaaatagtaactatgagaaaaaaacagtgaagtaaagaacaattgaagctttgtaagattactcttaaggagtctttttgaagatttgttggtgaaaaataaaatcatctctttagcaacctgagcacatctccaacaagatgtagcgatcctgtgaccagaacctctagtttcagtgaagggtttcggcgtacgcagtctcttagccagtttatagtcaatggaagtgaaggcattacggcactggaagtgaccggtgtccctgcaggtccaccacattgaggtgcatctccgcacaggaaatcatgaggtggtaaggcggttattccatcgggtttcagtgtatggt

SEQ ID NO: 125538 - DNA, 491 bp, Arabidopsis thaliana columbia
gacgttgcacggcccccaacgtaagcttggatcctttagagcggtcggcctttttttttttttttatctaacccactctttttctctcttttattaattcaaactcaaaacattaaaggttggcctagtgcttgaaactattaagtcccaccgcgaaattagggaaattccttccttttggtcaccatggcccattatttaacttttttttggcgaggcctaacatatgaattttcacaccaagcccttaccttaacctactggaagaacttccttgggtcaaccaccccggccggtaaaggccaaggttgaaccatggtagggagaccttaagaaaattggcctttcttggggcccaatccaaccgggaaagttctggttggccgttagaacccccactggaggttaattcagccaagcgtaggggttggttggccacccaaggcaggccccacagttggggctgcttggggtgtaacagccagtttttt

SEQ ID NO: 125539 - DNA, 502 bp, Arabidopsis thaliana columbia
taggtacactatagaagattttgacgtcgcatgcacgcgtacgtaagcttggatcctctagagcggccgcccttttttttttttttttacaaaaatattactttatatgaaccgaacacagtatgtataatatagtttgtacaacaatggtggttcttgtttctacctgaccttcctgattggcaaagctttcccaaacaatttttcaacctcacttgcttccattttgatctcatccaaaaactccatctcttctttacttaactctctcacgaaattctcctcgtcttgcttcagttcattaaatccttcagccaatctctggaacaaggtcatctcagtcctaccgaccttctccacttccttctctacctcttcttctatctcttcaacctcttttacgattatcctttcaccttcttccactgtcttctcaattctctccacgagcgcaggttcaggaccacatgtgttatccgttctaatgaatgtgctgaagtct

SEQ ID NO: 125540 - DNA, 478 bp, Arabidopsis thaliana columbia
  unsure (1)..(478): unsure at all n locations
tagcctggatccttttgagcgggcggccctttttttttttcttttttttttttttttttttttttttttttttttttttttttttttttttttnncccnnnnanaaacccaaaaaaaaaaaaaaatttggccccaagcggggtttaccagggtggccaacgggaaaaccttggggccaaaattggtggtttaacgggggtttaaacccctccccaaaggggttttttgggggggccctctttggcccctctaaatttggcccccaggttggggggggggggtcacggccccccggggggccccgggggcccccccggggggttgacctcctagggggccccccctttttttttttttttcccaaggggggcccgggggggggcctttttcccccccccttggttgccccccgcgggggaaatcacaaacgggacaaaaagtgggttaaacgcttttttacgggcccggtttggggaaa

SEQ ID NO: 125541 - DNA, 511 bp, Arabidopsis thaliana columbia
  unsure (1)..(511): unsure at all n locations
gacgtcgcatgcacgcgtacgtaagcttggatcctctagagcggccgcccttttttttttttttttttttttaaaacacagtaccactttattcaacttttgacgattttacttttcataacaagttaagaacatctganaacatagtaacttttgagaccttattaaaaaccagcaatcatttcaacacccgaaaaactctacagtctctccctcacgctctctaggttncattcacgaagatgaattcttctgtacccattcaacaagcgtagcaacaccaaacccggtcccagacttcttcttctcgttccacaccggtccagccatgtcgatatgcatccattgcaccttctcactcacaaactgtttcaagaagagagccgcggtgatggatcctcctgcccgcccgcctgtgttgaccatatcagccactccagacttcatcttgaaccgaggatccatcaccacggccattgccaaaaccaagctacagtctctccagtacttg

SEQ ID NO: 125542 - DNA, 493 bp, Arabidopsis thaliana columbia
gacgtccacgcacgcgtacgtaagcttggatcctctagagctttcggcctttttttttttttttttttagtgtgaatttttattataaatgggattaaagccgaaagggtattaaactttttcacttccaccccaaagccttaaaacctggtggaaaataggattgcttctattccaatggggtaagcttaaaaaaaacctttttttttttggcttggggtaccaaaaccagggttgaaccaccgaacctttttaaaacctgtaaaaggttttattttttggataaattcaacgatcttccaaataattttttttccctttttaaatgggctttggactaatgaaccttcttggcgaaaaaaggcagccaaaacgcacctaaaggaatctcggacttgaaaaactccaaaggtccatttgttcggttggaccttttcgccaatggggttaaggggggggtatagaagcaaacatcaggtccttacaattaaac

SEQ ID NO: 125543 - DNA, 509 bp, Arabidopsis thaliana columbia
ctatagaagaattatgacgtcgcacgcacgccgtcgtaagcttggatcctttagagcggtcggccttttttttttttttttttgaagaataccattccacctggatgacccatctattggagaataatgtgagttggagggcttaaaatcatattacttattttgcttaggttcctaccttttacctggtttaaccccataagtctggatcaatggaaccttgtaccctagttaagaagcctaatcatggtttttgatggatttaaatttaaaccagaaaaaatttggccggtgaccggcctttttagggttcaccttagaaaaccaaatttaatgggttaaaatttccaacttcaggcagaaaattttccaaaccatcttcgttcctttcgttttggttgggttggcattctgtggaccttcttttttcctttttaaggagaagggtcaaccaccatatacccatttggatcatccttgcgtgacatttaatccttgccacgctcagg

SEQ ID NO: 125544 - DNA, 515 bp, Arabidopsis thaliana columbia
  unsure (1)..(515): unsure at all n locations
agattatgaggtcgcacgcacgcgtacgtaagcttggatcctctagagcgtccgccgttggttttagtctttttttttttttttttttttttttttttttttttttttttttnnaaaaccaaaaaaagaacaactcgcaaagtgggtctgttgaaacactgtgggctaaaaatctgaaggcttaaagaaataccgggacgctaagttattgtttttttttttaaaagaggggttatgccacaaacgcatttgataaaacattcaaaacctttttcagagtctaatccgtgaactggtgatcgatttagcttcacactatatatccttttcacttattagactttttcttcggtacagctgcatttggagcaggtgtaccagcgggggctggaacaattacaggcgcaacatttccaccgggacccttagttaaacgctcctttttcctagcatgcttcctttctgggctagctttgtttttggccctgttagcctcaaactgatcagacagagtt

SEQ ID NO: 125545 - DNA, 491 bp, Arabidopsis thaliana columbia
  unsure (1)..(491): unsure at all n locations
gacgtcgaacgcacgcgtacgtaagcttggatcctctagagcggccgccctttttttttttttttgacttaggaaaatttttacaccagagtttagacacatcatccttctaacagaacggactgtggtgcctaataaaacatatcctactgtagcttgactactgtgtttacaagtacgagactgacaatgtttcatgcctttttttgtagctagactgtcgcggctgaggacggcccgaggatgatttaccttgcacggatactgctactgcttgacgaagctgcgctcatgactcattggcaccttgtactggtttagagacagngtggctgatgaagactgtgttgattgatgcaccactgtccacaactgcattagctagttgtgacaagaagtggccaaacggcggcattgatcttctgaaggagtatctttttgaggaacatcgaccgacagcgatgacggatattctgatggcgagcgtacct

SEQ ID NO: 125546 - DNA, 500 bp, Arabidopsis thaliana columbia
  unsure (1)..(500): unsure at all n locations
gacgtcgaacgcacgcgtacgtaagcttggatcctctagagcggtcgcccttttttttttttctttttttttttttttttttttttttttttttttttttttttttttttttttttttttttttnaaaacaacataaaacggtttacagagacttttttaagtccaactggcccaacttttcttttaaaaaaaaaaaagggattaatcctatataggccaaacccgtgttagcatcaaatacacatgtaacctgaggagacaaaagttttccattttttatccttcgccgggaagccattgattttgccggaaactgaaactaagtcgaatgaaactcgaaaattagcttcatttgaatttttccaacccctccaaaacagaagtgggggtttaattcgggttttttaattttaaaagaaaaaaaagatttttgattaaccacctttgttttttaaacccaatcgaagtttgaatttaagaaatcccgttaaaggcaatt

SEQ ID NO: 125547 - DNA, 505 bp, Arabidopsis thaliana columbia
actatagaagactatgacgtcgcacgcacgcgtacgtaagcttggatcctctagagcggccgccctttttttttttttttgttgtgaagggatcatggatttatatttcagaccacaacacccacattctagcgaacaaactatctaagattgaatctcaagaacaggtccattgatgtcaatttccactagagactccttcccaaacaaagtagatcctttcgttgccttcgcagttcagcggtgcagttgctttaggatcccaacagattcatcacatgtgcctgataaaactctaactgatgaacccgatgcaagttccttgttcctcggctttggctcagcagcaagagtagctttgctcgtggctcgtttcagcttagattctgctacagtctcaataacagtctgatgatataatgcgacacgttcctgtgacgctagtatactcgattgttcttcagctctatctgcctatgcgaactcactatctgctatctcttgc

SEQ ID NO: 125548 - DNA, 504 bp, Arabidopsis thaliana columbia
gacgtcgcatgcacgcgtacgtaagcttggatcctctagagcggccgccctttgtttttttttttttttttttttttttttttttttggaaattaatggtaaattagattcaaaaaggaaaccaacctttgtgccttaagtgccacttattcttagagagttgaaagaaaagtttttaagagatttgaaagcttaagaacttgatttttaccataattggagagccttcttattttgattggctccacttgcggggatgggtgaattttgatttcttatttgcttggcaagccattggattaattgaactgctgtttttggaccttccccatgttttttaccattttttttatgccatttggggggaatggctgcttggaaaaatttaccggcttaaaaacttttttactggccccccaaaaagttctggaagaggtttcttaagaggacccacttggtgaaaacttcgcctgatagatattggttgctaaattggtccaaatt

SEQ ID NO: 125549 - DNA, 492 bp, Arabidopsis thaliana columbia
cgcaaacgtaagcttggatcctctagagcggccgccctttttttttttttttgtgtaagctcaaaacatttaactgaaatggatacagatgaagaagaagcaatactttgttgtacgatcacacaatgtataaataaattggaaaaaataaacaataaaagaaataaacgaatgataaaaatatagtaattttttaggacttgggactgggaggaaccgaggaattaggaaaagaaaccccgccaaggtttgaagttggttaagcatctcgaggagcgatccaatgtctcccattaacgaagctcttagcgataaatggatgggccgattcatagtccaaagctctagcccaagacacgcctctcgtcgctgctgttcctggcccatagcaattgtacacttccaaaaatgccggcttgcttttgttggatttgtggtccaaatcgtcccaaccaccgtgagcgacgagagcataaaagtaagtgtaggcgt

SEQ ID NO: 125550 - DNA, 502 bp, Arabidopsis thaliana columbia
gacgtcgcatgcacgcgtacgtaagcttggatcctctagagcggccgcccttttttttttttttttatgcttaggaaggacttaaaaggcttaaaagagacaccctctgttttttctactataagatccacacagataaaacccaaaaaggaaagacattgtcttgtttgaccaaaagagttcctccagcgaatgcatctgacttatctaaagtatgtctgagaagcagcatcaaaggccgaggttactcataagctgactccatctgggagtttcctcatgaaaaatgtatgttacaggagaaactagtaccccacttcctcccaccgttctcagttgctgaacagactcataaagcgctttttttggtacacaaatcacaatggcatagtactcaatcgttacttttccatctcgtttacaataacctggacttattgttggtccctgcaatcctgatagtgatggttgggtatctacacgttcagccacttcttaagca

SEQ ID NO: 125551 - DNA, 510 bp, Arabidopsis thaliana columbia
  unsure (1)..(510): unsure at all n locations
ctatagnagagtatgacgtcgcacgcacgcgtacgtaagctnggatcctctagagctttcgccggtttttttattcttttaaaaaaaaaactcaaatttccaagtcattaaattacaaagcgatttacatttttcgattgaaaacgagagttaacaattggatatgccttttaccaagtggaacatttatcgccctattttcgggggaatttaaattttttttttcagggtgccctcaaactccccaaaaaaattaaaattaaccaattatttcatttaattaattattggttcaaaaggcggttacgggtttttttccaattggcccattttggttgaaagttttttcacccttttggcccaaatcagtttgtaaaggtgacaataactaaaatttttgttggcattaaggtaccaccattcttccaaggtcattatccctttacctcccatatcataggggaggccaagaccgaatcccactggaatcccaacacggtattaccatcc

SEQ ID NO: 125552 - DNA, 512 bp, Arabidopsis thaliana columbia
  unsure (1)..(512): unsure at all n locations
ctatcaaagaattatgacgtcgcctgcacgcgtacgtaagcttggatcctctagagcggccgccctttttttttttttttttgaaaagctcagccacaaatgtggaatgaggaaatacattgcaaccattcacatagagagtagaggccagtggacctacagaggaacttataagttgtctgatgttggtattacatatacttaaccaacatccatanttcatcagcaagaccgacgatccccagcactgacaagagcattgacatgcaagagcaaccacttctcatattcttgttcatgacagcaaggctcttctgcactctccttaagcgagagtcagtaacatccacatggtaatctaagtcatcaataagcctagtctgcaagtcaagctcttcactaacagccagagcaatgtgttttgtgctaatgactgttccctccaattgctcaagtccttcgtcttgttctctcataacttgncggtgatatccaacaattccttggttatc

SEQ ID NO: 125553 - DNA, 507 bp, Arabidopsis thaliana columbia
  unsure (1)..(507): unsure at all n locations
ttgacgtcgcatgcacgcgtacgtaagcttggatcctctagagcggccgccctttntttttttttttttttttttttttttttttttttttttgtttttttgttaatgtaaatttttttttttttttttttttnnaaagggaaaaccgcgggggattcaaataattttcattttattcggtttccctttacctggcaaaccaagaaaaattttgcttttgaaatttgcacttgggtcctaatccccgggtttttaaaaacccctgttttttaagcttttaacaaaaatgaacctggcctaaaacattttttcacatttttaacacaaggttggggcccccccgaagaagaagaaaaaagaaaacctttttgaccccctttggtttataaaaaacccaagttttcccggggttttttttttcccatttttttccagggggcggcgcaaagagtctttttttttttttgggacctaaactcattttttttttttcctaacttgacatct

SEQ ID NO: 125554 - DNA, 469 bp, Arabidopsis thaliana columbia
  unsure (1)..(469): unsure at all n locations
acgcgtacgtaagcttggatcctctagagcggttgccctttgtgttttttgtcttgcaaaaccagaggaaattttatgaagctgtgagaaatgagtttatgcngggagatcgatgagataaaaggaccatcatccgtttactgaagctgcattcttattataggagtctgatgacctgtcccacacggcacatcctccntgtggggggtagggnacacggggacactgcgccaaactctagaacacacgagcatgatggngcgccaaaagaaccgaacatgtcagataaacacaatccttggtatatccagatgcattccaaaggatccttctaggaaccttattgactctactttcgctcgccaacagagtttctcacactcgatgagcatctctggtgagagccaccctagtgcggtggaggtaccaacccaccaacaagtgcgtactctgctgtcttaaagacact

SEQ ID NO: 125555 - DNA, 265 bp, Arabidopsis thaliana columbia
  unsure (1)..(265): unsure at all n locations
tcaatgacccgcgttgcaacatagaccgatgtggaacacgtgtcccgcgcgactctaagaccgcgcagtcttctcaatcaatttgattgctcggcttcctgcgcatgtcgtgaccgagtagacgcaacttcatttctcactactgtcgacgataaactatctaacgcgataccagtggcataataagcacctgcatcgcctcctcgtttcggcgcacagcccgaacacttaatccgttangacgcgttgtgtacgtatacacctc

SEQ ID NO: 125556 - DNA, 188 bp, Arabidopsis thaliana columbia
  unsure (1)..(188): unsure at all n locations
atataagttatgcgctcgggttgcggcgtgaggacctatgtggcacgatttagtcgcccatagtacgtacagtatatcatattctagattctacgtnagagtagtatgtacacgcgcagcatccatatcctgaagcacgaaagtcgtagtcggcttgcgtcgcgtcgcattttctatcacgatttact

SEQ ID NO: 125557 - DNA, 515 bp, Arabidopsis thaliana columbia
  unsure (1)..(515): unsure at all n locations
tctacgactcatattgggaaagctggcacgcctgcaggtaccggtccggaattcccgggtcgacccacgcgtccgctggctctatggctgctgatgagatgggtgtggatctcttggcacgtgtatagtataaggtgaagaagaaagctcctaggaaccatcttaaagtgactattgacgataagaaggcattactggtgatgagtcacgctgctctatctaatgaagtgtggacaacagtacaaaaggtccttgtgatacgacctgctctaccatctnctggtgcatgaccggtctcgagccttagatgagaagccgattcatacaatacctagacacagtggagactcaatcatacactgtccatgactatatgtaccgtgagagtacagagacatgggtaaatgggcaacctatgcataagtagcacaacaccatcttatgaaatagcgtatgttagtagtgacccaaccgtgggatacactactgagtgataaccggcacgatctgtggat

SEQ ID NO: 125558 - DNA, 452 bp, Arabidopsis thaliana columbia
  unsure (1)..(452): unsure at all n locations
cgtaagctnggatcctctagagcggtcgcnccgnnntttaattcctttttttttaatatttttttttttttttttgttttttttttttaacaaaagaggcaggctttattaaagttttcagtttttttttcttcgaacttacttagaagggatttacaaagccaatgcccncaaaacttcaaagggccttgggggggggggaacaannnaaaaggaacagggccaccaaaaaaaccacgaannaaaggggggaagggcagaaaacatacaaacaacacnggagacgcagaagggncaaaccaaaaccanacgcgacaccaacccgancggggnnaggcggccnnngcaaacccgaccgggnncgnaccaaagncaaaaacggggggggannggcccaggaacacaccccccaagaaccagagagggccacgagggggagcaacgccaagagc

SEQ ID NO: 125559 - DNA, 480 bp, Arabidopsis thaliana columbia
  unsure (1)..(480): unsure at all n locations
tacgactcactatanggagagctggcacgcctgcaggtaccggtccggaattcccgggtctacccacgcgtccgcgtatagatgcgaatgggtctcattagacccgactcaagatccgatttcacaaccgggtttaaaatcttaaccgattggggttacggacggatctacacaacagtcgtcgttaactgtacttctcataatctccgcgtgaactataaactcggtggaactctatnctcacgccccaccgagaccactctaatctcaccgatcatctcatcctaaccgacctccaatccgtcgattcgatctctatactcacgaagagacgaagagtacgatatctctattgggatcgtcctatacggtaactaagtcgcacgagttaaagatgatcgttacacgtagattcttcgggaaggtcaccttcgtgctcagacgccgaggattatgagaaagtgtcaggtttaaagcatg

SEQ ID NO: 125560 - DNA, 495 bp, Arabidopsis thaliana columbia
  unsure (1)..(495): unsure at all n locations
cgcgtacgtaagctnggatcctctagagcggttgcccggggggggagaggcggnnnnannngannnnngaggaaaccnncagcgncnnnaaccaggaanaggcagannaacaaaangaancccggggggagaaaaagaaacaannaaacggnggannacagagaagacnnnacanaagccaacnnnnanatgggtcgnctacaggggagannnaaaacancaaagannccatcgaaacancaagcnncaaacgcaacagccggcaagaccccgcaaagcccagcncnanagggcgggaacgcaccagcaacaaccagaacaggaaacaacgganggcnangnccggcnanancgaannnacccggcnaccancccncggggaaccnagnngcanaaaccacagcnccnaacccaaaaagcaaacccancaaaancncanaaccgggcaggggaagggcnncagggnggncccaaaagaagaccagccggggaaga

SEQ ID NO: 125561 - DNA, 534 bp, Arabidopsis thaliana columbia
tctactccactcctattgggaaagctggtacccctgccagtgcccgtcccgaattcccgggttgaccccagccttccgccccccttccgggaccccttggttccaaaacacaaggccattaccccttaattccttggcaccaactttttttacagcattcttttctttattccaagaataattcctattgggccaaaccttccggtggttaaagctgcaatctttgttcacccatttatggatggaacctttaaagagaaaatgggtaatgaggcaaagatcaaggaccatttaaggccacagcctttatctgaacacattggacaagaaccttattgtgaaagggaagaggttatggcaaaaagtcaagtatcaatgggtggagttacattcatggcctgcttatttaagagacaatgagtccatcattggtcattaccgatccgaatggccgatcaaacagattcttctcagcatctttaccattcataatgagactttgaatgtttgcacgcattagattgggtttttcct

SEQ ID NO: 125562 - DNA, 410 bp, Arabidopsis thaliana columbia
  unsure (1)..(410): unsure at all n locations
gcgtacggaagcnnnggacctctagagcggcttcncggggggnaagaagcaaagagcnnagcanaagaaacacanngggaaagggaagaaacaacncnncaagaacgcacaaagcgaancnggagacnaaaannganaggaaagcgaaagcaaaaaagcacaaacaaggaaagnaagaaacaagaancaaccgctgnnttgccgtgngannagacaaaggcaggcatgnccnngagccangggncaagnggcnnaccaaggggagaaacaangaaaccaancgcncnnaacnggggaacanncanaangcngcngccgncgaagaaaaaagccggncncggcagggggncgaagaacnncnnggaancnaacgacnnanacncgncccacncagncaaaacgcaaaccgc

SEQ ID NO: 125563 - DNA, 249 bp, Arabidopsis thaliana columbia
  unsure (1)..(249): unsure at all n locations
gaaccaaccanggggcaaaanagaaccaaccaaaaaacacttcttaangggcnncnnnaaaaaagcccaacanaaaaaggcnnaacagattaaaaacttttttttaagggagagagaganagcagaaagagagaggncaangaccaacaaannagncgaccgccgcgagcncaggcccagcaccgccggaagcagggggagcancancggccanaccagaggcaccnggaccaccggcnncaccaccag

SEQ ID NO: 125564 - DNA, 476 bp, Arabidopsis thaliana columbia
  unsure (1)..(476): unsure at all n locations
cgcctgcaggtaccggtccggaattcccgggtctacccacgcgtccgcgcccccatgtggctcattttacgaacgaacggtactcgtctacggaggaagatcaaagaaaaactccggggtcgggactcagaccgaggtgggacgagagaacaacatgagacatactgcggctccagctacgagcgacctgtttttttttggcggtggggatcccgctaccggaaggatgcaggaagaatcaaccggaatctcagagctattttccagctcaagaagcgtggtccactaagacacatctaatcctacatcatctacaataacagactttgtgagttggacaatagcgggaaaattagatagaaccctaatcctggactaagaggagacaaataccgtgacggattaagaaggatctggagcagctcanaacgataacgaagatgggcttgatgaagtacgacatgaatgtatcggag

SEQ ID NO: 125565 - DNA, 325 bp, Arabidopsis thaliana columbia
  unsure (1)..(325): unsure at all n locations
aaaacaagaanacacacagctctatatcgntatcataatacaaagtaagattttttttgtttctggttatcaagattctgagttgagtcactgaactgctgaccttgtcnctcgggatgaaannnggaggcagaannggaaancaaacagcgnnccnnagcggagcagcagcaacgcccggagnaacggcnggngaacnngaagcnccagcnacnggagangcaggacgangnngcggangnnnccgaagannccnngcgaacncacnacangcannancaaccanncccaagaaaccacggannanaacaaacagnngaaacag

SEQ ID NO: 125566 - DNA, 475 bp, Arabidopsis thaliana columbia
acgcgtacgtaagcttggatcctctagagcggtcgccctttttgttttgtctttatcgaatcacataaagtgtttctccaccaacgatcgcccacatgcagagggtaaccacatgatagctcgtgtcccacacatgggatagaatttgtggctctaacagctcagggtgaatctcggccacagcagagccttattctatggacgaggccaacaggcagccggaacaacaaaagacaaccctcgcttagcacgacagccagagccctccaacagcatgacagcgagcacaagcgggacaaacaacaccaccgcgaacggggctggtgtcgaaaccgtaggtatcaagcctttatactacgacacattgcgtcccgctatcagcgattccaaagcacaagtaactgctgcatcatacggcgcggtagcagcacccacgcatgccatatacataaatctcgtttcaataacatcatca

SEQ ID NO: 125567 - DNA, 489 bp, Arabidopsis thaliana columbia
  unsure (1)..(489): unsure at all n locations
ccccgcaaggacccggcccggattcccgggtttaaccaaggggccgagccccacggcgnaanagcaaccagagaaccggaccccaaaaaagacggaggacaggggaaaaccaccgggggggcccaaccaaccgaggggggacgggggaccacatccaaagaaccggaaggccacgggacgaaagaccttgtttttctggggggggggganaaaaaacacagggggaaaccgaaccatcncaaggacaacgaaagggagcccggaacaaaagacgaccctacggacaaaccaaagccaccacgnaacaancaaaaagggcaccaaagggagcggcaaaaggaggaaaaactccgaaagaaccggaccgtacaaccaaccggggaaaaccacggaaggggcaaaggaaaancagaggcgaatcagctcgatttcaaacaaggctgggaccaggtttgggtattaagactcgaacaacgcgtaacgggcctt

SEQ ID NO: 125568 - DNA, 317 bp, Arabidopsis thaliana columbia
  unsure (1)..(317): unsure at all n locations
gcctacgtaagctnggatcctctagagcggttgccctttgtggtgagctcccaattactacaacggcgggaaaaccatgtggcacttgggaaggtcaggtccaccggagatcagcgacacctactcactactctttcttaacatgaccttccgtacgactgctgacgatctctatccaccaancgcatagggtggaaagnacgtatgaagaaaaaagccccagagcacgaaagaaaaagagacccgccaggcagggcggggggccgcccaccagaaaagacgaagcccacacagcagagaaaaggcaagacggaaga

SEQ ID NO: 125569 - DNA, 463 bp, Arabidopsis thaliana columbia
  unsure (1)..(463): unsure at all n locations
cacgcggcggaggccngagacgaccgaanaaagagaaaggagacaagggcaagaacccaaccgcggaaaaaacaaccaaacaaggcccaaaagggccggcaaaccgccaaaacgcgggaacacgaaaaccaaaacccaaccaaaactcttctaaaggaggcggggcnacaccggggcgnnnggggccaaccaaaaacaacccaggnaaagggcagagggaggacccccccgggcaagaagagagaacccgccaaacaaccaggaagccgggggaaacccaaaaacccgggcaccaacccgaaagggccggcgcaaaaccccacccaaggggaaaacggcgaccaaaagcaaaacaaccagagcccaaaggacaagagaaaccaggaaaagggggccccaacacggaacaccccccaagaaaaacccacaaagaagggaaagccccgcagcaaaaaagggaaaa

SEQ ID NO: 125570 - DNA, 355 bp, Arabidopsis thaliana columbia
  unsure (1)..(355): unsure at all n locations
cgcgtcgaagctnggatccctagagcgttccccttttgtttaatctagaagactaaatcattatttattcattcaaatatttttgtgttcatcttttaatattcggtgtattccgtcgctggaaaaacattcatctcatttaaaaagaaaaaaattacataaataagtaaatgacnaacnaacgatgctcacaacgggggggnanncngcgagagcccataangggaaggaggggcngnangnagcagaggggagcacgcacgnanncangaacgccccnacnannnccgggggaggaaaancgccgnnnncaagnngngaannngacgaaagnnnggcagcacgangaagagga

SEQ ID NO: 125571 - DNA, 499 bp, Arabidopsis thaliana columbia
gcccgcaagtaccggtccggaattcccgggtcgacccacgcgttcgcggacccctggggttatgtggaagttgaagataggaaagggaaatggagaagatccgcatttattcagcagcaataacttcgtcggacgtcaaacatggaagtttgatcaccaagcccgctcaccggaagaaccagctgccgtctttttagctcgccggggtttcttggattaccgttttcgtgttaaagggtgcagtgatctattgtggcgaatgccatttctaagagagaagaaattccaacaaggcataccacaacttaaagctactaacatagaagaaataacgtatgaaacaaccaccaatgccttaccaagaagcgttcgttacttcacggctttgcaagccttcgaccgccattggccgggagaaatcaccggtccgcttttcttccttccttctctcatattttggttggacattaccggacatctggaggaagtattccatgct

SEQ ID NO: 125572 - DNA, 338 bp, Arabidopsis thaliana columbia
  unsure (1)..(338): unsure at all n locations
acgcgacgaagcgggaccacagagcggtccccgggggggcagagccannanaaanaaacgccacnagagaagaggggagancacccgacgcacaaacgggggagcacacacgaggggggacggggannacannncagagacagcccgaaacgagaacaaagacaacanaacacaagaaccctcgtccacganagcgcgaaaangagaaaaacannngcaagaaaaaaaaacgaccaangcggcaggggcacncccccccgccaccgaacacaccaccgcaagggacccgggaaagancgcgggaaaagagacagggagcaaggcnagaccncccccac

SEQ ID NO: 125573 - DNA, 167 bp, Arabidopsis thaliana columbia
  unsure (1)..(167): unsure at all n locations
gcttgcaggtaccggnccggaattcccgggttgctccacgcgtccgagccctgtaaccaaaaagcaaatccagagcatggactctctcaggtcaggcccaaaccggtgggagccattctatgaccggtgaggactcggatactgtctctgtttaaaaacctgttctg

SEQ ID NO: 125574 - DNA, 536 bp, Arabidopsis thaliana columbia
  unsure (1)..(536): unsure at all n locations
acagactttgacgtctcatgcacgcgtacgtaagcttggatcctctagagcggccgcccttngntttctttatctttttcctttttttaacaaacagtaaaatctttacttatgtttctcggtttcatgtttgaagataacaaggttttcttcaacaaggaatatacaaataagcatacacccctatatttgttttactcatgtatacattcaattattcttcgaaagtatcacacaaagaaaaaattggttcgaatngattaatctatctatcagtatacttcatgtctagtctctataaccaacaagaacatgctanttcttcaacattgtctatatattataagccctatatacattatatagtcacagactcagagaggctccacaaacgattttcccaaacataatcctatcacanattgcggggggcatgagctactagaggcaatgatcatgangtttcgtcatatctccatcatgttgaaggagaatttcgaaagaagcttaggaatttgcgacatgatcggcccata

SEQ ID NO: 125575 - DNA, 515 bp, Arabidopsis thaliana columbia
  unsure (1)..(515): unsure at all n locations
gtcgcatgcacgccgtacgtagcttggatcctctagagcgggccgcccttgtgtttgtttttcttttacttgacccttaagcttttttgtcaaccacttcttttagcttggcaaacacgtataactacttctaaaactctaccacaacctacttcgccgtcaagagcaggggcggagattcaaccaatggattctaagaacctttcgtgtttcccgggaggcnnnggggacagggatggaaccgggtaaaaatggtcaatcccattcttattatttctctcgaaaatgaacccctccaaaagccttcggcctggttgggggctttggtccccttttagatggtggatactagtttttcgagcaaccggcggagcggttaaggccctgggccaattttttggaaagaagtttttggctaaaccacggctttcgggaaaccgggaatctcgcccaggggggggaattttttttgtggaccccgggaaagggggccaaacccgggaaaatttccaggg

SEQ ID NO: 125576 - DNA, 539 bp, Arabidopsis thaliana columbia
ccaggtctctgggactaatttagggaatgctggtacgcctagaaggtaccggtccggaattcccggtttgacccacgcgtccgcccacgcgtccgcaagaaggagaaatacgagaccaatcctgctttgtatggtgagctcgccaaaggtcaaagcccaaagtacatggtgtttgcttgttcggactcacgagtgtgcccatcacacgtactagacttccatcctggtatatgccttcgtggttcgtaatatcgccaatatggttcctccttttgacaaggtcaaatatgcaggagttggagccgccattgaatacgctgtcttgcaccttaaggtggaaaacattgtggtgatagggcacagtgcatgtggtggcatcaaggggcttatgtcatttcctcttgacggaaacaactctactgacttcatagaggattgggtcaaaatctgtttaccagcaaagtcaaaagttttggcagaaagtgaaagttcagcatttgaagaccaatgtggccgatgcgaaagggaggcagtgaatg

SEQ ID NO: 125577 - DNA, 514 bp, Arabidopsis thaliana columbia
ttgacgtcgcatgcacgcgtacgtaagcttggatcctctagagcggccgccctttgttttttttttcttattttttctcagaaagtgttgttatttgacaaatcaaacaaaatacactctattacatatattaaaatctcttttggtatgcaacaaaatagaacctaaaatgcaacaaaaccgattttaaaaagaaaaataagataaactattatcacctttgcttctttgattccttaatcgccatgatgatcatcatatcctctaatcgatcttaacagaggaatagatgagccttgtgaaccagagacaagcatagaaccctattgttcctgtgagcacaaaaaatgcgtaggaggcgatgagcatgtacccaaagtaaagcatcgcagagaccagtttggtgatctgaagctttgtgaagaagtagaacgtggcatagaggaagaggtagagagctgatgagcctgatgtgaggtatgatctccaccaccaaaggtagtcctcactgcaa

SEQ ID NO: 125578 - DNA, 334 bp, Arabidopsis thaliana columbia
  unsure (1)..(334): unsure at all n locations
ccactagagcggcctgcccaggggggcgggcgcgcgttcgaagagaggttgtggtccgccatgcaccccccaaaccaggagaaaagccatcggcttctggcttcgggaatacaaaaacccaaagggggccgcccgtaacgagaccggcgggacccaaggccctagccaaccctattttttaggggggggggnncccccaccacgcaaagggcnaggccagccccccaaaaaagaaccagcccggggcacccccgagaaagacacagggcacaggggccaccgaggggggggcccaaacgaagaacccgcagcgggaacagcgagggccccggaa

SEQ ID NO: 125579 - DNA, 485 bp, Arabidopsis thaliana columbia
gcctgcaggtaccggtccggaattcccgggtcgacccacgcgtccgggtttacaaagtaatccacactccgacgtcacgtcctttcgctctcaaagtgatttacgggaaccacgaagattccgggagacagtagatctggagagagaacgagaacttaagaaggggtgatcatcccaaccgtgggaaatgttatcttttggggggtcataaccgggagaaccaaggtttggttgaatttattggtcaagggtcttttggagggacttattttttggaagaaccaggattaacttgacctttttggtaaaatcttaagggattaacttaatttcaacggccgcattttggtcattggggatttcaaaccttcaattttcttattaaactaacttaaaatggggaaaatggttgatttggggggaagtaggatctgggcccaaccaagggatcctggaaatcaattggtgggacctatggctaattt

SEQ ID NO: 125580 - DNA, 406 bp, Arabidopsis thaliana columbia
  unsure (1)..(406): unsure at all n locations
nnnnnnnnnnnnnnnnnnnnnnnnnnnnnnnnnnnnnnnnnnnnnnnnnnnnnnnnnnnnnnnnnnnnnnnnnnnnnnnnnnnnnnncctttttttttttttttggagttagaatgctatgaattccaaaccagagaagattcaaataaaacagagactaaaaagggctgtcaaacagtaataattcttgcacatgaacacttaaccagaacgttattgtgaaccaagattacagncagtactcaatagtttgagggcacctaccgaaagcaagttatactacagaaggtagaacttccaatggttaatgatgaaaccatatcagtacaagcaaacctggttttcaacatacacccgatcactttcacaagtggctgcagtcatttcccaacataagggaaatgac

SEQ ID NO: 125581 - DNA, 481 bp, Arabidopsis thaliana columbia
ggaaggtctggccgcctgacggtcccggtccggatttcccgggtcgacccacgcgtccgcccacgcgtccgtagaaactcactcctgacctctcgcatggcgtctctagactctctagacatctttcttttttctactcttttggccactatgcgagagctcggaaacgccgtgcccgaatttcaagtcgatcatcagtttcggctattcgattgcggacacgggaaacttggttggtctctctgatcgtaaccagcttcctgtgactgcgtttccaccgtacggagaaaccttcttacaccacccaaccggtcgttcctgcgatggccgcatcatcatggactatatcgctgaatttgtggcgcttccttatgtgcctccgtactttggatctaaaaatagaaactttgataagggtgttaatttcgcggagccggagcacggcactgaaaagttctttcttaagaagagagggaattca

SEQ ID NO: 125582 - DNA, 479 bp, Arabidopsis thaliana columbia
  unsure (1)..(479): unsure at all n locations
acgactcactttagggaaagctgctacgcctgcaggtaccggtccggaattaatggctggaccgacgcgctcactaatcggatgcgcccttttatgttgtatttgggaggtagatgctaccatttccggaccatagaacattctaatatatcacttactaaccaggatccccacacagttatatatttagcacatgaacgctataccagaacgtggttttgatacaaatatgcagncgagatcttaataacttggggggacctactgagagcagagttttctcctgaggtgacacgtgccactgcttagtgatgaaacatgatctggacaaggacacgagcattgcttcttacaccggacaagtgataccagcggctggtgccatttcccaagataaagatattgaactcttttagcggatctactttgcacaatgagctggcttcccaataaggcaacctggaggctcccccttcttg

SEQ ID NO: 125583 - DNA, 393 bp, Arabidopsis thaliana columbia
  unsure (1)..(393): unsure at all n locations
gacgtgcacgccctacgtagctggatctctaagcggcgccctgntttttccttttttttccccatccaaaatttttttaaaggaagaatggccaaaacaaaaaaacctggggtttatggcagaaggtttggggcaaaacttttttttttttttaccctaaactttgggaggacttggaaaaccctttttcacatgtagctggattttttattcatccgaggaatcgctgatctttccacgaatcttttcggagtagaaagcttcatggcctcctccttttttattgaccaccggcaattccaagccttgccacctagcagttatcatataggctgaggcaagcgggcccattgatcttatgctaccaaccctataacactgagtactccttat

SEQ ID NO: 125584 - DNA, 523 bp, Arabidopsis thaliana columbia
gactcatattgggaaagctggtccgcctgcaggtaccggtccggaattcccgggtcgacccacgcgtccgatccgtttctactgttgggatactgctggccaagagaaatttggtggtcttagggatggttactacatccatggacaatgtgctatcatcatgtttgatgtcacagcacgactgacatacaagaatgttccaacatggcaccgtgatctttgcagggtttgtgaaaacatcccaattgttctttgtgggaataaagttgatgtgaagaacaggcaagtcaaggccaagcaggtaacattccacaggaagaagaacctccagtattacgagatatctgccaagagcaactacaacttcgagaagccattcttgtaccttgctagaaagctcgccggggacgctaatcttcactttgtggaatcacctgcccttgctcccccggaagttcaaatcgacttggctgctcagcagcagcatgaggcggagcttgcagcagcagcaagtcagccactt

SEQ ID NO: 125585 - DNA, 504 bp, Arabidopsis thaliana columbia
gacgtcgcatcgcacgcgtacgtaagcttggatcctctagagcggtcgccctttttttttttttttagtaaaaagatttctgttctgtaaacaatccgtaatgattttccaaaagatgtcacgaagatagtgttctacaatctcatttctgacttaaaattacagcagtaccacaaaaatttgaaaaaggacaagataattaaaaaattatcctccattgttgttgtttgattgaagcttcaactctcaaaagaacccagaaacgaaaggtgtagactttggacctgactttataaccatcaagcttgagcatcatcagctttcttctcctcggtttctttagttgcagctacacttgcttctgctccctctgtgttttcctcagttggctgaacctgttcatcttcaggcaacggttcctcaacgtaatcattctcgaaagcatcaggtggaacctcataaatcctcacttgaggcttcgatggatccttcacaagaacatac

SEQ ID NO: 125586 - DNA, 340 bp, Arabidopsis thaliana columbia
acgttcacacgcctcgtaagcttggacctctagagcgtcgcctggtgtttgggtctcttacggtcatggtgttgcctttgagaggaaggttgttgtttgagaagggaagctcaccaacttaactctaataattgactacacaaaagtggaacaattctttccagagtgggacactgacgcttcgggtccattgatttatcttttaaggagtgcagagcaaagggggctaactaaactagctaagccgaaaaacgctttgggggcgggtttcccctggttttccattttctaatccgtgccaaacttttctccatcttactaagacgggtctccagctcca

SEQ ID NO: 125587 - DNA, 180 bp, Arabidopsis thaliana columbia
agctgggatcctctagagcggcctccctaggcgggcgaaagctttgtagtttggagagaaattcctaacggaaagaacagggctaggacaagaataacaaagcctgaaggccaacatagaggaccgctaaaccatagaagggcgaattactcccacgaggggaaccaagggacacagaaa

SEQ ID NO: 125588 - DNA, 493 bp, Arabidopsis thaliana columbia
  unsure (1)..(493): unsure at all n locations
cgcctgcaggtaccggnccggaattcccggttttgacccacgcgtccgatgcgntngcagagaagacgaggaaagagagagagagagagagagagagagagagagagagacagagagagagagaacgactatggtctcttttaggaagcagcttgatgtgctcatgggagctaaccgaaacggcgacgttttcgtggtttgaggggggggacnacaaccgcgacgggggacagggatacttggcggggcccggcccgcacgagcggncccaaaggaccgaaaacggccaggggaccacgcccaaagggggccccccngcagcggcggaaagaaaacccggaagaacgggcaaaaggggcagacaccaccacggggaaccggaagaggccaaacacaggcccaacgcaagagaacacgaacaccgccacggcccgagaacggccaagaaaagggaccccaaagcgacacagacgcggagcagacgagagggcag

SEQ ID NO: 125589 - DNA, 509 bp, Arabidopsis thaliana columbia
ttgacgtcgcatgcacgcgtacgtaagcttggatcctctagagcgggccgcctttttttttttttttagtttgaaaacaaggtacaatacaaagcatctgtttataaatgatacacccaattaaaaatgtcgaaaagggtaagaaaacctatgtaacctattagttcttccagcttgttttattcccattaagcttaagacccagaacctttcaattcttatgataccacaaacccttcataaccaacctatgaaacaaggtcaactaccccctgatgggttgatacggtttaggagagattcagcagtagtaccatcctgctcaatatcgatgtctaggattcccgccttgatcatgatgatgatgacttcccttttctttttctctgcggtcatgggcaccaaccttgttgaagatgatgcctgacattattaccctcggggtttattttgcttcggaaccaccttgaacatgccattgttgttgttgatgttgattctgatgatta

SEQ ID NO: 125590 - DNA, 507 bp, Arabidopsis thaliana columbia
  unsure (1)..(507): unsure at all n locations
tgacgtcgcatgcacgcgtacgtaagcttggatcctctagagcgggcggccttnnttttttttttttttttttttttttttttttttttttttttttttttttttttttttttttttttttttaagaaccactttttggaaataaaggattttcctttcgacaaaaattttttttaagtggtttttttccctaggacagggttttttttttttggagggttccgcccttggaatcccctggcccccccaaccttttttccttttttttttggggcttccctcccccaagcttgtttttacttgtttgggggggggttttttttggtggcccacagatcccaacggttccttggtttttccccctttttttcccaatttggtcgggacggggcggaaaggaaaaggggggtttggatggggggacctccaattctccggggccatattccctgggtttgaaaatcgaaagggaagccgagaattcccccaaccggaataccaacaagg

SEQ ID NO: 125591 - DNA, 532 bp, Arabidopsis thaliana columbia
caggtctctgcgactcatattgggaaagctggtccgcctgcaggtaccggtccggaattcccgggtcgacccacgcgtccgcccacgcgtccgccatgaagcttcttgggttcgccttagctattctattagttgtggcgacttgcaaacctgaagaagagattacttgcgaagagaacgttccattcacatgtagccaaacagatcgtttcaacaaacaagatttctaaagcgacttcatcttcggtgttgcatcttctgcttaccagatcgaaggcggcagaggtcgtggacttaacgtttgggatggcttcactcaccgatacccagagaaaggtggagccgatttgggcaatggagacactacttgtgactcataccggacttggcagaaagatctagacgtgatggaagagcttggagttaaaggctacagattctcctttgcgtggtcaagaatccttccaaaaggaaagaggagtaggggaatcaacgaagatggtattaactactacagcggtctcatagatgg

SEQ ID NO: 125592 - DNA, 476 bp, Arabidopsis thaliana columbia
  unsure (1)..(476): unsure at all n locations
gcctgcaggtaccggtccggaattcccgggttacccacgcgtggcgctgccacggatcatcggtcgccaccatagcttcttcgctttaagctcttaccctgaacgccccggctccgacttcagctttttcctctaccaatgggcttttgccatagccgcggccggaatcactagcggntccatcgcctagctaatctcgggggggggctgaccttatctactctactttcttgaccggttttgtttacccgacagtctcgcactggttctggtcaagtgatggatgggctagcgcgtcccggtctgacaacaatctcttgtttggctcaggtgctattgatttcgcaggttcaggagttgttcacatggtaggtggaattgccggcttatgtggagcgttagttgaaggaccaagaataggtagatttgaccggtcaggccggtacgaggatttacttggacacagggcatacctt

SEQ ID NO: 125593 - DNA, 485 bp, Arabidopsis thaliana columbia
  unsure (1)..(485): unsure at all n locations
cgcctgcaggtaccggnccggaatncccgggtcgacccacgcgtccgaatcaggaaagggccngcaccatacaacctggaagtaccaacctacagcttcctggaagagaataagttactcatcggttgattaataaaagcacaacagtcaagagtctggatctgaatgatgatctccactggaacgcttttgttttanagaagggggaccggcatgcnagagcaagaaagactngcngnngctgaataagacaaactcgngatttctgcttgaagtatactcaatcttcggttatccaanagaacgaaaacgccgctcagcttattgggaaaactccgatggtgtacttgaacaatgtaggnnnnnnnnnnnnnnnnnnnnnnnnnnnnnnnnnnnnnnnnnnnnnnnnnnnnnnnnnnnnnnnnnnnnnnnnnnnnnnnnnnnnnnnnnnnnnnnnnnnnnnnnnnnnnnnnnnnnnnnnnnnn

SEQ ID NO: 125594 - DNA, 505 bp, Arabidopsis thaliana columbia
  unsure (1)..(505): unsure at all n locations
gacgtcgcatgcacgcgtacgtaagcttggatcctctangagcgccgccctttgttttttattcttttttttttttttttttttttttggttgtttttttttttagttttttatcttttatttttttgttggggggaaaataaacccaaccattttttttttcccccaccccttttttttttttaaaaaaaaaaaaaccgaaagtttttctaaaccgggtttttggttcttaaacaaaggccccaacttttttttccccggattttttggttggttttggccggggtcaaaaaccggggaaagaaacttttcccttcaaaaatttctgaagttcaagggagccccctcgcaacggtttaccctgttaaaggaaaggggtttcccccaagggccttgggaccccctcccgatttaagagcccatgccacccaaacggtttttgaacccctcaataaacccaagggttccaaaaaccttggggggggaccctttttgtttaaacccc

SEQ ID NO: 125595 - DNA, 517 bp, Arabidopsis thaliana columbia
  unsure (1)..(517): unsure at all n locations
gactcactatagggaaagctgctacgcctgcaggtaccggtccggaattcccgggtcgacccacgcgtccgcccacgcgtccggattccataacaatggcgacttcgttagcacgaatctctaaaagaagcataaccatcggctgtttcatcgaatctgattcggcgttacttcgccgcggaagcagtagcggtggcgacgacggaaacacctaatcttaaatcgcaggtgacgccgtcgccggatcgggtaaaatgggactacagaggccagagacagataattcctctgggacagtggctaccgaaggtagctgtagatgcttacgtggcacctaacgttgtgttggctggtcaggtcaccgtctgggacggctcgtctgtatggaacggtgccgttttgagaggagatcttaataagatcaccgttggattctgctcaaatgtccaggaacggtgtgttgttcatgctgcgtggtcgtcgcctacaggattaccagcacanacattgatcgata

SEQ ID NO: 125596 - DNA, 173 bp, Arabidopsis thaliana columbia
  unsure (1)..(173): unsure at all n locations
aagcttggaccacagagcggccgccttgcgtgtgaaatctgacaaaaaacatgacaccagatcctggtggaggaaacactaagatgagagagtgaagggagagttccaactttgcttgctnttatagatacatcaataattgggcggtgaaacaaagcattacaacctgacaa

SEQ ID NO: 125597 - DNA, 189 bp, Arabidopsis thaliana columbia
  unsure (1)..(189): unsure at all n locations
cgcgtacgtaagcttggatcctctagagcggctgcccttggtgtttgaaccttttttctttccaaagaaacgaaatttcattgcttcctctaatgacaaagccaacattatcatcataggacgggaggagctttagaggaaacagacccacaaagcttattgatcagtgttctacaaanacgccgagag

SEQ ID NO: 125598 - DNA, 182 bp, Arabidopsis thaliana columbia
  unsure (1)..(182): unsure at all n locations
acgcgtacgtaagctnggatcctctagagcggtcgccctttgtggttaatgcgtttttttttatgcaacgtagtttgtaatagcgacattgtttacaacgatcatttagccggtcagaagcacgccgctaaggcattttaggcccttgtaaattacattgactcgtgaatcttatttcttac

SEQ ID NO: 125599 - DNA, 395 bp, Arabidopsis thaliana columbia
  unsure (1)..(395): unsure at all n locations
cgccgcggaccggccgatnccggtttcncggcggcgaacccgccgagaaaaaacgacccccgggggggaaacgggccgcacagagacacagcaaacccagaacaacgagaggacagaacgcgaaggggagacacaccaaggcagggggggcattcttatagggggtgggcccagacccggcagcggaaaaccgaaaaaggggcccagacggagggggagagcgccacagggaagaaccccggggagagcgagcgaaccagagggcgcgaagcgagaccgggggaacccaagacaaccaccggagaaaaccaaggccgacgggaacgagagggggccgaggagagggaggccgggaggcagcaaacgaggcagggaagaagcgagagaagaggcgg

SEQ ID NO: 125600 - DNA, 482 bp, Arabidopsis thaliana columbia
ccctgaaggtcccggtccggaattcccgggttgacccacgcgtccggacagatttgctaaaggctagggatatctcgctcgtgaaaactcatctcgacctcagttatctcttatcttctgttgggctaccaaaacgaagcagtacttccattaggaagcaggaggttcattcaaatggtcctgttcttgatttttctctacttcaggatccagagataatggatgcaattgagaatgaaaagacggttcacaaaaccatgagtatatacaatgtagatcgttctgtttgcggtcggattgctggggtgattgcgaagaaatacggagacactggttttgctggacaactgaacctaacgttcactggaagtgctggccaatcttttgcatgtttcctaactcctggaatgaatatacgtcttgtgggtgaagccaacgactatgtgggaaagggaatggcgggaggtgaagttgtgatatta

SEQ ID NO: 125601 - DNA, 494 bp, Arabidopsis thaliana columbia
acgtcgcatcgcacgcgtacgtaagcttggatcctctagagcggccgccctttttgtttttttttttttttttttttttttttttttttttttttttttttttttttttttttttattgagggttttttttttttttttggttttatgtttttttttttaaaagggatttaatattaggagggaggaaaaaaagggggtggtttggctcggaggggggggggagaaaacaaaaaaggggggtttcttgggaagggggatttaatgggggggggttgaaaacccaaaagcggaaactggttttacagattttaaaaaagccgtggggtggtgggtttaatccctaaaaaataagcttgtggagggttatttgtgcaaaaaaaaaacagtaagaagaaaagagtgagaacctcatacagggggatccgtaactctcttttaaaagcgggagacaccccgacaggaagaaaaaaggcgcgtatacatcagggaagca

SEQ ID NO: 125602 - DNA, 504 bp, Arabidopsis thaliana columbia
gacgtcgcatgcacgcgtacgtaagcttggatcctctagagcggccgcccttttttttttttttttttttattttttcttttttttaacaaggaatccattttgtttatcttttttcctcatgtcacaaacaaaacattacaaagaggccgtggcatttcattatctgcagaacctttgttcttgaacttctgcagattcatggtttatacatatatgaatcctcgtttttccaaataatttatcggtaaataaagttacaacaatctaagatgagcagtatcattcattcgtttgatctgccacccgtttctccatgaatgttgtaacacagtcactgaagagtcttctacacagatcttatgagtcattaccggactgcaaccgaggattccggttaaaagacactttataggcaaagaatgcgtgaaaaccccgacacaattcgagattaaggaagacgaatcacttagggcagtgtgattatgattaacttcttcccttg

SEQ ID NO: 125603 - DNA, 488 bp, Arabidopsis thaliana columbia
  unsure (1)..(488): unsure at all n locations
cccggcccgaattccccgggtctcccacgccgtccggggcctggggaggggaccgaaccaaaaggcccttggctcctcctccgcccattcctcgagccccactttcaccaaagaagaggggtcctcaacaatctccccaatgggagccgaggagaggagaggaggaccggccatttgtggatgaggaggagganaagggcggaccaaccacaggacattnggccaatctcctagaaaagaaggtcctagaccaggagcctgagatgtcaccatgtcacgcttaagcttcaccactctcaccacaactatcatctctcggtcctccaaggctgggaccatcgattaaagtctgggatccttacaacgtcctctctccgccgccgaaaccgccgtctatcttctctcgaatcgtgtctggtgatgaagatcgagctgtgacagaggtttatctgattagccatggagagtctgatcttaatcttaaacct

SEQ ID NO: 125604 - DNA, 371 bp, Arabidopsis thaliana columbia
  unsure (1)..(371): unsure at all n locations
cccaacgaaagccggaacccacaaaagcggccgcccgggggggtaaaaacctacccacacccatcctaacaacagactgagagccgaaggaccagaaacaaactccgatcacccaaccaaacggtatctgggggagggagcaataagagaccaaaccggattcaactaagaagaaggaaaagcaaaagaggcttcttgcacacggggggangcaacccacccaaggacnggcccagaaaggcacccccaccacccaaagggccggccacaccacacggngacaccaaaaaaccagaaccgaaagcgaccggccaaacccaagcgcccaaacaaacaccagcccggggcccccaggnaagccaacccaaccc

SEQ ID NO: 125605 - DNA, 178 bp, Arabidopsis thaliana columbia
  unsure (1)..(178): unsure at all n locations
ccggaaccggnccggaaaacccggtttttcnccagcgggggagggggcgcgnacaaccaacaaaacaaaaacaagaaggggnagacccaacgagcaagaccggcncnccaccagagacganaagcgngggaccgaaccacccggcccaaacgccggcacaccaacgancncgganagg

SEQ ID NO: 125606 - DNA, 443 bp, Arabidopsis thaliana columbia
  unsure (1)..(443): unsure at all n locations
cggcaggacccggcccggaanccccggtttgaccaaggcgnccgagcccgcgaccgcccacgcgnccgccggaaagaagnaaccacaaaaanaaccagacccgaccaacggccccggnnccccgccgganacnccanccggaaaccggcgacccncnnncggcncagnaagggaagacgngaaagggtttgttatgagggaggaggcnccaanngacaacaagggggcagangaaagggacagngaggaaaangcgancaagaaaaagnagggaggangggggccnaagaagaaaccnnngaaanccaaggaccangaacgngcgnnnnnggacncagcnganggggcnnnaggcaagcaaaagggacagaagccgaaagggccnngggaagcncnccgcccaaaaggcagccaaccccgcacaggcaccaagagcaagacga

SEQ ID NO: 125607 - DNA, 191 bp, Arabidopsis thaliana columbia
ccgcctgcaggtcccggcccggattccccgggtctacccacgcggtccggactctacctactcctatccccaccacacactgtacctctccttcttctcctctgccactgcctatcctctctttggaaccttccatggctatgttcctctgcaatggaagtccaagctcgggaccaccaacaccgacacgc

SEQ ID NO: 125608 - DNA, 499 bp, Arabidopsis thaliana columbia
  unsure (1)..(499): unsure at all n locations
gacgtctcatcgccgcgtacgtaagcttggatcctctagagcggttcgccttttttttttatttttaagaacaacttttcgtaaataaagaataatccatcagacaaaaatatattttaattgttctatttccatagaacaagcataataaccatgaaaagctacgtacattgaaatcacctgcacacacgacacttatttccttttttttattgnctatcactccaccaaacttgttataacctgaatattaaatatcagattgtaaagtttaatgttaattatttttaaaaatatacttttattctgtaaaatccattactagttttggagaggctccttcttgtcgtcccacagatccaaacgtttcctcgctttttccacctctttatcccaatctgttcggtacgtgacgtaaagtaaaatgagtgtttgcatgagggtacctccaatcatcccgggccatattcccttggcttgaaaatcgaaagtgaagccg

SEQ ID NO: 125609 - DNA, 390 bp, Arabidopsis thaliana columbia
  unsure (1)..(390): unsure at all n locations
gcctgcaggtcccggcccggaatccccgggtttaccaaggcggccgaaacgncgaccgaggacgcgggggcggacgcgggggaaannnnnncccaancaagggaagggccaagggaaaccacgaannaagccgacccccggcgaccanggggggnnccggngggnccgggagcgaaaaccnccggcagcccntttcnntgggggggggagngnccaaacggagcgaagccnnccgaaccggaggcgcgngnacggaggggcaggcaaacagangaagcaacnnncccggggggcaccaccggcgaaaccggggcannaagncaacagcggaaggggaacncccgcccggaccnncgccggacancncgggaaaaaagagcccgccgccgc

SEQ ID NO: 125610 - DNA, 519 bp, Arabidopsis thaliana columbia
  unsure (1)..(519): unsure at all n locations
ctatagaagactttgacgtcgcatgcacgcgtacgtaagcttggatcctctagagcggccgccctttnttttttttttttttttttttttttttttcaaaccctaaattttatttaactttaggtacaagacatacctcttggtcatacatacacacacatatatacatcaaaatttcggaagaaaatagaaataaataaaagcaaagtaaaaacgagtgttttgatcaatctgctagcttttgtctatctctcgcgatcaaacttcatcgccgggttcaagttttgtaacaccgatatgatgttgctaatgagagccagcaagagaatgaagcctatgatcattctcatgagatagatataccgtggattgttgcggtttctctccattgcttcctctgtaataaaccagctcttcttctctgtcttcaccatagatgactccttgtctatggatgtatcactatcaaccgctcttgatgtatcttgtttcacctcttgttttggtcgtatgatgctt

SEQ ID NO: 125611 - DNA, 510 bp, Arabidopsis thaliana columbia
  unsure (1)..(510): unsure at all n locations
acgtcgcatgcacgcgtacgtaagcttggatcctctagagcggctgcccttttttttttattctttttttttttttttttttttttttttgaaaggattttttgggctttttattttaaggcccattttagcccttaaaaaagggggttttttttagctaaaaaaaaggggctttgggactccctttaacagggcccttacaccccctcaaaagggggggctcctttaggcgcataaatgcctacttgaaaaaatttcttgagaaaaacccccccccctccccctagaccggccccaactctttttaaaaaggttttttggatttttttaagggaaaaaaaaaaacctttttcttgaaaaccagcttcacccgaaaaagaaccccaagttgttacctttttttataaagctgggaaacttgaaagatgagacggcccccccccaatatctggaaaaaaagctttttttttattaaaaatgcccccattntggggagcacccccccgcccc

SEQ ID NO: 125612 - DNA, 494 bp, Arabidopsis thaliana columbia
  unsure (1)..(494): unsure at all n locations
gggctacacgcctgcagtccggtccggaattcccgggttacccaggcgtccggttcgtttgnacagagaagctncagatctagaagaaaagcagagttcataaagagaacccattttaaaccctagaaatcaagtgtcaatctcggaaaccttctgattccgcaacaatggcagttacagattctgaaagttcttttcttggggaaatgactngnggtaccttacttgagaagttgcaggaaatctgggatgaagttggtgagagtgatgatgaacgagacanactgcttcttcagatagagcaagagtgtcttgacgtttacaagagaaaagtcgagcaggctgcgaaatcccgagctgagcttcttcaaaccttgtcagatgctttatgctgacttttcagcctcacaatgtctcttggagacaaagcttaggttgcattccggattagtcttcaggaacgatttaagaaacacttgctgcattagcaccgg

SEQ ID NO: 125613 - DNA, 521 bp, Arabidopsis thaliana columbia
tatagaagactttgacgtcgcatgcacgcgtacgtaagcttggatcctctagagcggccgccctttttttttttttttttttttttgaacgcaaacaatactttatgattaacttgaagatacataacgaaaatgatggatgatgtagctatggtgggataactaaacaacgtgaaaaagaagcattatttacaaagtcgattgaaagagaaaaacagttatatttaatggtgtgtgggaaaaaaaagacaaatatagtttggtttcgtatataacaagaaacaatctatagtccccgggacggagctggaggaggcggagacttattgtcgttctgcatcatcacttggagaatggaagccacagtctgaattaaagtcaacacaaggagaacgactgcggcaatggtggcagtaccggtccaaagatctttgaaataaactcgccgaagagtgccgacagatctgttgagacgattgtcgtagtgtttgttgaggttttcgactatatcgctatagtga

SEQ ID NO: 125614 - DNA, 528 bp, Arabidopsis thaliana columbia
  unsure (1)..(528): unsure at all n locations
agtgacactatacagactatgacgtcgcatgcacgcgtacgtaagcttggatcctctagagcggccgccctttgtgttttatttttttttattttttttttttntaatgaagaaataacgtctacaataaatcattaaatactccatacacgactccaccatgaatgggagatcaaaacaattaagtaaactacaaacaaataaaattgaataaaacaaataaacgtgtgtcccctaagcgcaaaattaaaagatacaaaacaatatatcctctcactcactcacgtcgtcgtcgtactaaccttggccgctttgaacggcggatgaagcagcccaaactcgtccttggcatcgagcggcctatccgtctgattgcgcgtgggtttcacgcgccggctcccaagcgatttatgcgtgaaaccatacatttgaaggatctgattgtctccgaaattaaacgctctatccatctgccgtagacaccgttccaccggataatctccaaatttcccgcacggtttacacccg

SEQ ID NO: 125615 - DNA, 339 bp, Arabidopsis thaliana columbia
  unsure (1)..(339): unsure at all n locations
gacgtcgcatgcacgcgtacgtaagcttggatcctctagagcggtcgcccttttttttttttttttaaaagtatggttcaataaatatagtgagaacagaataggtaccctctcccgtatataggaattttattttacatattacatcccacaaaatccaataagttagatcacacccgccgggcaagtattttcctctttcttcntgnnggtgggaggtaaaaaagctcaacctaatacaagttttttcaaagtaaatgatcaacaagttcacgggtcggcttgtgaattaacttgaagaaggaccgccattgaccactggtacttgttggacggtgc

SEQ ID NO: 125616 - DNA, 320 bp, Arabidopsis thaliana columbia
  unsure (1)..(320): unsure at all n locations
cccccccngggggaggaataaaaaaggaatcgatttcttggccggcgcagaggctaacgggaccaaatccactgttgatcttgggtaaagttccgggtccggctcagtcaacaacaaggggggacgngtctgaggtgnttgnggagcgggggggggagaccacgcagaaaaagagagccgttgaagatctccgggaagtaatatgaaacgtccgtccattttcgccggcgacaatggatnacggatcacactcgaagnatcgcgaatccgagaggaacancaacaacaacaccaacaacaacancaaccaccaccgggag

SEQ ID NO: 125617 - DNA, 188 bp, Arabidopsis thaliana columbia
  unsure (1)..(188): unsure at all n locations
gcctgcaggtacccggcccggaaatccccgggttgaccacgcgtccgggacgccccgaaagagcggagatgcgggggaacgagggcaacnccagcggcgnagccnngagagccggccnccncaccnggcngatgctctcctccggcgcctcctcaaaaagcggctccttttccctccgttactcgaag

SEQ ID NO: 125618 - DNA, 339 bp, Arabidopsis thaliana columbia
  unsure (1)..(339): unsure at all n locations
ttttacgactcacttttggagactgacacgcctgcaggtaccggnccggaattcccgggttttcccacgcgtccgacagccgcagttctttgcttgggatggcaggagatccttgtgtntctattggtttctgtccgatggtcatttttcaagtctttgaatcttgtcgggtttttcacttcttggttgagagcaattctttttnaagcgatagcngnagngagatccagaactgagagcttcngagatataaaaccatgngatggattatcttctatcttacatttttatttactgcataattttacacgcttattttcgaaaaaaaaaaaaaaaaag

SEQ ID NO: 125619 - DNA, 484 bp, Arabidopsis thaliana columbia
  unsure (1)..(484): unsure at all n locations
cccttgcaggtcccggcccggattccccggtttgaccaaggcgtccggattaatgcaccaccccagtttaaacattggatggcaatccatgctgggaaaccaaaaggcggaattactgagtgtttaaaggtagatcctgacaaggttagacgccttagcttaagcgaagaacaacttgaaaaggcagcagatatatatgcgaagcagatggngaggggaactcagcacaatnggctgaggatatacccaaaaggaactagagncacatcatcaaattacaacccgttggttggctggagccacggtgctcaaatggtggctttcaatatgcaggggtatggaagatcattgtggctaatgcagggaatgtttagagccaatggcggatgtggctacatcaagaaacctgaccttctgctgaaaagtggttcggatagtgacatatttgacccanaagctactctacctgtgaaaacaacactta

SEQ ID NO: 125620 - DNA, 494 bp, Arabidopsis thaliana columbia
  unsure (1)..(494): unsure at all n locations
gcctgcaggtaccggtccggaaatcccgggttgaccacgcgtgcgctctcttctctgctcgtcagatctaaaatccatcgggttttcgaacccccacctcatcaattattacctttggcttaaggaggacctaccgtggtggttccaaggattttccggtggtggaaggacctggaccgtggggagaaggtangggggggggaccgggaacctatggaatggttattgaaaataacttttatttccgtcctgggactggcaccatcatcggtcctaacaccactgtccatgaaggtagaatctatcagtggaagctttttggtgacaaaaataacccggagaaacctccacctgtccaattccattcacgtgtcaccatggctggggtcaaccacaaaacaggagtggtggatcctaagaaattggggctacttgcaacctggcaaagagagtccacattggaggatttcactggccagtggaagaaggaaatg

SEQ ID NO: 125621 - DNA, 403 bp, Arabidopsis thaliana columbia
  unsure (1)..(403): unsure at all n locations
cacgcgtacgtaagcttggatcctctagagcggcctgcctttggggttggggcttttaaanaaacaatatgcagatatttatgaccaaagattagaaatcagcacgatatccgaagccagtccccaacgtagacgatccattacacagaacatacgaccgaacagaaataatccaaggtaataaatctaaacacctcctcattgaagatgaaaaaaaagacnacacacacaacncatgaaaagcaacaaacaaaaggggagacgcggaccccccgaaaacggaacgcccaccaccaacaaacaaagaccaggaagggcaacgacaaaacggggggggggccccaacccaagggagggcgggggcaaccccaacgagagaggcgagcaaaaagaaaaaaaagac

SEQ ID NO: 125622 - DNA, 520 bp, Arabidopsis thaliana columbia
acgtcgcatgcacgcgtacgtaagcttggatcctctagagcggccgccctttttggtttgtgtttttttttttttttttttttaagttttttttttttttttttttttttttttttttttttttttgaagcttaaactaatgaatatggtttgtttttcccgcaaaaaaaaaattaaaatacttttctaaggcttaaggattgttttcttcttaggggggaaaaaaaaatctttacaaaaccattttttttttttcaaatttgattaaccaactttaaatttttaaatttttttaccttaaaccaaacccccggtttttcctttttacaaaagaaaattttttggaaaacaaaaaaagggtttcttgggaatccgtaaatcgccgggggggtcgtaaaaaaaaacccggggggaatcctttttttttttcaccggggttggcccttgaaagaaacttcaaacccagagaccccgggggggaagaggtttttacggggggggccaatggacttaaaaaaag

SEQ ID NO: 125623 - DNA, 469 bp, Arabidopsis thaliana columbia
  unsure (1)..(469): unsure at all n locations
gcacgcgtacgtaagctaggatcctctagagcggtcgccctgagggtgggggcttgaagaaacatagatgttatgcaagatggaatgctaccgggattgggaccaacccagagccaaattgatacaaagcactgatcgctgcagtaggggctgctgcaaaaaaagccaacaaaaagaggcggaaaagaaaaccccctcgcgaaagaatgagananaaaaaggagaaggagaaaagaaacgagccacaaacgaggggaacgcgcggagcccaggcccaggaaccaaagaagagagggcagcagaggaaacaaaccagaagcacccgaaccaccggcggaaccacgaacaagcngagacacgccagcaaagaaagagggggcagaggcgcaccaaacaccggagcgggcacggaaagaagcaggcagagcaaacgggaaaacccggagggaaggaaaaggccggacaagag

SEQ ID NO: 125624 - DNA, 448 bp, Arabidopsis thaliana columbia
  unsure (1)..(448): unsure at all n locations
acacactatagaagattcttgacgtcgcatgcacgcgtacgtaagcttggatcctctagagcagccgcccttttttttttttttttttttttttgataaaaaaagcagagttttattgcttgttgtaagcaaaaaaaattcatcaagatataccacaaaataatctaattctgatagttgtgaccnagcaatacaagaaaaatgaatccccaaaaaattggggaagtttttctttggggcttttttttttttggaaaaaaacaaaaaaaaatccccccttttaggggcccccccccccgaaaaaaaaatttgggggggggggaaaaaacaccaaaatatttttttttaaaaaaccccccctttttaaaggggggggggaggaaaaatctttttttccccccgggggggggaaaaaacaccccctttggggagagaggggccccccccc

SEQ ID NO: 125625 - DNA, 495 bp, Arabidopsis thaliana columbia
cgcacgcgtacgtaagcttggatcctctagagcggttgcccttttgggttgggggtttttttttttttttttttttttttttttgtttaataattccaaaaatatttattctctccccaccaaatatattgggatacattacaaaaaagccctaaacaattattagtgagcccaaataagaccaataaccaacgatttttctcctgagggggtgtccaggggaagcacggaacccatgaccggaactagacccagaacccggccctgaatccgaacccgaacctgaacccgaaggagaggaagcggatttggagtcagaagagacaacgttgactttaatcttcatgccttggtcgcaatgcccaacgggtccacaagcgaagtaacgagtaccggttttagaaagcttaacgacgtcgtttccagagcttaaggaattaactgatgttcccagggcacaactcttggatgctggttcacttcctagctccacaa

SEQ ID NO: 125626 - DNA, 509 bp, Arabidopsis thaliana columbia
  unsure (1)..(509): unsure at all n locations
gacgtcgcatgcacgcgtacgtaagctaggatcctctagagcggccgccctttggggtttggttttttttttttttttttttttttttttttgtttttttttttgttttgttttgttttttgtttggcctgggacggcctagtaacggattgaaccaaacaacaccccccgttcgactgggggggaccaccaaacaaaataaaaaaattcctcctagggggggggaaaagttttgaggaagagagcgaaagaaggatgatttcagggggggcagggcaagccccccccaagggggggacaacccctacgtagaattggaaatgtaaaatggaccagttgctgggggggggagaggggccggtgaatctgggtaataggggggaaaaggcgggggaccttgcaaaggaatattaatntacccaccagcgaacacacgattaaccccaaggcggggtgctagggggaatcaaaagccgaggacgaacccctcccccccctagccggcaaaa

SEQ ID NO: 125627 - DNA, 523 bp, Arabidopsis thaliana columbia
  unsure (1)..(523): unsure at all n locations
aagacgtcgcatgcacgcgtacgtaagctagtatcctctagagcagccgcccttttgtttttgctgtttttatgatttaagatgtgtttactgaggaatccttgatgttggttgcgtagacgtgccggcgccggcaactagttacgattaagaccaaacatgaccagccgttctgctggtggggaccaccaataaaaaaaaaaaaaattccctcctgagggggagnngattttnaaggggagagcgtatgatggatgaatcagggggcctagcgcgagcaaaaccaaagtagaaaacaccccccagggtgcaatcaaaaaatcaaaacagacaaccgcgtgggggccgggggggggctcgtggctggcataaacagaacggagatggcggggaacttggcaagggaatataatantccantcagcataacaaaagagtaacggaaagacgggctggtaggaaagatcacaatcacgggccccccccgtgcccctcatatagcggaaagacaaaaagaaaagaa

SEQ ID NO: 125628 - DNA, 514 bp, Arabidopsis thaliana columbia
  unsure (1)..(514): unsure at all n locations
acgcgtacgtaagcttggatcctctagagcgggcgtccctggggggtgaaggctttttcttgtgttgggcaaaaaaagcattaacaaaactatttttaccaacttccaaagagttcataaaaacgccaacttgaacacctttttaaaaattaccacaaaacacccaatagggccacaccaaataaaaaaggtnatgtcccctgcttggagggaaaaaannaaaaaagatnnnatcccaaacaagaggggaggtaaaaaacacccccaagaagaaaccgcccttccgaggaagttcctaaaaaccggtatggacataaatggaccttcgggaaagggcgaatgatcaatcgactaaccgccaatgaggcgtcgggacaagccctgaaaaaataactccgctctttggagaggcccgaggtttgttcttaagccttcggacacaacgagctgggtggtgggtcctggcccccaaaggtagaggacgttacaccggagctccggtggagttagaaag

SEQ ID NO: 125629 - DNA, 519 bp, Arabidopsis thaliana columbia
  unsure (1)..(519): unsure at all n locations
acgtcgcatgcacgcgtacgtaagcttggatcctctagagcggccgcccttngcgtttgatgtgtttgtttttttttttttttttttttttttggtttctgtttttgtttggatattctcttttgtttcctaccaagaaaaaaaaacgctttttaatttcttttaaccgcccaaggggtccccccccccaagggaccacttttaaacttcctcataaagggaaaaaaaccttttttagaaatcttgaaaagcctccttttttcagaaaggaaatgggaaatcccttagtttttggggtaaaagttaaaacccctgcttcccttttttggtcccaattttatccacttttaaaggcctaatttttggcgagttttgggccgccaagggaatccccccagacttttccctaagcttttggttgtatcttcccgagacccccggattccctttgggggctaccgcatccccccgatttggggctcccggctcccccaaattggggggtgggggacccccccc

SEQ ID NO: 125630 - DNA, 262 bp, Arabidopsis thaliana columbia
acgtcgcatgcacgcgtacgtaagcttggatcctctagagcggccgccctttttttttttttttaaacggaaaaagttgtactactgaagactaaactcgtcgttggcatatagaaacaggacaaatagttcgaaaggaactcgatcaaaaactgaactgccatactcaatatgaaaaaaaaaaatggcaataattcaaaacaatatctacttatggttgaaatttgaagacagttactcaaaaagtgtgttacacctaata

SEQ ID NO: 125631 - DNA, 534 bp, Arabidopsis thaliana columbia
gtgcactatagtaagactatgacgtcgcatgcacgcgtacgtaagcttggatcctctagagcggccagcctttgtttttttttttttttttttttttttttcctataaactatggttaatcaaagttgtatataaaaccagattctaccatttgtaattttgtagtaatttgttacaaattacaccgagttaaggtaaattactcaaaggctagtctctgagtgccaatttttgaagcatatgatcccttttgcgctaccaattaggaatgtgttccaagctctatgatcttcccatcagagcacacagcgatctgattcgcgctctgaactgtgctcagtctgtgagcgatgactaatgttgtcctgtctttcatcagacggttcaacgcactctggactaaccgctcgctcactgcatccagcgcacttgtggcctcatcgagaatcaagatgggggcattcttcagcagagatcgggctatggcaactctctgtcgttgtcctccgttaagcaagcctcctctttcaccaa

SEQ ID NO: 125632 - DNA, 533 bp, Arabidopsis thaliana columbia
  unsure (1)..(533): unsure at all n locations
nnnnnnnnnnnnnnnnnnnnnnnnnnnnnnnnnnnnnnnnnnnnnnnnnnnnnnnnnnnnnnnnnnnnnnnnnctttcttttttttttttttttttttttttttttttttttttttttttttttttttttttttttggcaaaattaggttcttattatattttacgaaccaacattttaaccgagttccggttcacttaaaatttattccaaaaacatatagttccggtttttttaaaatttattccaaaaacatatagttccggttgaaaaaaacaaagcacttttcaaagaaaggacatttgaagttcattatcgggtccaagcctaaccgagttcacgtaatcagtcatgcaatgatccgacagaccaggaatcaccagccccattagcctaaacaagatcctaaaccatccctttttgtaatctgggccatgagtgtaccccatcgtgaagcctttaaccaactcccaaactgggatcacatgcccaaaaattttgtaacccaaaccgtaaggggtcgggtccggctct

SEQ ID NO: 125633 - DNA, 503 bp, Arabidopsis thaliana columbia
gacgttgcatgcacgcgtacgtaagcttggatcctctagagcggccgccctttttttttttttttttttagataaataaaatgtattagtatataaaatagaaatagaatattttttaagaatattctttttagagtagaaaatagagggataaattgtagagagtaactctattttcgagtaagatatagagctatacattggagtatgtgtctaataaaactcatatcttggaggcatcagctgtgatacgacggttgagggcaacggcagccttcgaaccattgggacgaccgagatgcttgctgatgaaatctccagcagctataagctttcccaagtcgacattggtgtggacgcctaaaccgttcaacatgtaaaccacatcttctgtggctacatttcctgaagctccttttgcatatgggcagccgcctaatccggcaattgatgagtctactatgcttattcccatctggagagacaccaatatgtttgcaaga

SEQ ID NO: 125634 - DNA, 500 bp, Arabidopsis thaliana columbia
atgacgtcgcacgcacgcgtacgtaagcttggatcctctagagcggccgccctttttttttttttttttttttttttttttaagaaatggttttattaatcttatttgcaaaatggtgtgatcatactcaaacgtcatttaaaagctttcatgctcacactctctctccctctctctctttatcatctttcaacacaataagcatatcatcttgcttaaataaaagagaatgatctgtgtcaaagtgtttcaaaaactaggttaatctccaaacatacattcacttctcaaaatgtagaacataacatgacttgaaacgttttcacacacacacacaagtattgacatttgatgtttgtttctttcacgaggagaatctgtcgcgatcatgaggcgaagagtagtcgatattggggccgtgagggatgatcccgaatgggtttatcgtagggtggcttccgtagtaatgttgcttaatgtgttccatgtttacggtgcta

SEQ ID NO: 125635 - DNA, 534 bp, Arabidopsis thaliana columbia
  unsure (1)..(534): unsure at all n locations
nnnnnnnnnnnnnnnnnnnnnnnnnnnnnnnnnnnnnnnnnnnnnnnnnnnnnnnnnnnnnnnnnnnnnnnnctttgtttttttttttttttttatttagaaccttattccattgtgatgaatgaaaacaaatatttgcacaaataaaaaaagaaggagcctcccgaaggaatccttgtttagcaacggcggtggacctttgcgggatgagctagagaggcgattagtgtggagggtttgctgttaacattgctcgatgctcaacaccattaacggaaactatggagaatgtacaatggtctatatattgcttgagagaagagagtcgtgcacattgatctgaaaattgactctaaagtggttgtggggtttctctagacatggatagatgattctcatcccatgtccttcttgatatgtttgtaccatggctttattttaaactacaatcacactccaattacactcctcgacttcctatgatttcattaaatttttcagtaaaacaaaatcgttaaaaaataaaataaaaac

SEQ ID NO: 125636 - DNA, 523 bp, Arabidopsis thaliana columbia
  unsure (1)..(523): unsure at all n locations
acgtcgcatgcacgcgtacgtaagctaggatcctctagagcagccgccctttgtgttttttttttttttttttttttttttttttttttttgtgggccttaaactagatttattatttgcttatacagttaccaaatatttacaacttgcaagtgctgtggcccttgggaagggaaaaaaaaagatttaagacctctaatactttttctcttcttaggggggatgaaagagagcttgacctcttatggggagaaatgggcctttgggggtgggagggggtggaggcgaccaaaaccctactgggcctttagcccccggaggggggggggttccccatataaaagggaaaaggccataattnccgccacttgtggccgggacctaaaacccctccactttttttgttacccagtttgatggggaaacgcccctttttaagtgggggaggggctcccccctggggggttttcttttttagaaaccccgggggggggggtcccacccggggttaggtaaagggaag

SEQ ID NO: 125637 - DNA, 505 bp, Arabidopsis thaliana columbia
  unsure (1)..(505): unsure at all n locations
acgtcgcaagcacgcgtacagtagctaggatcctctagagcagccgccctttgtggttgtgtttttttttttttattttttttaaatccagaggaagttatggttccccaccgtgcccccgccgcggaccagaacccccaaaagcccatatttcggtaaagaacgtgtgggaataaaaagggcccaaaaaaaaaaaaaccccttttcttttcttgggggggaaaaangaaagaggggaaaagggtttaaaagcaaaaaagaacacnggacttttggtgcccacacccttggggttcttaaaaggaggaaatgctggctggagggttttaagggctctaaagttttaaggccctttattcaatcggagttttggacccgctaaaaaaccttgggcccggaaaaaccctgaacccctaaaaacccccagtaaaggggcgtagaacgaaaaaaaccggacccaagagggcctttgtcaaaaagctctttcccaaaaaacccttaaaaa

SEQ ID NO: 125638 - DNA, 525 bp, Arabidopsis thaliana columbia
  unsure (1)..(525): unsure at all n locations
nnnnnnnnnnnnnnnnnnnnnnnnnnnnnnnnnnnnnnnnnnnnnnnnnnnnnnnnnnnnnnnnctttttttttttttttttttttagccagaacaagtatatgattacttcatctctatatggcttattccaagaaaatccaaagaaaatgtaaaaggggattgagagaagctgaccaaaaactaagtctaacagcttccagaagatgacaaatccatgattctcaggcaacgttcttgtcttgctgtttgatgatattttcattaggttcatatgttgtcacttcgtcatcacttcctttgtacctataccatcttgacatcaccaagaaataagcaaaattaactgccaggattccagcgatcatgaaatagaagagatccaatcttcctttgttcaaatcctcagctaaccagttaccccctgacgagttctgtgttgtcctgtgaactgttgcaatcaagaagctaccaaggtaactcgaaactcctcctccaacgtaaaagatggatccagcgaaactc

SEQ ID NO: 125639 - DNA, 511 bp, Arabidopsis thaliana columbia
tgacgtcgcatcgcacgcgtacgtaagcttggatcctctagagcggccgccctttttttttttttttttttttttttttttttttttttttttttttttttttttttttttttttttttttttttaaaaaaaataatatttaagtaatggctcgcttctctatagcatctccagattacaaaaaatagattgacttgttagccgctttcctcacttggggggttttaaacaaacaccatccttgcaagactatcaattttttttaatcttcaaggaaattcccccctaaaaatctgcaatctttcatccgttaaaaaaccgagcaaatcccaaccattgacgtgacagtttttcacattttgaagcggaaaatgacttgacaatggccaccgttgaaaaatagtaaaagtcgaaggatcttgcaagatgaactcccgagtggactcgtcacaagatgcaaaaagttgtttcctttccccaccaaagtctataatcgctgttcttggcaaac

SEQ ID NO: 125640 - DNA, 519 bp, Arabidopsis thaliana columbia
acgtcgcatgcacgcgtacgtaagcttggatcctctagagcggccagcctttgtgtttttttttttttttttttttttttttttttttttttttttttttttttttagcaaatttgtttgtttttttttttttttggggccaaagggggattcccctttaaaaaaacttttttgggtttcctttttgggccttttccttaaaggaattgtcttttgggggaaaattttcccaaaattttttggtttttggaaaaaaaaaaaaaaaaaaccttttttcccaaaccccaatgggaatttttaaaaaggggttttgggtttttaaaaaggttggggggggggtttttaaatttttgggggggggggaaaaaacttttcaggcttaagaaaatcggtttgggggggttaaatcttttggggcccaactttttgcccttaaaaggggggaaaaaggggttttttttttaaaaaacttgggaaaattggcatgggattttttaaaaccccggtgggggtttttcc

SEQ ID NO: 125641 - DNA, 493 bp, Arabidopsis thaliana columbia
gtcgcatgcacgcgtacgtaagcttggatccttctagagcaggcggcctttgtgttttgattttttttaaattggattattttgaaattgaacattataaaaatagttttgtgtttttaagcaaaaaattaaaactttacttttgggaaaaaaaggggggggattttttttttcacggattagaaaaagaaaaaaaacccaatttttctcgtttgaaggaaccaacggaaaagaaggggacaggggcccccgaggggaaaacggtttttgaagtgtgaaaaaaatatggattacaaaagctctgaaaatgaaggaagtaaaactttttttattcatttgtgagggaggcggttttaaaaggggaccaaaaaccagaggattgaaggggttgccggttttggcgtcttttggaacattattgactacagggccagaaaggggagactctatgggattaattaacttcatggtttaaacaatgcaaagaactaga

SEQ ID NO: 125642 - DNA, 513 bp, Arabidopsis thaliana columbia
acgtcgcatgcacgcgtacgtaagcttggatcctctagagcggccgccctttttgtttttttttttttttttttttttttttttttttttttttttttttttttttttttttttttaaaaaacatccttttttccattcaaccaatcatccgacaagtttgtttaaacacgagttaagtcagggttttgaagtttacatttttttcatcttggaagaggaaaatgtgtgtgtgtgttcacaaggagtcatcacctaacaccctcaggggcaaaattgcagtagggtgtgtgcaaccccacaagttttgtgaaagtaaaacacacaaccgcacacgctagtcccagcaccatccccacactgcctttccttttttttaacctaactgtttttttaatcacctgccaaaagctgggtagtaatccaccgcacgccaccaccattacgtggtccagtccgctgaaatctatccctgctaatatggatcctatggccgatttgggtcccacaaatcc

SEQ ID NO: 125643 - DNA, 540 bp, Arabidopsis thaliana columbia
  unsure (1)..(540): unsure at all n locations
nnnnnnnnnnnnnnnnnnnnnnnnnnnnnnnnnnnnnnnnnnnnnnnnnnnnnnnnnnnnnnnnnnnnnnctttgtgttttttttttttttttttttttttttttttttttttgccttggaaacacttgtctacaagtacaatagacgattcttttctttgtcatagttttgggaaagacattgactttacgatatagaaatgagcaaaagagctttctgtttctatctcttttataggngaataggggtcttcatgtggcgtgtatacacagcttaaaatgcagagtaatctcctttgtggcaaaatattgaaaattgttattcttcagttgatatctgtgacccatcccttgttatcttcaatcaatcctgtctggatacctacgaggactgaacgcagtttctggcaaacagattcatccccggttttatactctactcttttttcctgatatgtgatagggcccacgggagcaactactacagcagttccggtgcaaaaaacttcatctgcatccattacttcatccacatgaact

SEQ ID NO: 125644 - DNA, 538 bp, Arabidopsis thaliana columbia
  unsure (1)..(538): unsure at all n locations
gtgnnnnnnnnnnnnnnnnnnnnnnnnnnnnnnnnnnnnnnnnnnnnnnnnnnnnnnnnnnnnnnnnnncttttttttttttttttattaaaagatgctgacatgcttactgatcattacatggagatgcatgatacccaacgccatacatcatatcatacatactggacattatgattatatcacccccaccacaaacccaagatcaacgaagagccctcatttatttttaataactctaagccacttacctgatttttacagcgtcaaggctggacacacgtttgaaggaggtgtgcactaccatgatgtatccatcatcacactatgtttgatgtaactcaaaagatcttcatattcatcggggcccgtaccaagcggagacctcaacacaccgaaggccctggctgtctcactttgtccatctctgaaggatcttgactgcgagattacgttggttactagtcttacccttagagacagtcaaggcgttgacattggataagatctggactgtcctactgaactccttgaacaa

SEQ ID NO: 125645 - DNA, 473 bp, Arabidopsis thaliana columbia
  unsure (1)..(473): unsure at all n locations
tgacgtcgcatgcacgcgtacgtaagcttgtatcctctagagcagccgccctttgtgttttgtgctttttttatttttttttttggttttttttgaagatttattgtttgaatgatttttttgttaaanattggaaataaggtttggagtttttaggaaagaggggggggggaaaaaaaaaaaagggggggggaaaaaaaaaaaccaaatatccttggggtgggccaaataaaaacggggcctggtgttttaagacccgaagcggttcaaaaactgggaaagggcccaaaaacaaaaagggggcccngggttcctttttagaaggcccccccaaaaaacaaaaaaacgcgcaggaaaaaaaaggttccccccccgggggaaaaaacccccccccccaaaaaggccctttcccgggccaacccctttttgtggggaaaaaaaaatttttttttttgggggggaaaaaacggaag

SEQ ID NO: 125646 - DNA, 523 bp, Arabidopsis thaliana columbia
  unsure (1)..(523): unsure at all n locations
nnnnnnnnnnnnnnnnnnnnnnnnnnnnnnnnnnnnnnnnnnnnnnnnnnnnnnnnnnnnnnnnnctttttttttttttttgaatcccacaaagtgatgtattaaagccgcaataagataaacaaatagcaaaccaaactcctatataattcaaacaatcatcaaaaaccacactgcgaatgcatgtagcagagctaatagaaactgaaacatgttatatgttgttgaggtcacactatatgcacccaacacatgacaaagcaatgctgatgcttaaaaatgtcgagaatggaaatggatgaaatgcagactgcctggaagatgcatcgtattcgtgcagttgttgggagataaggaagagagtacgtcccccttcaaggcctactgatatgtcagggctccttgggctccattagcactcggagaaggaaagaaagaatagccgccaccttcctttctcttcccatatggattctttgaatattggatcctcatgccaattgaaccagaacttggaatgaca

SEQ ID NO: 125647 - DNA, 380 bp, Arabidopsis thaliana columbia
ccgcgttcgtgagcttggatcctctagagcggtcgccctgtgggtttaagcctttatcaaaaaaaatgaaagaaccaacctgtggaaccttgcatttggaaatgttggcacatatgaaaccttacaacatgggttgaagtaacatatacccaaccaccttacataagaaaccaaccagtgtaacctataatctttctttttgagaagaaagcccaaacccagaaacaaaagcccaagaggaaggaaaccaaggaccgcccggcaccacccccccccgggagaggacaacaaaccaaggggaaacacggggaccgaagaagcccaaagcggcggcacaaacaaacggaggggggagccacgcagggaacgccaaaaccccc

SEQ ID NO: 125648 - DNA, 504 bp, Arabidopsis thaliana columbia
gacgtcgcacgcacgcgtacgtaagcttggatcctctagagcggtcgccctttttgttttttttttttttttttcaatgcagcattgacaatgcttatgaacaacaacaacaaaaaaagagctcgcatgtttatttgaaagaaaaaaaatgactcgacagtgataatgtttccaattgactagcacgaagcaagagacgaagaagatctaagcgaaagtttaaattaaagtcattctcgtcctcctccctgcaaacatttttattgcaacaaaccttgggatatataactcaagtctctggtgttaccagatttattgtttgatcaagttcctgataacgtattgcaaaatccctccgtgatcgaaataagccaactccacctctgtgtcaaatcggagtgtacatgtgaaagatttgccattgtttgtgacgactgttacatcttgtcctggtttgatctcactaacattgtttgggagctcaatggtgtaaagctcctgacc

SEQ ID NO: 125649 - DNA, 512 bp, Arabidopsis thaliana columbia
  unsure (1)..(512): unsure at all n locations
tgnnnnnnnnnnnnnnnnnnnnnnnnnnnnnnnnnnnnnnnnnnnnnnnnnnnnnnnnnnnnnnnnnnctttttttttttttttgattcccacacaccgatgtctttatgtccgattatgaaaaacaagaagaatgccactctcttatgtaaatttacacaatcataaaagacctcactagagaatgcatgtttcaaacctgatgcaaactgagacatgttgtctgtttttgaagcaacactatatgctcccaacgcatgacaaaggagagctgttgcttaaaattgttacgattggaaatggctgaaatgcgtactgactggaccatgcttcatgttggtgcagttgatgggaaatatgaacgagagttcgtcccccttcaaagtctactgatctgactggacttcttgagctctattatctctctaagaaggacagaaagaatagccgtcaattttctttttcttcacatatggattctatgaatattgtatcctaatgccactggacca

SEQ ID NO: 125650 - DNA, 519 bp, Arabidopsis thaliana columbia
  unsure (1)..(519): unsure at all n locations
acgtcgcatgcacgcgtacagtagctagtatcctctagagcagccagcctttgtgtttttttgttttgtttttttttttttatttttgttttctggtgggtgatcaacacgaaactaaatcggttatggggagaaaagggaaaaaaatagaaacttggggagaggaaaaatagtgttatttgcgacctagggaattttgacgattttcctccttagggaggaagnnatgttnaggaagaaaaagggtctataacatggtttggcttaagacagtgaaaacggaaaacaaggtacaaagggggtatggtggtgtattcagcaagacaaaaaccctttgaattggcaggaaaaagactggattttcaaaaaaagaaagaatgtggactttatgccaaaaggcacttcaacgcaattttccaaagtaaagacctaggtactttttggaaagggcacactaacgtgattctaaaaaaacccttttgtgcagtaaatagaagactcaccggtggggcctcaagg

SEQ ID NO: 125651 - DNA, 510 bp, Arabidopsis thaliana columbia
gacgtcgcatgcacgcgtacgtaagcttggatcctctagagcggccgccctttttttttttttttttttttttttttttttttttttttttttttttttttttttttttttttttttttttttaaaggaagaaaaaagaagccttttcagatcccagagtttcttttcgaaaacaagagatgagagatgcggaccaaccttttttcttttttgggggggggtggttttaaaaccacccagcgtttttttttttgggggaacatgaaatttgtgaaaacctgtaaagctaaaatcaatgctttggatgccttggggatctcggacaaacaggcgtttttgaaggactcccccttttagggaaagaaccaagaacaactccactgcagttgaaagcagtttttgggctttccgcctttacaaactttacaaaagcaatacgagtggggtgttgataatttccaagcagcctcaggcgataaacctttccgcaaaaggactcaaaaaagattt

SEQ ID NO: 125652 - DNA, 193 bp, Arabidopsis thaliana columbia
  unsure (1)..(193): unsure at all n locations
taagcttggatcctctagagcggcctgcctgggggggtgaagccctnaacaaaacaaatttggatttatgaaggagatacaataagcgcgagaccacgattgacactaagtggctatgaaccaaagttcctctcttttaattttaacatgaggccaccccaaaacctctacaaaaacatggcaatataaaccc

SEQ ID NO: 125653 - DNA, 512 bp, Arabidopsis thaliana columbia
gacgtcgcatccacgcgtacgtaagcttggatcctctagagcggccgccctttgtgtttttgtttttttttttttttttttttttttttttttttttgtttgattttttttttgaggggcttaaaattttgaggccctaaacattttgccaaaacatagagggcaaaaaacattccctgatgggaataagggttacttgggacgtgcctatttaaggggaaaggggctcattacaatcttttttttaccttactttaactaaatcaaacctgccttggactttaaaggcttggtagaaaccctttaaacgaccccgggttttcatgaaactcaacgatgactttaaaaagctcctaaaaacctgaaaaagggattggtttcacaaggctttgaatccgctcaaaagctacttttactttttccttaaaacctgaaggctcactttttacctttcaactttttttttccagttgagcaacatggccatggaccctaattaccagtttcccgtt

SEQ ID NO: 125654 - DNA, 317 bp, Arabidopsis thaliana columbia
  unsure (1)..(317): unsure at all n locations
acgtaagcnanggacctctagagcggctgcnnccggggggggaggcccngaacgaaaagacgaacaccangagaaggggacaaaancgcacagcgcggagccccnccggaacgaagaagccaagaagaaaaaagcgcagagaccaccgggcaaggccgcaaccgaggcccaaagagaacgccngaaacttgtgttgggcagtaggaaaaaaagccgcagnncaaccanccaaaaccacacaccccaggccagcagaacgacccccgcccaccaaggagaccgaaaagacgacagcgagaaaccgggccgcgagaaag

SEQ ID NO: 125655 - DNA, 495 bp, Arabidopsis thaliana columbia
  unsure (1)..(495): unsure at all n locations
cacgcgtacgtaagcttggatcctctagagcggtcgccctttttttttttttttttaacgtaaccaaataacattggaggctttttaaaagaaagaaacgtttgaagaaaatcgaaacttgttcacccatatcacattttggctgctgcttctgccaaacgcttcttcttcttcttgacactagctgatttgtttctccctttacgacgggtntccccacggactaaccgatgtccttcctctgcttccactacttttgctttttccttcacctccaccgtgtggatgatcacacggattcatcgccactcctctaactttgggccttatccctaaccacctactctgtcctgctttatatagcttcttcgttccatgagacgggttcgacactgtgccaatcgtagcacgacatttggcattgatccacttggtgtcccctgacggaagctttatcaagccggacgcgtgggtcgacccgggaattccggacct

SEQ ID NO: 125656 - DNA, 399 bp, Arabidopsis thaliana columbia
  unsure (1)..(399): unsure at all n locations
nnnnnnnnnnnnnnnnnnnnnnnnnnnnnnnnnnnnnnnnnnnnnnnnnnnnnnnnnnnnnnnnnnnnnnnnnnnnnnnnnnnnnnnncctttttttttttttttttggcttataacttggaatttattaaccgagaaatatgatcactcggaaatcaagtgaaactggcaccagcgccgttgaacgcattttaaaaaatcactcttccttaaaaagggagagttcttaaggtggagggcccaaagggttcttccattggtgaaggtgatcactttaatagcaggtcccttttatgccacgggcacacactgtgaaggtctgtgagaactcttttggtgtgaggttatatttcgcgcacttaaacgggcaccggtttgagggacaacactgtggttttc

SEQ ID NO: 125657 - DNA, 490 bp, Arabidopsis thaliana columbia
gggaaagctggcacccctgcaggtaccggtcccgaattaattccctggtccaccagctcactagtccgcgggccgcctttttttttttttttcagttgccaagggccaaataaaaaaattttggttggcaaaaaaagaaaacctattatctttttacccttaaaaggtaattaagtttttcaatatatattcccaatcaaaaattatttttttgggttgtattagcctttttgaagcccgttttggaaatacctttcttggctatatttccggttccaccacccatttattaaaggatttaacctggttaaaccacagttccccattcctaagggaatcctttcccaaaccccatccccttttccgaaggtctaactgaacctggttggcctgaaaatatccgtccccaaatttttccaccacgtcgaccattccgggtcatggcccgtcgccctgcttctatttgcctaaatgtgatccaagcgggtta

SEQ ID NO: 125658 - DNA, 498 bp, Arabidopsis thaliana columbia
  unsure (1)..(498): unsure at all n locations
acgcccgcagggaccggnccggaattcccgggtttacccacgcgggcggaggcttgagtccaaacgctactgggacgaaccggaagagtctctttctttacccaaatggaaggacaggacccttgctttcggaaatccctattccacagaaaccatgagagttccctttgcctatcaagagtaaaaacatctgtctccgttgggggaggggtggnccaacaagagaggggggcggacaacaaaaagaacctcccatcttctagaagcccggtttgctaagaataagaccccttagctgggaggctgaaaggcaatacaaatccgagaggggtaaccagagacttaaaagacctggacctttaactgagggacctagcccttttgggaaccgaattctaaaacaaaaaaattttcggagaacacgggaagaggggccgacccagggaagacccccatttgggaacgggaaggggataaaaactcgccattcaaaagggg

SEQ ID NO: 125659 - DNA, 155 bp, Arabidopsis thaliana columbia
  unsure (1)..(155): unsure at all n locations
ccggnccggaatncccggtttgaccgaggcgtccgaagcacgagccccaccccnngccagagcgagaagtcggcgatgcgaganccgagccagagcggcccccaacacgaggccaggcgcatctcacagctctagctgagacagacaaagaagac

SEQ ID NO: 125660 - DNA, 515 bp, Arabidopsis thaliana columbia
  unsure (1)..(515): unsure at all n locations
tttattcgacttcactttttgggaaggctggtccccttgcaggtcccggtccggatttatttcccgggtcgacgagctcactagtcggcggccgcccttnnttttttttttttttttttttttttttttttttttttttttttttttttttttttttttttttttttttttttttngggggaaaaacgttaaacttttaacaatacctttaagcttttttcattcaattttatcccttccctttgatttttcaacccccctttttttatgtttcactttttaccccataaatcaaatttttgccgccgaagaaaaaaaagctttcttttatttttttttgggccgagtttgcatcgggaggaattttatttttttttttaacagtctttaatgggcaagttcccggggattttgggggcaaaacccttttttcccacaaaaaaaccctttttatggccgggggaacaagcttaattgatgaaattggggggaggcaacctaaaaactttttaatt

SEQ ID NO: 125661 - DNA, 494 bp, Arabidopsis thaliana columbia
cgactcactatatgggaagctgggacgcccggcaggaccgggcccgaattaattcccgggtcgacgaggttacttgtccgggggccgccttttttttttttttttttttagcggattaaaccccgcatttaatcctgggaaaaggaggctcttccccaaagaaaggggcttacctttaaccttggttttatagtgggaggaacccggtaccattccgtttttaaaaattcaaccaagggggcaaatgggatgggccttaattcattaaacagcttttaaatcggaccaaggataatggggatatcatcggccctattctaaggctccacccacagttaatatgattccgttgctgctgcagcgcatccatcgggcggatctgcgtatctccccaccatatcaacaacagctgggctggaaagaaactcgaaaatcccatcgctggcaacaacaaagaacaaatggttaggcgagagatgaaccatggacacttt

SEQ ID NO: 125662 - DNA, 439 bp, Arabidopsis thaliana columbia
  unsure (1)..(439): unsure at all n locations
cccagcgcccaacaccacccaacacgcgaaggcaccgcacacgagcaggaacccaaaaggggaaatatctttttcacccggggaagaagggaaanaggcgcaaacgaaaaaaaaccggccaggcccaccaaacacccgccagacaagaaagcgcacggaagaagaagcccccccccggacggaaagaccggcgagagcaacggacgaaccagcgcggcccccaaaacgcgggacacccaacagaacaggcaccgggccgacaaacgggagaaagaacagcgggcgccgcccacaagccaccacggcgaacggcggaaaaccaccccaaccaccagacgcggagccacaaagggccgaacgcagcaagcacccaagcggaccaaccccccagagaaaggcacaccacaagagaacgccgggaaaagccggagaaagagaa

SEQ ID NO: 125663 - DNA, 484 bp, Arabidopsis thaliana columbia
aactaacataagggaaagctgcaccccctgcaggacccggcccgaaataattcccgggtcaacaagctacactagtcggcggccgcccttttttttttttttttggccattgacattgtcattttttacaaaacacgattttgtttactcagggcgcaacaacccttaaagaccaattgcaaaaaaaacaaggccaatgttgtacgattcagggagattattttcgcttgagatgataaaaacttggggggaactggatggctgaaatctattgggaaggtgaaaggaacaccccattaaccaaactggaaattttgctgatccactccagtccttatcactagaaaaaagttaccgaggatggcaagaatccccagtgtcccattcttgacccaaaccaattttaaatcctccaacatcttcaaaagttgcctatacaaaaaatgcatataaacaggtccggcgaccatatgggaaccacctg

SEQ ID NO: 125664 - DNA, 483 bp, Arabidopsis thaliana columbia
  unsure (1)..(483): unsure at all n locations
ggaaagctgggaacgcttgcaggtcccggcccgaattaaattccggggtcaacaagctacttagccgggggccgcccttntttttttttttgtttttttttttttttctttggagggnntttttttttggacttgggaatttttttttattttccccggatgattttttactttacatatataatatatgggggcttgaagaaattttgttccaagcggggacattccaaaattgggtaaattttgaaaccagaggatcaaaacactactggttttaaaacaaataaagaagtgttttggttgttaaaaaaggctttttattaaaaagcgtaaactatttttccgttactggcaatgtcgatttcaaattcaaagtcaaagtcatccatgtcatcgtcaaaatcaagattgtcagtcatgaaatcgtttaggcaacggtttcaaacagcgggaattgtggcttcaaagatgatttgcatgatt

SEQ ID NO: 125665 - DNA, 430 bp, Arabidopsis thaliana columbia
  unsure (1)..(430): unsure at all n locations
cggaannccgggttcgaccgagggggaaagccgggnaacaggcgcaaanaaagggaaaaacagagggggaggagngccaaaccaaaccggccccaaagacggacccagggcgaacaanaaccagcacgccaacgaagcnggggcacggcanggaacgggcaaaagaccggctccctccaaagggggggggggacaagaancaagacaacgaccnnaaagagcgagccaacaagacggcaaggggaggcaaagaaacagaagagggagcggaaccgccagaagaagaagacaccggacaggacggaaggaagacaaacgaacagggggcggggacaacacggaagcggcagcggccaaggaagagacacggaaaaaccgcaaacgaccaaggccaaacacaggaaggaggggcagccagaaaggcggaccc

SEQ ID NO: 125666 - DNA, 498 bp, Arabidopsis thaliana columbia
  unsure (1)..(498): unsure at all n locations
cgcccgcggnaccggnccggaaacccgggttgacccggcgggcagaggccacagagagcgagncacgcgccgagnggggggcacnaggacccaacaaagggggcggcgccgccggcgcgagcgcgcacagagagcgccnacagaccgagagggcaaggcgcgggcccggcggacagagcggcagcagaaaaggcttccttgggaagtcgcccccgaaccccgcgaaggagggacacccaaacaagcggcggggaccagaagggggggaggcgcacccgggacgcccggcccagaggaagaggccaggaaagcacgccgcagcgcgagacaccgcccaagagcaacccggcggngggggacgaggggagacggcccccggcggccgcacgcggcccgcccgaggggccggcgcgagcgccaaacggagagaggcggcggccgagaacaacacacagaacagacaccccacaacacaaacagcgcgcgcgaacgaggaag

SEQ ID NO: 125667 - DNA, 376 bp, Arabidopsis thaliana columbia
  unsure (1)..(376): unsure at all n locations
gccgaggacggccgganaanccctggccgaggaggaaagcgcgaaaccgccnnnccccannagggggaagaaacaacgcaagcaagacgcaaccccaaacaaacaacccaccaaaacccccgcaagacccacagggagcaaaggcaaacagaggcccccttcacggaggaggaaaccaaaaaacgacccaacaaacaaaacccacccccacgcgaggggggagcacccccacccagcacaccacaccccnggaaccccgacacaaaagccggccccaaacccccaaccacggcgaacgggcacccaccagcgaccaccaacaccgccaccaaaaccccgcaaaaaccaaccacgcgcgccgcagcgcaacgcaaac

SEQ ID NO: 125668 - DNA, 375 bp, Arabidopsis thaliana columbia
cgcctgcaggtaccggtccggaattaattccttggtcgacgagctcactagtcggcggccgccctttttttttttttttttttttttttttttttttttttaaaaaacttcaatctttagttaaaatattaaggccaaacatcaaatgtcatacaaatcatagtttttatacatatgatttcctcgcaaattaatcgttttttccggttcaacatgaaccgttgagtaagcaaaacaaacctagtcctcaaacccaagaaagaaaacccctcaacacacccacaaaaagtagtagtaagaaagcaaccattcttctgaaaaaccggttatagattagacggttgtagtagatttccggacagtgtaacggtaagc

SEQ ID NO: 125669 - DNA, 495 bp, Arabidopsis thaliana columbia
  unsure (1)..(495): unsure at all n locations
nnnnnnnnnnnnnnnnnnnnnnnnnnnnnnnnnnnnnnnnnnnnnnnnnnnnnnnnnnnnnnnnnnnnnnnnnnnnnnnnnnccttttttttttttttttttttggaaacttgatcgattatggaattgaaccaagtattacgaagtcttttgatgtatcaaaatcgggttagattagaattgttgttacaaacagtcaaacactgtacaagttttgtctaaagctagaacaaaaagaatcgagcattagaacgggacagtataaggtaaagaataaatcccaacttcagacaaaaattgagctctaggccaagatgaatctcccggtctcatcatcgtgtcatcatcaaccttgactgctgctttgggcttaagcacctcttgcgtcttgttcccaaatagccaataatcaccattgtcatttgaagatgcatcagcaatacacatggaaggaggagtccaaccatcanacaatgcattgtattgatcttcttt

SEQ ID NO: 125670 - DNA, 541 bp, Arabidopsis thaliana columbia
  unsure (1)..(541): unsure at all n locations
aaaaaaaaanttgcacgagaagaaaaaaggctggggttacgacccaaattggaagggggcccccccagggccgggccgaaaaccggttggccaggcggcagccgcgccgaacccccaaaacaccacgggacngcaatggaaccgagagggagcgcccccaaccaacaaaaaccgcccaaaccggaaaaccccgagccggggcaacggcggccgaaaaaaaggaggcccagggaaccgctttctcccgggggggggggcgccggagcaaaaccccgggggacaaaacgaacgaggccggaaaccccccccaagaagagaccccgcaaagcggccccgcggagcccgagaacccagcgcggccccagaccccccccccggcgcgaaagcccccaccgcgcgcaccgaaagcagagcggcgcgcccacgggccacggaaccgcggccgccgacggagcccagcggccacaaccccggccggaggggaaactaggaagagcccgccaagggaggcgcgccccgacaaccagcccgagggggagag

SEQ ID NO: 125671 - DNA, 444 bp, Arabidopsis thaliana columbia
  unsure (1)..(444): unsure at all n locations
gggaggtgggcccctcgccggcccgcccggttatttcctggcgagccagcttctcttccgggggcgccccttnntttttttttttgtttttntttttttttnttttttttttttttttnnntnttttttttnnnaaaaaccacttcttcacccataagtggcttctcttcttcttttttttctacatcttttggggtttttttatgggggggctcttcctctttttctttcccccccaacttcacattctggtggtcgcctttctctttgagattgatttcccgtggccaattataattttccccgtggggttttaaccccctttccattatggggggcttttttgccggtctggggctaccggggctaaaaccccccggcgttgttctttgtttgcccccatttcgttttatcccccattttttttttccgctagaccaaaaa

SEQ ID NO: 125672 - DNA, 486 bp, Arabidopsis thaliana columbia
  unsure (1)..(486): unsure at all n locations
ggccgggcccgaaaaacggcttgcccgagggggaaagacccnccccacacacnngaanccanggaggaggaaaacaacaccccgacgagggcaacaccccagcaaaaaaaacaacccacaaggagcgcagcaaaccaacgaaggcacccccccgcacgaggcaccggccaaaacaccactccctcnatacagccgcgagggacncgcgcagccagccccaacacgcaaaaaacaaggcaccaaaaccccccgggcggagggaacacacccccacgacacccaccccacccaccaaaaaccgaaaccagaacccaaacgcggcccacacgaaaacggacaaagaaccccggccaaaacccccgacacaccagcacgcaacagaccgcgaaacaaccaaaagaccacaaggcaacaagcagaccaagccgcagcgcccgaaagccaccccccccggcccaacagaaaaccacgcccccccgccaacca

SEQ ID NO: 125673 - DNA, 498 bp, Arabidopsis thaliana columbia
  unsure (1)..(498): unsure at all n locations
nnnnnnnnnnnnnnnnnnnnnnnnnnnnnnnnnnnnnnnnnnnnnnnnnnnnnnnnnnnnnnnnnnnnnnnnnnnnnnnnnnnnnnnnnnnnnnnncctttntttttttttttttttttttttttttttttttttttttttttttttttttttttttggccccctcttttccctttaaaaaaaacttttttttgccataaagcttcaagtcctggttttttcaatggttttggttccaatggggtccttgatggggaaataaattttagagggccttcctttttttttttttttaaaaaaaattttttattgggggttgaattccttaattattaacccaatttgccccatggggggggcattaaaaaagcccccttagggaattttttaccttccaaaaagggggcttattccacccatttttgtttccccaatgaaaaaacttctggtttttttttcccaggaatcaaatttgcgcaaggggtgcgttcatgaacc

SEQ ID NO: 125674 - DNA, 475 bp, Arabidopsis thaliana columbia
  unsure (1)..(475): unsure at all n locations
gaagcttgtaccccttcaagtacccgtcccgaattatatttcctggtccacacagcttacattattcgcgggcgccccttnntttttttttttttttttttttttttttttttttttttttttttttttttttttttttttttttttttttnnaancacccaattaaacctaaaattttaaaaggggggtccggtttaaaggtcttttttttttgggtttaccaacccgtttaaaattttcccacaaattttaaacttttttgttttttaccctttttacgggatttttcaacaaaattccccaaatatttggcaaaaatctttttttttattataatcccctccaatgatctttttttttacaaatttcctttattttatcaattggcaatttgcacccgattttctcctgtatctgtggtttatcaacccccataaatggatttttttaaagctttttctccagttttaaagg

SEQ ID NO: 125675 - DNA, 491 bp, Arabidopsis thaliana columbia
  unsure (1)..(491): unsure at all n locations
nnnnnnnnnnnnnnnnnnnnnnnnnnnnnnnnnnnnnnnnnnnnnnnnnnnnnnnnnnnnnnnnnnnnnnnnnnnnnnnnnnnnnnnnncctttttttttttttttttggttttaaatgcaaataatatttatgtttatccttgctttacctggaaccaattaacagacccaaaatctttataacataatcaacaaagataaattacatgaacattcctaatatttcctttatcattactcaatggatcccaagcgcttgcatttgtctaatcatcaacatagacgaatcatacatttgcttgcggctaacgtcaccttcctttcctccttcctcttcgaagaacctctcgcttccatccaatatactcaccacttggctaatgctaggccttaacttcggatcggntctcgtgcaactaaccctaaccgtatagccttgccaattctcgattctcgtatcatcatccaaatgaatatcctgcatctcctc

SEQ ID NO: 125676 - DNA, 416 bp, Arabidopsis thaliana columbia
  unsure (1)..(416): unsure at all n locations
gaacccggtcgccgggcggacggccaaccccccaaaagncccgaccccacgggcaaccgaagacngacaagaaaacccacaaaacaaaaaacaaccacccttagccacacgcccccccaccgcacaaggaccgcagcaacacaccaaaccaaccctccctcnctgagaggcgggaacccggacccacagaaccccaagccagaaacgaacacaaccggggccgagaggggccccccaaaagcacagaacacaccgaacacacgccccagccgaaaacccccccccaccccgacaaagacgagcaccacccaacgcaccgaggccccccaggggccaggggccacggcccccccccgcccggcccccacgcacaccccgcccaaccgcacacccgagcgccaaaacccaggggccca

SEQ ID NO: 125677 - DNA, 446 bp, Arabidopsis thaliana columbia
  unsure (1)..(446): unsure at all n locations
gcaggaccgggccggaattaccgggtttgaaccaagcggtcgagggacccctgggctgaaccctaacgctgggcaggggcctagagctgaccaggcggtccatcttcaaatggttaagggacggctccagattgggccaaaccagattgagggtttggaccaggacccccaggttcaagccggaagttgttcctatgggggtggcggcgganaacctaaacaggacaaggaccctgtgcttaaccctgaaaagaagttagagtgccttgggggaaagcttccatttgaataattgagccaaaactggaatattgttctggaagagctaacccgcttaaaagagataattgactaaaagagtttttcatcgccgtaaaaccaggggcaaaacagaattgggttgatgcatngggggcctggatatcttttttacccatgataatgga

SEQ ID NO: 125678 - DNA, 509 bp, Arabidopsis thaliana columbia
  unsure (1)..(509): unsure at all n locations
ctctnnnnnnnnnnnnnnnnnnnnnnnnnnnnnnnnnnnnnnnnnnnnnnnnnnnnnnnnnnnnnnnnnnnnnnnnnnnnnnnnnnnnnnnnnncctttttttttttttttttttttttttttttttttttttttcttttttttttttttttctttttatctttttttattcatttttttctttacccttttttttaaaaaaaagccacaaaatttttatctcactttttaaaacggggacaaaaactttttccattccccgaaaaacacgggggaaaagggaattatttttttaaaaccaaactttttttcgaaaaagaaaatgcttaaaaaataaatctcttttccccccccgaattaactttttaaaagaggggataaaacccctcgagagatttctctggccctttttttttcccctcccacaaattcaaatttttaaaattcggcttcctccttttgaccgccctccaaaaaattatccttagcttaaaccttttaaacagact

SEQ ID NO: 125679 - DNA, 505 bp, Arabidopsis thaliana columbia
cccccccacaaggacccgggcccggaaaaaaaaccccttgccgaggaggagccacaagaccagcggccccacccgcccagaacaggggcggagaagagaaccgacaccagcggcacaacacacaaagaggagagaaggggagaacgcgaaaccccgaggaaaagggggacacccgacgcgcgaaacgcccacacgcaaaaaaaagaccgacgaaacgacacttttctaaaggggggggggcggggggggcccaaaacggggcacccccccaaggaggaaagagcgagaaaaaccgccaacgggccgagcaccaccaagaaggacaccgcaaacaaacacgggaaagccccaccgcaaagccccacaccggagcgcgcgcgacgcaacgcaccgccgacaacacaagcggaaaccaagagccccaggcaacaccaacagccgcaagcaccacaaaagcaacccagcacacacacgcgccgagggccagaaacccacacaacggacg

SEQ ID NO: 125680 - DNA, 513 bp, Arabidopsis thaliana columbia
  unsure (1)..(513): unsure at all n locations
caggtcacannnnnnnnnnnnnnnnnnnnnnnnnnnnnnnnnnnnnnnnnnnnnnnnnnnnnnnnnnnnnnnnnnnnnnnnnnnnnnnnnnnnnnnncctttttttttttttttttaagaaaaccatcctaaatactttacatgaaaataaggattaacaaacacatcaaaaaaccatccatgacttcagatcaattggggactagactaaacacagctttgttatattataagcaatagtctatagatttacatgacattaatcatggactcatagtaatatcagaccaatgatctctatcacaaatcctgaaactcttcaaaccattcgtaccttaagtgaacatgaaccatttagcttttgatgatttagtttctccatatagttagttacaggcttggagatctttaggtaggttttgatgcttgggacaaagcttgaaaaacactctgttgggtcatatnctcaacaatcacaactttatcttgagacttcgatcccgaaccgagaga

SEQ ID NO: 125681 - DNA, 502 bp, Arabidopsis thaliana columbia
  unsure (1)..(502): unsure at all n locations
nnnnnnnnnnnnnnnnnnnnnnnnnnnnnnnnnnnnnnnnnnnnnnnnnnnnnnnnnnnnnnnnnnnnnnnnnnnnnnnnnnnnnnnnnnnnnnnnccttttttttttttttttttaaaaataagcaaatcgttccataataaaacaaagaaatgtggtgatcgcattatatatacacagagtttaaccaaccaaaacattacaaaaacattaaagacaaaatactgttttataaaaaacaatcttcaaaacatagatatgctcatgcatagacagagggaacctcaaaaaaaaaattatttagcgtagtagccgccgattcacagccggaggtggcggtggctgagcttgaaccggagtagcttgacgaggtgcacctncaccttccccaccattactctcccaaggcttaacagtaaacaccacaattaaaacccacataatgagcaatagcanaatggcaaagcaagtccactttcgtgtgttcttctgataaaaccgt

SEQ ID NO: 125682 - DNA, 420 bp, Arabidopsis thaliana columbia
  unsure (1)..(420): unsure at all n locations
cggaattcccggttcgaccgaggcgacaaaccacgcgcccgcgaacgcgagggcaaaaagagaggnagcagcagcagaacccacagcagcggacccaccgacaggaccccacggggaggacaccgcaaangcaagccncgccccagcagcagagacggaggcaacaccacctttctctttaaggggggggacccccncagagacgccaaccccagcaacagcagcagcngagacagcagggacagcaacacggaacccaacagaagccaccaaaaggacggccccaggaagccggcgaccgagcacagaaaacgacgaggcaccagaaccaacagcaacaaacgcccggagaaaagcgccccacccacgggaggaaacncgggccaaacaccnacacccggggcaaagcagaaaaccggc

SEQ ID NO: 125683 - DNA, 516 bp, Arabidopsis thaliana columbia
  unsure (1)..(516): unsure at all n locations
nnnnnnnnnnnnnnnnnnnnnnnnnnnnnnnnnnnnnnnnnnnnnnnnnnnnnnnnnnnnnnnnnnnnnnnnnnnnnnnnnnnnnnnnnnggggccgcctttttttttttttttttgaataaaattggtttggttggaattattacccacctaaggtggattttgccaaaccatggggtaatggaaagaaaagattcttaatttggcccttaccaaacccaattttaaaatccaaattcaaattcaaaccaggcttcacccaaccgggggaaaacctttgaggggataaacgtcggtttttttcattactggaccggggcaagaacttttagctgggatccgagccttttttccgcaaccttctttgcctgggtcctaagcttgtggagtggcttcttacgctcatacatcacttggggatctttcctttctctttgtctcaagttctttaatggtatcataatggttccagccaacctcagaagataaacgtcccaataagcagtacttgtgacc

SEQ ID NO: 125684 - DNA, 249 bp, Arabidopsis thaliana columbia
ggggggggaggaattttttagttttaaaaggaggtgacttttgggggagggcgggcccccgcaggggcccgggccggatttatatcctctgtgcaccggggtcactattacggaggcgccccacctattttttttctggattcaagagagagactatatgtgtccgaaggaacagagggccgcaggtatatagcgcgaaccggttcaaacgaagatcgtggatgattacacgaggattggtggtccccc

SEQ ID NO: 125685 - DNA, 496 bp, Arabidopsis thaliana columbia
  unsure (1)..(496): unsure at all n locations
agctctactacgactcactatagggaaagctggtacgcctgcaggtcccggcccgaattcccgggtcccccacccttccgccaatggggaccttcttggggaacccaacttttccggatttatgggtcgcggcctctttttgggggtcctaataatcgtgggaaaattggctaatgtggcaaccttaaccggggataatccattcgcgggaacttctgttttttctctttccttgaaattctaaacttggccatttccggggctgcctccggctcttctgctatcgacgccatcagatctacttcccctggggatgatctctacaccaccagggattggatcaaatccgttcagttttactcctccatcttccaggatctgatcgccgacggttatctatcgcctgaatcgaagacgctttgtgtagagacggcgattggacaagaggttcactcgctcagagagattgnggtgaagaactccgtcgggatctcta

SEQ ID NO: 125686 - DNA, 651 bp, Arabidopsis thaliana columbia
ccggggggggggggggggcttcagggtgaccgggccacggccccttggaaagtcgggcccccccggcacggccccggggcgggagaggcccccccgggccgcagaggcacccgaagcaggcgcaggacgccagaccgcagggcaggaaaagggacggtcggccccaagcgccaccgcgcgcgccgcagggagggccccccaagaagagaagcagaggcatacacgacgaagaagggagaacaacacgaaagacggacaggaagaggcgcccccctccgcaacggcggaggacagagaagcacaacgggcccgaacgagacccaatcgcacaggacgcaagagactaagcccccgcccccaacaacactcgtaccgagaccacgagcagaccaggaggagaaggcaacgccgcaaacaaggacccgcgaaaccaccgtccagagaagagcaagcgatgccagacgtagacaaggagagcaccgcgcacccctaaacacccccaccgcagataggcgacacgcggccataacaacgacacacgcacagtaaggcgaacccgctcgacgtacgagagccatcagagaccggacgagcgcgcgaaggggagccccgcacaggcaaagcgcaccccgacgcgcacccgacgacaag

SEQ ID NO: 125687 - DNA, 512 bp, Arabidopsis thaliana columbia
  unsure (1)..(512): unsure at all n locations
ggtctatacgactcactatagggaaagctggtacgcctgcaggtaccggtccggaatttccgggttcgaccacgcgtccgcccacgcgtccggtggtcatcagagctcaccgtaggggggcggggttccgtcttcaaatcccacactcaccaccgcaaaggtccggctaagttccgtagcctcgatttcggcgagagaaatggttacctcaagggcgtcgtgacggtttcatccacgatcctggtcgtggtgctcctcttgctcgtgtcactttccgtcatcctttccgtttcaagaaacaaaaggagctcttcgtcgccgccgaaggtatgtacaccggtcagttcttgtactgcggtaagaaagctactctcgtcgttggaaatgttctccctcttagatctattcctgaaggagctgttgtctgcaacgtcgagcatcacgtcngtgatcgtggtgtcctcgctagagcttctggtgattacgccattgttatcgctcacaaccctgac

SEQ ID NO: 125688 - DNA, 328 bp, Arabidopsis thaliana columbia
  unsure (1)..(328): unsure at all n locations
tctttttttttttttttggtttaccaaaccgatggattttgacgcctccttctattccaaggagctgaattgatcccttttggaaggtggtaccattgttcataaaaaatgggtttgaaactgataaggtaaatttttcgcctaaaagtacggatcctgtttttttttnggatggaggcggcatatcagcaaatccaacgaggggaagtgggctagatactggcatggcatgatgatgtgacggggctggtttcgacgctagtggcagatgctgaaaccggcgtggtgcaggcgttgctggggcactatgatggtttagagcactgct

SEQ ID NO: 125689 - DNA, 507 bp, Arabidopsis thaliana columbia
ctttacgtcgcatgcacgccttccttagcttggattcttttgagcgggccgccctttttttttttttttttttttttttttttttttttttttttttttttttttttttttttttttttttttttttttttttttttttttttttttgggcccaaaacccggaagtttccaaaaaaaaaccaaatttttaacctcttttgggagggtttttttttttccaaatttcatggaaattggatttcctttcaaaaggaaaaaatccccttccttcaaccattgaataatcccaatttttttattttttttgggggtgacaaggcttaaaccccggggaagggggaaaactgtcttttggggcttttggttttaacccaaaggggggggttcagggggtaaccaaaaaacccaaaatcttccttacccaccccctttgggccgtttttcccattttcccctttttttttttttgggatttttaaaccttttaaccccttttttttgggcttt

SEQ ID NO: 125690 - DNA, 478 bp, Arabidopsis thaliana columbia
tggaccccttccgtagcttggattcttttaaaggggcggccctatgtttttttgaatttgttgtgtcgacccctttggtcaaaaccaaatggaattttttatttactttacttttatgcttaactaaaaaaaaaaaatggtccgtcacatcccttggtccagggatttaccaggaaaaagggccccctttttttgttaaaatggttcccagcccaatcttttacaacccccacgaacgtggtttcttaccttttagggacttctaccccctaagagggtactttttatgcggaaaggagactttttccctatcaaacccgggaaaaaagtccgggattacactatgagatgggcctgggacccaaacaaaggctgaaattttttttgatgaaaaaaaaccgactattgttgaagactgaaacctcgttgtccctaaagccaatttacgcttggtatggcccacgatcatattttgcaa

SEQ ID NO: 125691 - DNA, 504 bp, Arabidopsis thaliana columbia
  unsure (1)..(504): unsure at all n locations
agcngggacccacnaaagcggccgtccaacggggcggggaaaccaccaaccagaagagggcgccagaaaagagggggggaggcccaagcaaccgagcacaagagaagaaaccgccacacccagccgaataccaagggacacggggcccaggngaccacaggacacggaaccgagagccgcggaaaacagcacagggggaggcacattttttttatgggagaggggagacaaaaaaaggcgagagggaaaaaaacagagaagaaccaggggggcggaggagcaggaagcgaagccaaaaaaaacggggacagcaaaggccaacaggcggcggcagaggaacagcgccgatcagacgaagaaggagaacgcgggaacacgagaaaagacaaacccagcgcaagaaagccgccaaacgaaagccacagggaaaaagcaacagcgagacgcggaagaaaagaaggacgagcaaacacaacgcagagaggggacgacaaacgaaaagag

SEQ ID NO: 125692 - DNA, 504 bp, Arabidopsis thaliana columbia
ctatgacgtggcatgcacgccgtacgtagcttggattctattgaaggggcggccctaggggtcggttttaaccttttaaaagagcacttaaaggatccagggaacttttttttaggggacctttcaaggttggcccgacgacaaattctgccctaaactttaaaagctctggtttggttttcgcctaaagccggccgttttccgtgggctgttttttatgaggacgctaataaactattgtaaaaagcctttgcctttggggagggttaggtagatgcttggttggaggaggacaactctagactgagggggattttggccttgggatcattggctgttttgaaggctatggctgcattgttgggaggctttgaagggcgggaggtagccccggcctgctctgtgaaaaaaccccccatctttcagggcttccactttgaagggccggagacactccgggggaacatatagtgcttcagagaaaagaccagaaaggggccgccc

SEQ ID NO: 125693 - DNA, 499 bp, Arabidopsis thaliana columbia
actttgacgtcgcatgcacgcgtacgtagcttggatcctcttagaggggccgccttttttttttttttttagaaggtcaaaactttggttttattaaaaggttggaaaggttgacccaaaccagaacccaaaattggggttcaaattggcgttctattgtctgtggacgcacttaaatccgaccagaaacaaactagagagaaggaaatttcttatttttgaggcagtttaagcagcaccgggtttagcaggagcagaagagagtctagacctctttttggccaaactttcactacggcgatcacgctgctcctttagtctggaggcaggaagcttttggtaatcagctgcatcagagttagccttggcgattctcttcttcttgtcagcaattctagctctcttcctctggagggtcaatggagtcacaagcctctggatcttaggagccttgctaaccttcttgcccttcttgtttgtgaaggtccggcggtaagtg

SEQ ID NO: 125694 - DNA, 461 bp, Arabidopsis thaliana columbia
  unsure (1)..(461): unsure at all n locations
aaggggttttcctgggggggaagaaggccccaaaaaaaaanaanaggaagggaaagggggggggggaaccggaccaagagaaaaaaaccggcgacacgcncaaaccgagcccgacaagnacccgtggcaccgacaaaaggcgcccggcacagagaggcaaaagcaaaacggaaaaaaaaaataataaatcgcagattgacgacaaccccaccccaggaaggcggaaaaaagaccccccaccccacgggggggggggggccaccccagcgccacgaaccgggcacgaagaggcccgcacaaaaaaagcggcgccggaaaaggagagaagagaacaaacccacgcccgcaaaagaaaaaaacccccaacggaaaagagaacaagggcccgacaaaaaacgcccaaaccaaccaccagcacgcacaaccgcgccccccgacagagagaaaaaaaaagcagggca

SEQ ID NO: 125695 - DNA, 502 bp, Arabidopsis thaliana columbia
  unsure (1)..(502): unsure at all n locations
nnnnnnnnnnnnnnnnnnnnnnnnnnnnnnnnnnnnnnnnnnnnnnnnnnnnnnnnnnnnnnnnnnnnnnnnnaccttngcgtncgntcctcgatttcgatgacgatagagccgacgcaatcgccttttttcggagccggaggttgacccaaaaaaaggctttttttttttcattgaaaccggccgacggtggatatctgtataagcgacagcgtccccgatggggaaaattttttgcggttggaccattccttcgagggggtcaggagaagaaaaaaaaatactttgccccaattaacatcgctttttgactttcttatgaaaagaagtataccccaaactatggttgtcccgtgaacctgcaggtggactgaggatattattcttttataacgaaacactgacttgggcgtggggatctccattagatcattcctcggaataggctgctcccagttcttcttgatcccattaagaagccctttcccgataactgctacaa

SEQ ID NO: 125696 - DNA, 495 bp, Arabidopsis thaliana columbia
  unsure (1)..(495): unsure at all n locations
caaggaccgggcccggaaaccccgggccaaccaggggggcggaaagccgaaaaacaaaaaaggaaaccccccaggggaggcaaccaaggcaaaaagccggccgaaggaacagagcagcagcaaccgcgcagagcaaacggagggcagaacacgggcaacagggaacgacgaagcaagaaaacggccacagcccgaggcttcttctggaggggggggaaacaccaaaggggaaaaaccccgaagaaacccaacccgcggggggggggggggggaccaccaagaagccaaacccccnaaagccacaaaaagagaacggaggaggaacagaccacaaaagggcaaaccaagacgagcccacaaaacgcccggaaagacaccccaaccgcacaacacaggcgaaaagcaaaggccagcaacaccacgaacccgagcagaaggcccacaaaaaccacggaaggcaacaacaagaaaaaacaaggaacgacagaagcaaag

SEQ ID NO: 125697 - DNA, 466 bp, Arabidopsis thaliana columbia
gccgggcccgaattccggggtttacccggcggcggaagccctggcctaacacgaggtcctttttcaaggggcggaggttccaggacccctttacaccaaggcctctttttccaggagcggaggttccagaaccctttccacaaaagcctccttttccaaaagctgaccttccaggaccacttttttataaggggggggaccaaccgaagccacaaccagcccctgataaggcccccccacacttaaggccgtgttcaactcgagttccttctcagagaatcacacctcagaggggtccttctccaagaccaagtacacccaaaggtgctccccacaaagccatcttttaaaagccgctttctccaagagcagagccccaacctgggacactcagagacctcctctccaagagctcgttttttaagaccagcccccccaaagggaggctggacaccccccacgctaa

SEQ ID NO: 125698 - DNA, 461 bp, Arabidopsis thaliana columbia
  unsure (1)..(461): unsure at all n locations
ggggggaagaagccccnaaacacacagaccccgccangaggggggagcccagggccagcccgggggcaggggccccccaaagcgaggccggaacacctagcaagaaagagagaaccacccgaggacacacgaagacaagggaaaaaaaaaaaanttttcaggcaagatagggccaccccacaggggcggagccggggaaaaaaacaccccccccaaaggaggggggggggggggccccccccccaaaaggaagaaaagccccccccgagaacgagaagggcagcggggggggggaaaaacgacgaacaagcaaagagggaagcgaggggcagcaagagaaacgacggaacaagacacgcaaacgagcgggaacaaacagggaggcaaaaaacagagaaaccacagcgcgcagcagcagcagaaaggaaaaagaccgcagagcacgagggacaggggagcag

SEQ ID NO: 125699 - DNA, 500 bp, Arabidopsis thaliana columbia
  unsure (1)..(500): unsure at all n locations
agcaccgccaaagacccgcgttaccagggggcggaagcaagaaaaacacnagccgcaaggaagggaaaaaaaccgaagggaaaccggaaagggaacgcggccagggcggaggaggaaaaaaagccaccacacgcaaagcgggcgccagaaaggaaaccaaacgccggccgagacattcttagaggagaaggaggcacagaaacccgccccaggagccaaaaaagaaccaccggggcgggcccggggggagaccccancaagggaaacgacccagggggaaccacggacacggaaccacgaggcaagcggccacaccgagagacaggggcccacggcgcaagacgacgaagccaggacggcggaggaacgaccgacagaaacccccaacaacagacagaagcggggcgcgagaagcaaaaaaacaccagaccgacaccagcccagaaccgagaccacagcaaaccaccaccaaaaccgaagaccgacccacacgcaaggaa

SEQ ID NO: 125700 - DNA, 495 bp, Arabidopsis thaliana columbia
ttgacgtcgcatgcacgcgtacgtaagcttggatcctctagagcggccgccctttgtgtgttatttttattattgtacttttgttaaaactttaatttttggtgatggggaagcacttaaactgaattgtaacaaattgaaacctctacagcaacgtagtttttgtaatttccttcaacaatgacaatgatagaactcgggtgatattatttctctatctagccgatccacggaagttgtgaagatctcaataacctcaacaagatcccaaaaaaaaagagcttacttcgcacaaatacgatgattccgaacatgacagatgacataacaaaggggacactacaaaaaatggcattaaagctcatgtaagattcaaaagcacatatgagagaaaagtctgggcatgtaatgtccactctcttattcacttattactggcccatttggccaaagtatctgccggcaatggtgatgagcatatttgccatggggata

SEQ ID NO: 125701 - DNA, 526 bp, Arabidopsis thaliana columbia
  unsure (1)..(526): unsure at all n locations
nnnnnnnnnnnnnnnnnnnnnnnnnnnnnnnnnnnnnnnnnnnnnnnnnnnnnnnnnnnnnnnnnnncgccttttttttttttttttgcacttgcagatagcagcttcttattcgggataaatacatgatgaaaaatttgattatatatgtctatggataaggacaatcatttttttctattgtagattggcgttagaggggaaaatttattcaagagaggaaactgtcatcttttggactgaataatgacttagcctaacccctcctattgatgataagatcctcaaaacacctccaagcactatacatccccaattcgtccaccacgacaggctaaacctgtttggttaataataagcagccacttatgcacggaaaaaatacgaggttgaaccaaccgcaattcctccaaagaaggcgagaaggcccccaaagaacggtatcattatcccaatgaacatcgttaaagcaacataaacatttcgtacaatgaaacgaagaactgtagagggtttgaaattcagt

SEQ ID NO: 125702 - DNA, 504 bp, Arabidopsis thaliana columbia
  unsure (1)..(504): unsure at all n locations
gtgacctatagnagagcttgacgtcgcatgcacgcgtacgtaagcttggatcctctagagcgggccgcctttttttttttttttaggtgaaacataacaggaatctctggaaaagcaaaatttgcttcctttaaaagaggttcctggactcctcatcccaagggtccctggtcctagaaattatttaccattttgggtaggttttttttttattaaaaaatcccttaatcattatttggaattgctgggggattaatttaaaaaggttaaaggttgaaccaaagaaaaaggaagctattaactaaggcaggcattaagggttcaaatctttcaaaaagggggcctatgcaactctaatcttcttttggctcaccatcagggaattttcaacctccatgatatcatcatcttaactctagacgtgctctgttcctttcttatgatgactggcctcggtctcagagagtcttctcttcttagaagcaggctcggatcctgaggaac

SEQ ID NO: 125703 - DNA, 503 bp, Arabidopsis thaliana columbia
  unsure (1)..(503): unsure at all n locations
ttgacgtcgcatgcacgcgtacgtaagcttggatcctctagagcggccgaccttngcgtncganacaaacagagagcgagtcacgcgccgagttttcttgcatgatatttcttataaaaaaaaaaactttacgaggatgggattctttgtgtcccactcaaaattacactacatgagattatgagggaaagcaaaagcaaaaatagaatttttgcctaagttcaaaacataacacttaagtttttcatttgcactttttgattaccaaatatttgaaccgctgccctgtgtccgcgataacaaatgtgactggggacattgcaaagccttttttttttaagcctttcgcaataataatgggataatgatgagatccccagccggtgggaggagtgactcatctcagttttggcatttgccatctttgtttttgtctaggcctttggtttgagcggcttgacaacctcccaagtgaagtcggggtcatcacccccgaaatggcc

SEQ ID NO: 125704 - DNA, 424 bp, Arabidopsis thaliana columbia
  unsure (1)..(424): unsure at all n locations
gcccccggggggggggaaacccccaaaaaaaaagcgcccgaggcagggggagnagcgaccgagcggaaaccagccccgcccccggcaagagcggggaccaagaagagaagcccgagacggggaccggacagacacgccaaaggggaaaaacctaaaaaggagaaggcaacaaagaacaagaaaggcaccaaacagccgcgccgaagggggaagcacgcagcacgacgccaaagcaaacagaggagaacaacacgaacgaccgaaagacacgcccaacacaaagcaaaaccgcagcgaggcccccgggaggagaaggaacccacgccgagagcgcgcaaaccccccccgcacacgagaagccacaccaacccccgagagagacagggacgcccgccaccacaaccgaggaagacgccaaaccaaa

SEQ ID NO: 125705 - DNA, 323 bp, Arabidopsis thaliana columbia
tcagaagaatcacacacatctgtcatgccttctcccactgtcgtagccatggagacagcgttaattaatgctcaaatgacctactgattcaagcgtcttgtgctgctaaagacccacccctcctggtgacccaggacctctgaggctgttgctagagatcatgaccaatgaccgtttgttccatataaccgtatctagaggggggggatacgacattgttcctcttttcgctgactggtgtaccaataactctctccttaggattgctgattggactaccttttgctttggagatactgttgtagcactgtacctagggaatg

SEQ ID NO: 125706 - DNA, 543 bp, Arabidopsis thaliana columbia
atacgacttattattgggaaggtgggccggctggagggaccgggccgggatttccggggcggaccaaggggtcggcaagaggtggcttaacaagaggtcctttttcaagaggtggaggttccaggacccttttaaccaaggcttctttttccagaagtggaggttccaggatccttttaaccaaggcttctttttccaggagtggactttccaggataattttttttaaggcctttggatcgatcgaggccatcataagcctttgttaaggcccttcttactctaaggcctgcttttattggagttccttctaagagaattacacctaacagggttccttctccaagaccaagttcaccaggaggtgcctccccacaggccatctcttcaaagccgccttctccaagagcagagccaccaacatgggacactccaagacctccttctccaagagctgcttctctaagagcagacccaccaagatgggatgctgcacgacccaccacgcctaggcctccttctccactagcagacgcaccaaga

SEQ ID NO: 125707 - DNA, 378 bp, Arabidopsis thaliana columbia
  unsure (1)..(378): unsure at all n locations
acgcgctgcacgctcgtaaagctggatcttagagcgccgcctagcgncggaatatgattagaggaaagaaagcaaatatgctaggaagctcacgctttttggacagaacaaaaacacttgaacaagggaagcgccagtggaaaatacctagcgacgatggggcccctaagttctttctcgcgttaaaccttaagaactatnggagaagagtcgaagccggttttaaaaaaggacagaactgggacttcaagtttgagagatcggttgactagaaaacctttggaggtgttctagaaatctgcaaaggaaaaaaacctgtggaaacccaatccattttcggtggatggggccatgccgccacttttttttcgaaatggt

SEQ ID NO: 125708 - DNA, 249 bp, Arabidopsis thaliana columbia
gaagctggcacgccctgcaggtaccggtcccgaattcccgggttcgcccacgcgtccggaaataatgtattcagaggaaaagaaaagcagaaattatgggtcaatcttttgctactgcttccttctgttccgactccatggggagggtgcaagaatccccaaaccctataataacctttcaaaccctatttgagacggaagccagagttttatgagggttcatggccgtggggaacctcaggaatcctt

SEQ ID NO: 125709 - DNA, 504 bp, Arabidopsis thaliana columbia
  unsure (1)..(504): unsure at all n locations
gagctatgacgtggcatgcacgcgtacgtaagcttggatcctctagagcggccgaccttgcgtncggaagagggcagaggcagggtggagccnccagcaccctctgttagtgctgcaataaacgcgcactcacagtgcccgattattgcagcactaacaaagggtgctggggggtccaccctgcttgtgccttctttcggacgcatggggggacctttaaataatggaccgttacttacaggcgtaccaactttccttattgtgagttgtattaaactaggtcgaattaatgggcaggactgtttcttgggggaaattgttatcccctcacaattacacacaaaaaacaacctcggaagcaaaaagtgttaagcctggggggcctaatgagggagagacctcactttattggctttgcgatcattgcccgcttttcaatgaggaaaaataccggccctcctgcattaattaatcagccaacgcccggggggaggcgctttgctt

SEQ ID NO: 125710 - DNA, 410 bp, Arabidopsis thaliana columbia
  unsure (1)..(410): unsure at all n locations
caactcaaaacgactcatatagggaaagctggtacgcctgcaggtaccggtccggaattcccgggtcgacccacgcgtccggaagagggcagaggcagggtggagcccccagcaccctctgttagtgctgcaataaacgctcaatcacgtgccagaanaaaaaaaaaaaaaaaaaaaaaaaaaaaaaaaaaaaaaaaaaaaaaaaaaaaaaaaaaaaaaaaagggcggccgttttaaaaaaacaaagctaacttacgccggcatgcaacgaaataatttttttatagttgcacctaaataaaataaactggccgccgttttaaaacaaacggactggaaaaaaaatggcggtaccaaacaaaataaacttgcagaaaaaaaaccttttttcagctggtggaataaaaaaa

SEQ ID NO: 125711 - DNA, 479 bp, Arabidopsis thaliana columbia
  unsure (1)..(479): unsure at all n locations
ttccccgggggggggaaacccccaaaacccagccangcaagggagaggggcggcagcacccggaaaaagacacaaacagggcgcgcggcaagaaaacagagcacccacaccagaaaccccacagacaaaccacagagccagaaagaaccaaaaccgacgcacaggaaggcgaataaaaataaaagggcagttcggagcgccgcccaccgccaagacgccgcaagaaaacaaagacccgacccaccaccgggagggaaggcccccccccaagaacaaagaccaagcgaggcccgagaccaaccggagaagcaccgacagagcgcccccaaaccaagagaaagaggaggagcagaagcaggagaagagagggaaagaaaaagaaacaccgcgagcaggaagcgaaagcacggaaggcagagaagaacaagaacacagcaacagcacaaacaccaaacacacagaccagagaaagaccacaa

SEQ ID NO: 125712 - DNA, 497 bp, Arabidopsis thaliana columbia
atagcagagctatgacgtggcatgcacgcgtacgtaagcttggatcctctagagcggccgacctatgcgttcgttcacgctttcgtccacgcgttcgatgcaccagtgcctgtatggcaaggtgcatcaaagcatgctttaatctccttattgcattttgacaagactttatggtcaaatgagaaactgttgtacaaaatcatgcaacacaggaggagcctgtttattttgtgaaggacatacaacaaaatggcggtggtatgttgaatctccatggatattatgtcaggcctatttcaaattatttggatgcttataaaaaatacagtactctaacactttaacaaacccaattattgttcaggtttatggcccgtaccttacctaggtaaacgtatttaacccatgttggaattctactaaatacctccgtatagccttatgctacaccttacaacacatacgccattctaatgccttacataactctcgggagc

SEQ ID NO: 125713 - DNA, 130 bp, Arabidopsis thaliana columbia
  unsure (1)..(130): unsure at all n locations
gaaccggcaccatacacggctcgccagcgccgaaacggagaacacacctggaaccangccggccacggggcccaaaaggcgcgaacgggccacagcgagcagagggctccacaacaccgacaggagacga

SEQ ID NO: 125714 - DNA, 451 bp, Arabidopsis thaliana columbia
  unsure (1)..(451): unsure at all n locations
ggacccnnaaaaggggcctacctagggggggaagacccnaaaaacaaagcanngaaggaaaagtaggagagaaagggaagaccaagaccaaaaaaaccacgccgaggacaaacacgcggaggaagaggcaacccggtgaaaccaccaaccccagtagaacaggaaagggcaaaaaaaaaattcgctcatagagaggagaaggggaaaagacaagggaaaaggcacaaaagagaaagacgcccaggcaaacacaaagggaaaacccaccgaggcaaacacgccgccaccccccaaaacaacggacaagcaagagaacgcaccggcacggcaccgccagagccacaagcacaccgaaaaacccaaaccccgaacccccggaaaccacgcaacaaacccaggagcgaggaccccaaccgaaaccacaaccgaacccgcccggacaagacaccag

SEQ ID NO: 125715 - DNA, 456 bp, Arabidopsis thaliana columbia
  unsure (1)..(456): unsure at all n locations
cggccggaatcccgggcttcccaggggcgcaggccgaaaccgaccgnggggacagaggagagccaggcggcgcgngggaggcccgcaaggaggaaaacaccgacgaggaggaaaccgagaaggaccggcgcggagaaaccggggccaaacagacacttttcggaggaggaaccgaccgagacggacaacgcacaaagacccacccaaagcgccggagggcaacacacgccaggacacgacggaccccggcaacagacaagccaaagaaacgcagggaaacgcccagaacggcacaaaacccacaacgaacccacgaccggccacccggcaaaccgaacgcccaaccacccgcgggccacaaacgggagaagcccccgaaaccagaagcaccaaaaacccaaacccgccgccccccccggaaaacccgggccgacaaccccaaccccccccgcaccc

SEQ ID NO: 125716 - DNA, 438 bp, Arabidopsis thaliana columbia
  unsure (1)..(438): unsure at all n locations
cgaactggcacccaaacagggccgccacgcgccgggacccaagacgacccgtggggacagaaaagagaagggagccgacgagcaaggaacccacgcggaggacaaacattgggnggtggaggcaaccggtgaaggcgccaaccccagaggacaggaaagggcataacaaaaaacgatancaaagcgcgaaggcgaaagagaaggagaaagcgccacaggacgaaatgctaaggccaacacacgcggaaacacacccaggacaaggacgccacccccccccaagacaaaaccaaagaaaacgaagggacaagcacgaaaacgcgtaacagcaccacaaaccgaccaaaagaccggcgaacagggaaaaaccgcaggcagggatcaccggcgaaagaaacaactgacaacgtggaggcaccctaagaggcaacggcccgg

SEQ ID NO: 125717 - DNA, 500 bp, Arabidopsis thaliana columbia
gctatgacgtcgcatgcacgcgtacgtaagcttggatcctctagagcggccgccctttcttttttttttttcataaagacgactctttctctagagctataaggaacagatcatctatgtttacactctatttattcgctgacttgtcttgacaacgaaagattcgttggaaccattttccttctctgttacggcgtggctaaaagagtatcgtatggacaagtgtcaagccattgtacatggagtggacgagcactgacgaagtcgtttggtttagatactgcgattattgttgtaagaaaagctcgatgtgcaagcaaaatatcttggtatggacctagtgagttataggagaaaagctcttatttatcaaccatagagaggatgtgaaggtgaaggacggcttccaaaatttaagagtttgatctttaatcatcatcttcatcatgcttgccctttgttgcccatcttctttgatcgttagaacaatgctgggaaca

SEQ ID NO: 125718 - DNA, 381 bp, Arabidopsis thaliana columbia
  unsure (1)..(381): unsure at all n locations
tttgacgtcgcatgcacgcgtacgtagctgggtcctctagagcgggccgcctttttttttttttttatatgtnacgatactggggacccatccattacactcgagtctatgaagcacanacatgcaacaagctcgcttatagcttcacaacacttacacttgacgatagaattggtagtctcttgcacacaattaaatgaatcaaattatccatcgctataggatctatggcattactcagagtttgggggaagctaatctatatgtcaaagagatgacatcttctattttctctttacttctgtggtgtcccgcattgccttagcttttcctccaaatgtctttctcagaccgacattctgttaaagcatgcatattctc

SEQ ID NO: 125719 - DNA, 527 bp, Arabidopsis thaliana columbia
tgaactatagaagactatgacgtcgcatgcacgccgtacgtaagcttggatcctttagagcgggcggcccttgcgttcgagagtttcttattctttttcacttactttgttcgttaatgtggcttggcgtcgttttggggcgattaccgttactgggaacgttggatgtgccacggggggccctcaacggacttgttttattttgaggaaacgctcggggggctctttttttagggaacaaaatttgtgccggggggggggttaaaccggccaccctttttataataaaggtgtaaaaaaataaaaagagatcctgagaaaaatgttgccaaaaaacccccttttttttacgattgcaaaggaaaaggcggtgggaattttaaaagttggcccaactcaaagaaaaagaaaaactttattggttttttttttgttaaaatggccccaatatttaaaaatcccaacgctcttgggggtggtaaaataaaaaagaaggggggccttgggaaaattataaacagaggcct

SEQ ID NO: 125720 - DNA, 476 bp, Arabidopsis thaliana columbia
tccgtaacctggattcttttaaaggggcggcccttttttttttttttaatacaagggggcttttatttaaatatggaaaatctttttttttctggccggtttaaggaggaggaaaaaaaccggggcttggttcaaaatttaaaggggagggtaaggaggtaattaagtaaaggtaaaacgagagaggggttaaatttagggaccacgaccagagacaaggcggaaccagccaggcttctgatcttccggaatcattccaccgccttagggggtgtcgacagcttcaagcaaactaacaacttcctccatctctggtcgttcctccggattagcttcccaacatctcttcattatggtcgccaatgctgatggacaacatcttggaatatccggtctcagattctgacgaacaacagcagaggaaacatcagcaaagctgagatcaggataaggcatatcacaacaataaatctccc

SEQ ID NO: 125721 - DNA, 494 bp, Arabidopsis thaliana columbia
gtcgcatgcacgcgtaataagcttggatcctctagagcgccgcctttgtgtttgttgtggtggatttttggattgttccagattcgagttacgatgcttacattaccacaaaaaagacaagtgtcttttatgcagggaaaaagaaggatgttttttttttcaaaggaaacaatagcattttcttttctgagggaaaatttttttttccgcgttttttaaaagcggacccccctagaaattaaaattctaaccggacccccggggtttttacttcccactagaaacaccagcgaacaatccccccaagaaaaaacccctgttgatttgacccagggtttttaatttagcccccaaacggccaaaggaaatcctacccggataaaaacaaaaaattgcgtccacacccggataaaccaaaaatttttggggccttgggttcaaaagtaggcgggcacgccctgggcaattttttcaagggggggaaacttctttcc

SEQ ID NO: 125722 - DNA, 471 bp, Arabidopsis thaliana columbia
cgtaacctggattcttttaaaggggccgccctttttttttttttttggtttaaggggcttaaccccgatcgatgcaggatctttggttgccaattggtggtttccttcattatggctgcacacaagttaaattaaaattggttatccaagattgagagatatcgaaatctaaacaacgaggtctctttttttatgaagggggttctttttccggtctgtatcgaccttagaacgcccatcttggtgaagaactaacagctctaggtctaggtaccggttggataatctgtcgctctgaactattaatcctttgcttaatgatagaggagaccgttggcctgtaatagtcattactcctgtgtgacattgctccttgtgaatgcatcttcttcccatggacgaagcttatctgtttctccagcatttctcttctaccattcaaactcttctgaggagttccccatctgctgg

SEQ ID NO: 125723 - DNA, 495 bp, Arabidopsis thaliana columbia
cgtcgcatgcacgcgtacgtaagcttggatcctctagagcggccgccctttgcgttcggaaaagggaaaattaccatacaagagttcttctttcttctctctgcctgcttctttttcctctcttttctctctctctctctttctttggggaaaatcttagaagaagagatagcttcaaaaatctcaacacccaaacccccaggttttttttttcttggggagccccgtctacagggcacccatgctaactagcgcccccccccaaaaaattgtgctctaatcaaaaaaaggccccgcggtgttggcaaacccctccccacaggaagttggccctcgggtgtcaaaagaccctttcctaaacattccatggagaaggtggccgtggggttccaaaaaacccccaccgcaaaagaacacacacccatggtggtgggaagctaaggcaagaccaaaccaacttatttcttaccaaaatcagagaggcggggggagcca

SEQ ID NO: 125724 - DNA, 490 bp, Arabidopsis thaliana columbia
gtgacactatacagagcttgacgtcgctgccgcgtcgtagcttgatctataagcggcgactgcgtcgttggtgtaccgatggaacagagtttagacagaaggggttagtttgggcttgggcaactttatgggggaaagtcacatcgagagggttacggttaacaccaccaccaatttccttttttaaacaaaccgagcctaccgtttggggtttttgaaattattggcgaaaaaaaacgggggattgtttaacctccaaaatcgtttatactcgatggaacaaccaacttgttggtctccggaataaaaaaaagaaacaggttgttaatgggtttcctggggggtgagacccccgacaaaaaacaaaaatgatttgtggtagctgcggagtttaacatgcacgttactataaccgcacccggatgcattgttcgatccagtacacaaacaagaagtctttgcatcaaattatccggggagtgatggttca

SEQ ID NO: 125725 - DNA, 490 bp, Arabidopsis thaliana columbia
tttgacgtcgcatgcacgcgtacgtaagcttggatcctctagagcggcctgcctatgcgttcgtggacgcgtgggttgaactccggctggaaaatgttccaatctgtggatccaacattccaaatagaacagctccataataatctttttcaaagtaaaaggtgaactcagagcaagagaaagaaaataattccagtcaaccgaaggtgagttttatcaaggaaaggcttccacagcaaaattttgactagcgagttgcttgcgcctgtgtgtgttccaagagctgattcactaacttgtatgttcgtactgataagcctttggtgtggattatcaactgctcatgcacgttgggctgagtaggctccatgattacagttcctgactcagaatcaatcttggcatcaagctttgaggtgcggattaggttcacaatccatctctcggcctcctcatagttcagattcagtttttcagcaagtacccccat

SEQ ID NO: 125726 - DNA, 508 bp, Arabidopsis thaliana columbia
ttagtgacacttacaagactatgacgtcgcatgcacgcgtacgtaagcttggatcctctagagcggccgcccttcgcgttcgatttgcttcaatcttctctttatcgctccaccagatccatgtaaacaaatattgcattctgttaacaagaaatctggccagaacagacatatctatgttcgatcgagctgctgcagaatcctcgagaatgaaaaggatctctcgcttattcacacagagagagacgggtcaaaaatcccataagaattttgcgaaacaagcaacctctcttcttcttcttcttcttcttcttcacagcacatcagccccgtttggcggaagctcctcaacaaccacattgtagaatttctgaatatcacacagcattctctgctcatcaagagtcacaaagttgatcgccacaccctttctcccgaaccttccacttcttccgataccgggaaggtacttctctggctgacttgggaggtcaaagtttatgactag

SEQ ID NO: 125727 - DNA, 438 bp, Arabidopsis thaliana columbia
  unsure (1)..(438): unsure at all n locations
agaggacgagcaccaggggacctcactagagacgcccgctggaagggaccaggagtgacaacgacgctacaagaagcaaccagcccgccagacacaatcgagagagccanccaattccttctaacaggggtgggcgganaggacagacaaggagcgagcgcaagagaaaaaccacacagggaaaccggcggagccgcccgccccgccaaaaaaaaaccggacgccccacaagaacgaccgaccgagagggaaacaaccccagccacaccgagcggcacaaaggagaaggaaagagcacgaaagacgggagaaaagacacacgaaaagcaacccaccccaaccagccagaaacccccccaccgcgcaaccggcggagagggaaagcacgagaaacgcgccccggagagagcccgacacaaccagccccacacacaacag

SEQ ID NO: 125728 - DNA, 465 bp, Arabidopsis thaliana columbia
  unsure (1)..(465): unsure at all n locations
tgacgtcgcatgcacgcgtacgtaagcttggatcctctagagcggccgccctttntttttttttttttattttttttatttttttttttttgggaggaactatcgttctcagaaacaaattgaagacttcaaggggaacattctggacaaagaacacatgagaactgtttcagaatgagaaagagaccatagcacattgaacctgttctgatattatagagattccttgaggctaaaggcttcttctttcatggttaccaaaggattgtggattcaggcttcttggaggtcacattgcaaggatccatgttctaagctggcctacgatcttcaaagtatggtttcccagcctgctcagggccacgcccaaccataattgatgccccacggtttgccacaccccataagaaagtgttgatatccgcggtttatgttttccggtgagaaacgctcgttgccttcacc

SEQ ID NO: 125729 - DNA, 406 bp, Arabidopsis thaliana columbia
  unsure (1)..(406): unsure at all n locations
gggtcggtgggaagaggggggggggagtaagactccatggggacctccggggggaggatactttggggggggcgacgcgccacgcgcngcgaatctgggggccgctcccgcaggggcctttgcctagcgtggcagaaaaaaccaatgagtccgcagggcaccgtcctaggtcatgggggaagcaggggtaacaggcctgattcactggacntctttcacagggccagagacagtggatcatcacgcaacacgggtacgcccggattaatgccgccccgaaggcgagggacaacactgcgggaaatacgtattctttctttataccggagggcggacagccgccgtatcccacgtacaagcagagcggacacaagaggcactgtgtaccgacgcatcctcgcgacag

SEQ ID NO: 125730 - DNA, 521 bp, Arabidopsis thaliana columbia
  unsure (1)..(521): unsure at all n locations
nnnnnnnnnnnnnnnnnnnnnnnnnnnnnnnnnnnnnnnnnnnnnnnnnnnnnnnnnnnnnnnnnnnnnnnnnacctatgcgtncggtataaacatataaagcttgaaagaagggcagaataaaccatcttattgcagatttgatatacgtgtggattacctttgataaagactgaaataagtgttgcctcgagctgagataagagacgtagaaacatgaaacctttagtaaagattcactgaacatcatttactttcaagaactgctttctcctgattgagaatcgctaagcttggcgctgaaatcccaaaccttcttggccaattctgtatctttgacaagcgggaatggcttaacaatgtagctatctaggaagtattcccctgaaactcctgcagctagaggattcattgccacatagcaagtggatgccgctccctgtggaacagacttgagtatatatttagccactgcaccaaccgctacagccaaataggggttgaagtaccgcccgaagcta

SEQ ID NO: 125731 - DNA, 539 bp, Arabidopsis thaliana columbia
ctacgactcacttttgggaaagctggcacgcctgcaggtaccggtccggaattcccgggtcgacccacgcgtccggtagaaacaaaaaaagctgaaagatgtggttatttggatcgaaaggagcatctggattctcagttagatcaactgcagaggaagcacacatggtgatgatgggactggtctcactgccatagccacaggagcatcaagtggtataggagtatagacagcgcgtgttctttcactgcgcagagtgcatgtggctatggctgtgaggaacactgactctgctgctaaagtgtaggaatatatagtcacgctagtgcctggagctcagctctatgtcatggagatagatctcagctcaatgcaatctgtcaggacatttgcgtctgagtacaaatctactgatcttccactcaacctattgatcaacaatgccgggatcatggcagtgccttttatgctctctaaggacaacatcaagctgcaattctcaaccaatcatttaggtcattgactgttgactaaacttc

SEQ ID NO: 125732 - DNA, 502 bp, Arabidopsis thaliana columbia
  unsure (1)..(502): unsure at all n locations
cggggcaagcacgcgtacgtaagcttggatcctctagagcggcctccctcngggggcgggggcccagacaatatcncnctatcctacacgagaggacacaattacaaagcactctcgagaaaagggcatatctctgacacaccgcatatcgacaacaactacccgaatctaatactcacatgatacatccaaaacccaactaccattttttttaagggggtgggaaaccgcacgcatgaactaaaaaaaacccaagaccggcaagcataggtggaccgcttactggccctcttcgccatgcaaaaaggaacccaattgggaagacgctctaccatatcattaaaccgatccttcaccaagttacccgcacccctacacgtaaaaagccctcctctacctttgattattcttaaacccacccggctaaccggatttaacatttctctccactacctttgcattccagtgatataacccaaacacaaacgcccgccaatcttat

SEQ ID NO: 125733 - DNA, 497 bp, Arabidopsis thaliana columbia
  unsure (1)..(497): unsure at all n locations
cgcctgcaggnaccggnccggaatacccgggtttacccacgcgcgcgaggacggggaaacnagngannaagcagcggaagggtaaagggngcacaaaaanggcggnagccaacagaagagaagagaagggggcagcaacccgngaggagaagacggcnagcgagaacataaaacgaccncgngaagagaagcttttttgtgggggttaagcagatgttgtgtttaccagcacaagatctgagacgacattgttgtttaaggagcatcttgagaatattccttaagcttttccagagattggaggaatgtgggattttggtgacaattttggtcccaaaaaaggtggatcttggggtgggaaaaaaaaacacaccgggtttaaaaagtgtgccaacctaaagaaatggtggttccaaaaaaaaataagaatagggaaagcattgaaacttcaaaccttaatcacaaaggaatccacacagtttgaagcatggaaggga

SEQ ID NO: 125734 - DNA, 431 bp, Arabidopsis thaliana columbia
  unsure (1)..(431): unsure at all n locations
acgtcgcatgcacgcgtacgtaagctgggatcctctagagcggccgacctacgcgtgcgatttaattagaaccaccaaaaactgtacacaacttgaaaaccccactcacctctctacatgtgaccagcaaaatactctacattttatgactcgggtgtctcctgttaaccagactctactatacccggcgaacaaacaaacatcttacatttctaaatcaaggcctcatanaataaaccatgggtggcataactatccaaagagcccgaggtgtttccagatttgcatatctacactccgctacccgacgagatacactgacccttgtctcaatggaataactgcaactttatctacggagaagaaagcagtgaagtaacagctgaagaagacggagagacagagctacttttatcgcaccgacggacgac

SEQ ID NO: 125735 - DNA, 469 bp, Arabidopsis thaliana columbia
  unsure (1)..(469): unsure at all n locations
aaccacaaaggggctttcaaggggggggggagccaaaaaccaaccaaaacacaaaancccggggcccaaaggaacaccccagggcagggaccagggaaggcgcggaaaaaggaaggaaccaggaacaaaaagacaaaaaacgaaggcaaaacaacagcgccggcggaaaaggnttccaaaggaagttggggaaaaccaaaaccccgccaccgaaagaaaaaaagcccccccaaggggggggggggggagacaccccggccaaaaaaaacaagaccaaacagcccaaaacacaggcgcccgcagaaggaaacacaacaaaggagggagacccgccccggcacaaagaccgccaagaaaccccaaaaacaaacaccaacacaaccaaaaaaagaggcgcggaagaccccaccgaaaaaaagggacaaccccacgccgcaaaaagacggagcgcccagaaggcaaacaagaa

SEQ ID NO: 125736 - DNA, 506 bp, Arabidopsis thaliana columbia
  unsure (1)..(506): unsure at all n locations
gagctatgacgtcgcatgcacgcgtacgtaagcttggatcctctagagcggccgacctttttttttttttgtgcttttttcggtcgacgagcctgatcgactcgactcttttccttgccccccggcctctcacttggttacgttcttcttctgtatcgtcgcttgaatgaagacactcgatcggcccggctttcccgaatgtcgtccaccaccggtttcttctgctgtacgggactagttgtttcacgtcgcttcagtcgtcgtggtcgacggggaagaaagacatgactgactgttctttcaggaaaatgtagaatactacacctaccgagacgaaagccgaacgtgagtctcgtaggtggacgtatcgaaccgaaataagatctcagattgacatcttgatacacacatntaccataataataaatagagtcaatagtgaccccgccgtagaaagagccgcttattctttgcttgataggggggcttccattcaccaacaaaga

SEQ ID NO: 125737 - DNA, 542 bp, Arabidopsis thaliana columbia
  unsure (1)..(542): unsure at all n locations
nnnnnnnnnnnnnnnnnnnnnnnnnnnnnnnnnnnnnnnnnnnnnnnnnnnnnnnnnnnnnnnnnnnnnccacgcgtccggttgcgagggccttgcacgaaaccaaaccgccccccgccccaatcaagtaccagttgcttcgcagcgcgggtagcctacttaggttaggaggcattgccctcagttcttactaacctccggtgtgtaatcaacatgttgctagcttcaactcgggtgaataagaatcattgattctctctccttgccatttcttattcatcagggcgctcggcgggctctttctcaaaccaaacgactctgaacgttagggaagataagaccacctgagcgaaccgatcaaagggacttgacttatccgaaccgaacgatagcagcttanacttaaagctaagcctctcacgagcagcgtcgctgcgcggngaggagcatctcanagtatggggcaaaggatcaagcgcttttactttgtctcccgggatccaccacaggttgggtttgagagccgtgtgatgggtgactat

SEQ ID NO: 125738 - DNA, 308 bp, Arabidopsis thaliana columbia
agccaggacccagccccggcagaaaaggaaccttttatggggtagggggggagcaacgcccccgagcgcaaaggccaaacacagggggggaaggcgcaacccgggcgcaaccccggacagggacccgagaagccacagaacccccgaaccagaacccgggacggcgaccccaacgaggaacacgaccacgccagacaagacccgacgcggacgggacaaccaagagaggacgaagggccccgaccggcagaaccgcaaaggaccgagcgacgagggacaaggagcgcgggccgaagacaacagaccag

SEQ ID NO: 125739 - DNA, 497 bp, Arabidopsis thaliana columbia
  unsure (1)..(497): unsure at all n locations
gacgtcgcatgcacgcgtacgtaagcttggatcctctagagcggccgcccttnntttttttttttttttttttttttttttttttttgttttgatttttttttttttttttttttagaaatttgttcaagcagaacttcatttgctaattttctattacagaacaaatgtgttgtatcggttggttaaattaaaatgaaaaaaaaaaattttttttctggaagtaacagagagcccaacccggagatcgttagatgttccaaacacatacattcggggggtctcgatttcttctcccttccgggcacttggggccgccacatcaacagctgccgcgtaatggattccgttgttgacatcgtctccgggggaaaaaatgatctccctgaaaataggttcgtgtccctttaaaaaatttcccatactgagcacttttttccaaaactggttaccccatggaggcgaaaacagattccacaccccttgtttttcttttaa

SEQ ID NO: 125740 - DNA, 506 bp, Arabidopsis thaliana columbia
aggtgaactatagaagagcttggacgtcgcatgcacgcgtacgtaagcttggatcctctagagcggtctgcctatgcgttcggatccttagatcgaattcaagaggttcgccacaaagaccacggattgataaagactgtggagagccaactaaccgaaacagacgtaaggtatctgaaagtacagaaagtgtctctgaatggcagcaaatgagtccaaaagctaatgtttgcaatggcagctttatgtcttttggagcttacaaaaaataattgggaggcttgcgagggggtccggagttcgacttgacgagtagctggatcaaactgaacgaaattttgggccatgttctcaccgatctctataatagagaccatggtgaaacaacggcagaaatagcttggggcactaaatactgccacaacgttcttttcttggcacctttaaagacttccaagacatgttggtgagctcttgaaatctaagagagtccattgacgcgctta

SEQ ID NO: 125741 - DNA, 501 bp, Arabidopsis thaliana columbia
  unsure (1)..(501): unsure at all n locations
cgcctgcaggtaccggtcccggaattcccaggtcgacccacgcgtccgatatgttagaatcaaaatacagtaacaaagaagcgaggtgnatgcctcaggtgtacaagtcatcttgcaccccttgtgcaatcatggggattttttatacgctctacaggttgcagaatctgattatacacccaaagcacctacctcattggggggggtgaaaaacaaaatttgtttcaatatctgattactcccaaacaagtgccctatttaatgacctttctagcagctgggatgaaactttcacaaaactacaggggaattagactactaaaaacggaagagtaaggtccgaaaaaaaacctattagtgcaaagtgttttaagcatccagggtgtaagagattaaccgagggatctacgcaaaaaagcttgctaggaactcaaaccttggaatgctcctaagggtcttgccaggttagacacaaagaaaagggtgggaaagaagcgattt

SEQ ID NO: 125742 - DNA, 486 bp, Arabidopsis thaliana columbia
  unsure (1)..(486): unsure at all n locations
cctcagtccggccgattcgggttcccagcgtcgaggtnttaaagaaggcaaatgtggactatgaaccatccgatgcaacgctttctcgaaaccttgagttttgagttttgagaggaggaaatttgactcngcggaggaccgtgaggggaacctcattgttccagaggagattcttggagtatcatcctttcttcttgggatgttgtcnacaaggagaagagaacttaacctctcattttctttccccaagcggggttggtcaggtcacacaataatttgcccgcctcgaagacacaccgacgatgaagaggaacccaactcccctcacattagaaaagagtcacctaactcccttagaaacgggtggtgcttctcaaaagacgaaggttctggattcagttcatgcctcatcggcttcacttcacggggtttacacctccacagactccaaccacagcgactggtctatcatcacagaaggcgtca

SEQ ID NO: 125743 - DNA, 523 bp, Arabidopsis thaliana columbia
  unsure (1)..(523): unsure at all n locations
cnnnnnnnnnnnnnnnnnnnnnnnnnnnnnnnnnnnnnnnnnnnnnnnnnnnnnnnnnnnnnnnnnnnnnnnnccacgcgtgcgcaccaccgctcaaaaaatggcgacggcgacggcgacatcggaacgattcgagttagccaagcactgcagttcacggaactggtctaaagcgatccgagttctcgattcgctccttgctaaggagtcttcaattttggatatatgcaatagagcgttgtgttataatcaattggagcttcacaagcatgtgattaaggactgtgacaaggcacttctgcttgaaccttttgccattcaagcttttatttctcaaaggacgcgctcttttggctttggggagaaaacaggaagctgttcttgttttggagcaagggtataaaagtgcgttgcagcagacagcagatgtgaagcagttacttgaattagaagaactcttaaaagatgcaagacgagaaattgatgggattttaaaaagtcatgccaccgagtctccgcaaga

SEQ ID NO: 125744 - DNA, 516 bp, Arabidopsis thaliana columbia
  unsure (1)..(516): unsure at all n locations
gccccccagaggccccggcccaatttcccgggttacccacgcgggcgggggggacattattctttagactgccctcacctcttccagagtgtggtgacccccgctggggaaagaaaagactcaacagaagaaaagaactacctccagagcagatgctggtgccacgaacaacagaaggtctcagaggaagcagccatcctcttttagagaagaggggggcncgccaggaaggaaaacgttggcatactaagcaaaactttctcaaaggaggcgaacacccacttgacgctttgcttgatcacagactggcctgactgaatgtagtgtgaggggagcgcgcccttcccctcagcgccgcgcccaccataggaagtccgagcgggacggacacacctccctatccatcctccagcaggcaagcaaaagccaactgatgcattccagcgggaggggctagccgccgccgaagaaaaagaatggcagcagaaccccccccggaggaaaaagaaagcccac

SEQ ID NO: 125745 - DNA, 536 bp, Arabidopsis thaliana columbia
ggggataagccccccccaaaagccccggcccaaaaaacccggttccaccccgcgggggggggtcctacaaatacggaaggccctaggacgaaaggcacctggagcaacgccggcgaggaagcgagccaggaccgctgccccaggaaacagggactccacaggccgcccagccagcaagggccacatctagccaaccacaccggggagtttttttgaggggggggggccccgaaaccaacccaaagagaagcagaaaagcccacacgccacgaggcctaaaccaggggaaagcgagaaagcaacaacacccgagcgaaagtcccaccgctggagaccaggaaggcgaccaccccaccaaacaaaccgcggcccacagaagcccggtgaagaggggggccccccaaccccgggacgcgacagggctgggcacaccctcaagggcgcccccccgcaccacccaaggccacgcagaaacagaggctagaaaccaagaaggaactcggaaactacacaaagagggagatagacgagggaga

SEQ ID NO: 125746 - DNA, 509 bp, Arabidopsis thaliana columbia
cgggccggagtcccgggcttaccgaggcggccgggggtctggaagaaacaaggggataaaccgaaaaacgggaaacgccgacccgatcaagggaacgaacggcaccgaggtgccgacgacaacaaaaacgagaaccggatggctcgctgcgccagaggcccactctttctccggggggggaccaggacccgggggcaccctcaacaaaccaaacacaaacggcccccgggaggcacaaatcaaccggaaccggccgaaaccacatcagggggggggccagcgccaagcgcggaacaccagcgcgacaaagcgaaaacgccaaacacaagagtcgccacaccgagcaaagcggccacgcgcacccagcagggagggagggccacaacgcggggccgtacaacaccgacgagacgcaacgaagcacacgcagcggaaagcctcccaagcgacccaacgaccgacaggcatgagggccgggcggaagcgaagagggacaagggcaagacaga

SEQ ID NO: 125747 - DNA, 478 bp, Arabidopsis thaliana columbia
  unsure (1)..(478): unsure at all n locations
ccgggcggggtccccggttcgccgggggggggggggncaaaaaaaagnaacccaaccaaggcgccattggcgcgcccggcagcccagcgcagtggggggagggagacggatggacgccgggggcacaccaccaccccctgccgggggagggggagagccaatcttctctttgggaagttgggncaaccccgaggggccgcgcacaggaaaacagtcccccccgcagaggggcaggacaactgtggaacggggggccaggcaagcggcggaccgacaggcgccggcgcaacgagagagagcgaggacccaccacgcacgcaccgactaaccctccaaaggattagccagcggacaaaaaatcgcggacagacacacagccgccctcacacaacagccaacgcccccgccccgccacaactgacaaccaacacagaaaacagacacagagcacacgagacacagggctctataccgccaa

SEQ ID NO: 125748 - DNA, 414 bp, Arabidopsis thaliana columbia
  unsure (1)..(414): unsure at all n locations
aaaaaaaaaaaaagagagaagcgaacccctctgaacgagcccgaagcttcgaaaatgtgattgataatatccccaaaagaaatcctcacaaattcccatcctcttccaggcctttttttgggggggtggagatacaaaangcattgtgattcaccaaaaacccagatattgttctaaaaaacatcttcattaagccaaaaagctttaactctttcttattccaacccaacctttagaactaaaaatgattaatttttcccaaagaaactcatccacaaatttgattaaaaaaccatacctcaccttttcctacaaattcattcccaggtatacaaatcagaatccgaacctttcattttaacctcaaaaccccctacttatccccccctttatttcttaccccttttccactaa

SEQ ID NO: 125749 - DNA, 360 bp, Arabidopsis thaliana columbia
agcctccaaggaccccgcccaatatcccggtttttcacgaggtgggggcccataataaaaaattaaatacacatgtctaatatttctgctgcaccttggtattatctgctctcaggtgccccacgcagtgtcaggtcatcagtatatgtgattcaacctgctaggaattacctcccccgaaatttttttttggaggtgggacaacagacataccacaaattgaggcaacaaatctctccaatctggttcggtgaataagaagaagtcatatagacataatatatatttttttcaactatgtagggacacgctattatatgattatcattctctggcaatataaatttagggagtctttgt

SEQ ID NO: 125750 - DNA, 508 bp, Arabidopsis thaliana columbia
  unsure (1)..(508): unsure at all n locations
nnnnnnnnnnnnnnnnnnnnnnnnnnnnnnnnnnnnnnnnnnnnnnnnnnnnnnnnnnnnnnnnnnnncacgcgtcgagtgaaacaatcaatcttgcagctagactgactaaatcagtttctacattgccctggaacccacgcagacggacttgcagangatgggataccgaacagattgaacatgctaaacaattagttaatgaaatcatcagtggcgagaaccgtatgagaaactcangcatgggtggaggctatccacaacaaggtgggtatcaagccccgccacccctcagctgggcaccacctggtggtcgncagcaaaacctgttatgggtgttacatgcaaccagagcatatncangtncacctcagtatgggtcatcacccttacggaagttaccctcaacaaacttcagctggttactatgatcagtcctctgtgccacatcccagcagagcgcgcagggtgagtatgattattacggtcagcaacagtctcagcaacc

SEQ ID NO: 125751 - DNA, 580 bp, Arabidopsis thaliana columbia
  unsure (1)..(580): unsure at all n locations
gggcccggaatccccggttttcccaaagcggccgaggacatctgtataaaacacgacgcttccaattttcgggcggaacccttttctctcccctccaacccctactctcaacgccgtcggctacccaaattttcttaaccccccggaccattcccaccgcttccaacatatcagctcactccccatcctatataggaccaagccccttttttttttcacgggagtgggaaaccnnncccccnccccctccactctctaacacattgcgccccaaacccgctttagaaaagacacacacacacccatgccgctcaaaactcgaaattccaatcctacactattaatccaaatcttatcctatcccttatacaacctcccaccaaccggctatactcccgaccccaaccactatgtgaacaaacccctcccaaacaccccgcaacaagagtataacacaactaatactcacaccccaatccaaacacatcttacatacaccatactctacaacctcaatactacacatacactaaaacaataaaacacggccacctgcttaacgacgagagcaataaatcca

SEQ ID NO: 125752 - DNA, 519 bp, Arabidopsis thaliana columbia
  unsure (1)..(519): unsure at all n locations
cnnnnnnnnnnnnnnnnnnnnnnnnnnnnnnnnnnnnnnnnnnnnnnnnnnnnnnnnnnnnnnnnnnnnnnccacgcgtgcgcggacgcgtncgccacgntccggggtaaagtctgaaaaactcctctgagttttttttctttctttcttataataaagctcttatctntatctctgtttctctctcttaatgggtggtttaatcgatctgaacgtgatggagacggaggaagacgaaacgcaaacgcaaacaccgtcttcagcttctgggtctgtctctcctacttcgtcttcttcagcttctgtgtctgtggtgtcttcgaattctgctggtggaggggtttgtttggagctgtggcatgcttgtgctggaccccttatctctctaccaaaagaggaagcccttgtgttgtatttcccctcaggacatttgggaacaagccccccgatttctccgccgcgatttacgggcctccctcctcacgtgttctgtcgttttctcgatgtttagcttcacgc

SEQ ID NO: 125753 - DNA, 181 bp, Arabidopsis thaliana columbia
  unsure (1)..(181): unsure at all n locations
cgaattcccggtttacccacgcgggcgagggggnattttaaaaatattctctgcctcaaagagagaaattttgggatctctcatcgcacaaaaacaacacctaggtcgcgtgtctttattcccggcgcgaaggggcaccatcccaccccccatcaatgaaaagagggcccaaaaccccccc

SEQ ID NO: 125754 - DNA, 514 bp, Arabidopsis thaliana columbia
gggaagctgggacgcctgcaggtaccggtccggaatttccgggttgacccacgcgggcggggatattctgatgattgtacaaattctgatcaggatgcagctgtcctcatgaactgtgaccacaataggtccttcttgctctccgtatgctagattacgccaaactataacaagggtacattctgggccatcgatggggccctgttcttggagggggggtgcccggctgaaagaaagaattcagtggacaaagctttatgccggggagagaaaaacaaatctctccactaagagatgtacatagaactggcaattccatcgggtatcaaggcaataacccgtggatgatcgtcccttatgaaaacacagttactgttgaagggactggatgcgcccttcaccaaaaatggtactctgtctactgaccacggaggcgaatcctcccccaatttcgagcttaaaagttgtgtgagcaaccctgttgatttggttgggtctctctacttaaaacgca

SEQ ID NO: 125755 - DNA, 332 bp, Arabidopsis thaliana columbia
actatcgatattggagggcccgagccgcgattcggtacactcggcctgcgcctgctgaatgggactgggtatgtgtgaatactaaacagcacaaaaaatgctggtctgtctttttacgcagacaggaggatcagagaggatgtatggacatacaagcttcgctgaggactcagggccaagaagcaacgatttgacagactgaaagcttgattcctctcagctgaaaagctgaatctgatgaaatactaatctgttctttttacttattgctgagaatttgaatatcatatttagatctgatgtatggttcgaaaaaaaaaaaaaggcgcgtt

SEQ ID NO: 125756 - DNA, 448 bp, Arabidopsis thaliana columbia
  unsure (1)..(448): unsure at all n locations
tatatctgaaacagcacccgtaacctacccatactctaagttttttgctatctacctctttttagccaccctcactatcactcacgccctctctaccctctcgttcctccccacaggaagaaacacactctttttttttagaggggggtgagagaagacnnccccaaacaaattaccttcaaatatattcactcgcgtaacatccagtcctaaatatttttacccctatctcgcatacagaaccccccaccgcagacatcataaaagtcgcatgatactcaacacgtaacatccaagatcctgcgctcccacacaaccaccaccctagcaccccccacaaaacctcaaaatcacatctcgacagaacctactattcgtcatatctctctactataccacttctatcaaaatcattatactaccactaatccccatactaaaaaattta

SEQ ID NO: 125757 - DNA, 494 bp, Arabidopsis thaliana columbia
  unsure (1)..(494): unsure at all n locations
ggcccgggccgggattcccgggtttacccgggggggggggggggttacaaacagggggcgcccaaatgggacagctttggcgggcccggactgccctaccatgctgctaaacagcctgctagtttgttacaccatgggtcccccatggccgcccatagtacggagagcggcgcagcccaccaaatctcctctctcggaagagggancnncccacgtggagccacggcggctggcagagcgctctccgcggtggggggggggggcaggcagacatttctgccacttggggatggccaagccgggtgctcacagagccccacaaggatagttgacccaccccggacccccgcaactctatatggtgtctgtggaggctccccaagacccccggggcgggctgaaaggggggagccctgccgtgcgcaggggtgcggcacccagattccctcaattaacatatgactaggcgataatagagcacaggacaactaaag

SEQ ID NO: 125758 - DNA, 475 bp, Arabidopsis thaliana columbia
  unsure (1)..(475): unsure at all n locations
tctatacgactcattttggggaagctgggacgcctgcagggtccggtccggaattcccgggttgacccacgcgtnccggacaaactcggtaaatttggtccaatattattttttttaaaacactccgtattatatattaaaggttcaccccaaccggaaaaagagagaatctggggctggtgctcagaaaatctttcaagcgttatctgggcttaccgttactcttcccaaccccgcaagatcttctatttatggtttttcatttccccattaaatcttttcattatctaaaaatattaatatcggatcttttttcttctatatatgcttccttcctaatcttgattcctggttccttgagtatttcttgatgaatcgtgaaatggacgtcagcctttcttctccttgacgttcgcctatgtaaactggatatagccgtgggtctaaacgtgggcccaatgagctcctccgcatc

SEQ ID NO: 125759 - DNA, 524 bp, Arabidopsis thaliana columbia
  unsure (1)..(524): unsure at all n locations
ggactcatatagggaaagctggtacgcctgcaggtaccggtccggaattccgggtcgacccacgcgtccaaactaatgggacgtccaagcgttgctcggcgttaccaacaacaaacacagtggatgtctcttcggtgtcagatctttttgaattcatatgctcgggttcctctcgtaaacaagattggtatcactcctcaaagagttggccagtctattgacaaatgggtactctacggctcacaactttgtagactggttcagcttaatgagcttaagcttacaattccttagaaagctaggctataccactactacatacccgtttttatttggtgcgaagatcagattggtttgcataattcccaagtttaagatggagatgatgtacctnctttagtgattggatttagcgctcctcaaggatgtgggcagactacacttgggtttgcacttgattatcttttcaagacaacaaaaaaaaaggcagcgacgatatcccgtaaacgatttttacttgactg

SEQ ID NO: 125760 - DNA, 521 bp, Arabidopsis thaliana columbia
  unsure (1)..(521): unsure at all n locations
nnnnnnnnnnnnnnnnnnnnnnnnnnnnnnnnnnnnnnnnnnnnnnnnnnnnnnnnnnnnnnnnnnnncacgcgtccgaagaatcttcccgcagattcagaacattctggcatatttcagtgtattcaaaggtttgcctgaaggcacttctgcgccagattatttttgactgcatctgggggagcttttaaggattggccctgtcaaaaagctaaagaaggtaaagtatcggatgccgtggaacatcccaactggaacatgggaaaaaaaattactggggaccttgcttccccttttcacaagggtcttgaaggcattggaaccccttattttgtttgaagctgatttgacgatatagaaattggcatttattccgcaaggatcatcctttcctgattgaaacacaggattcttctgtgcttgctcattggggttggcctgatatggcgttaccgattctttacaccattgtcatggcccgataaagttccttgttctgaagtaactgggccaagacttga

SEQ ID NO: 125761 - DNA, 441 bp, Arabidopsis thaliana columbia
cgaccaatgacacaagttattttcaaaagatgatgccaaattctagatcggggaccataactccgacgaccgactcaacccccaccacaaccacatccactacgactctaaacacgtgggattggtgttacagtttttctcgaggggggagcggttgggaaggacaatacgcgaacgcttggagttttatgtccttatgggaacggcggaccccctctaaaaaattggaaaattctggctaattccacccgtcaggggggattgcgggtttccatctactgaaaggtatatccggcggggggaaaccaaataggacctattagttagaccgcgccgataatctaagcgagcgggacagacctttatatgcgtgtcatgcggcttgcacggttggaagcaggaagatgaaccccgcggaagaccgtataaacccccaaaggg

SEQ ID NO: 125762 - DNA, 494 bp, Arabidopsis thaliana columbia
aaagacacagccgggaccaggaaagagagacaagcggcggaacaaccgccggcgggtcctaggggagccaagacatagcaccacccgaagaggcgagcgccccccacaagcaacacgagcaagccaaacgagcggaggcacgcacaaccagcacgcccccagtttttctttcagagcggggggcgcgccaaccaaccccaacgggaaaagaagcccaagaccacacgaccgcgagagactaaacccccacaaggcaaccgccaaagggccacccagagggagcccacacacggcaacaaaccggagcagccccgcacaccacgctcacggcaccccacctccttaccagcgccgcgcaaagggccacaaagaataccgccaccgccaagaccgcccgagacaggcccctcggacccatcgacgagacaccacagaatgaggcgagaaacaaaacccatcacaaactaaaccaaaacacaatacagaacgacaaa

SEQ ID NO: 125763 - DNA, 410 bp, Arabidopsis thaliana columbia
cactctatacgactcatatagggaaagctggtacgcctgcaggtaccggtccggaattccgggccctttttacggagctgaattgatatgtagcgtcatgaaaagtactcgctagattcgcagtatggtggtgacatactgcacatgtcgtgactctttacgtgaactgccgaacgatgtcgatatcgcgtatctcctcgtggtggaatctacacgctcttctagattgtgcgcgcgggtctcttctgagaaatgcatccgtaagccatcaaactctttctggacggcgtctgaatggtggcggtctgcttctccttccggcgatggattcgaggataccagtcgccaagctagctgttctacatctacaggatctggatctaaggtttttccacaaacgaaatcaccat

SEQ ID NO: 125764 - DNA, 520 bp, Arabidopsis thaliana columbia
caactctctgcgactcactatagggaattctggtacgcctaaaggtaccggtccggaattcccgggtcgacccacgcgtccggaatgcataaccgaggctggaaatcggtttactgtgtgacgaaacgggatgctttccgtggcacagctcctattaacttgacggataggcttcaccaggttctccgttgggctactggctcggtggagatctttttctcccgtatctacgctcttgtcgcaagctcgaaaatgaaaatactccagagaattgcctacttaaacgtcggtatctacccgttcacatcgatcttcctcatcgtatactgtttcctaccagcgctctccctcttctctggtcagttcatcgtccagacgctcaacgtcactttcctagtctaccttctcatcatctccatcactctctgcttactggccctcctcgagatcaaatggtcaggaatctcactcgaggaatggtggagaaacgaacagttttggctcattggaggaacaagtg

SEQ ID NO: 125765 - DNA, 521 bp, Arabidopsis thaliana columbia
actacgactcacttttaggggaagctgctacgcctgcaggtaccggtccggaattcccgggtcgacccacgcgtccgcccacgcgtccgcccacgcgtccgccgcagccgctttagccgccgcttcaatcgtttttagaaaacgcgatcctgcttattccagacttctacttgaccgtgccactagggtattcgcgtttgctaacagatatcgcggcgcgtctttaacagtctgtaccacgcggtttgtcctttttactgtgatttcaacggttaccaggatgagttactgtggggagcggcatggctacacaaagcctcgaggaaacgagcgtacagagaattcattgtgaagaacgaggtcattcttaaggctggagataccattaatgagtttggttgggacaataagcatgctgggattaatgtcttaatctccaaggaagtgttaatgggaaaagcagagtatgttgagtctttcaagcagaacgcagatgggtttatctgttctatattgcctgg

SEQ ID NO: 125766 - DNA, 536 bp, Arabidopsis thaliana columbia
cagctctcatacgactcactattagggaagcttgtacccctgccggtaccggtcccgaattcccgggtcgacccaagccttccggactttgcaaccagctcgaaccattctgaacccgctggaaccaccgcttaggtcaaggtcgtgtcttttgaatcccaaaccaggttcccgattctttcacttccaaagaacaaaagaaactgcgaaagaaaaccaatttggggtaagccagttcttttttttcttccggagttaatggatttgggtaccctggtaaaggaaaaaggcccaaaacccacctccaatggttaagcccttcgtaccgtccaaaacaggcctgaaccacacaaaaaatcaccaccttttgaaggaagaagaagataatttatggaaaaattaccttggaggagtgtgcttgatacggaacctggacacaacccctctttaaccacaaacacttggttttttaacctcaggaccggtaccaccaccacttggaacctaataataacctatctctctccccaaataaa

SEQ ID NO: 125767 - DNA, 502 bp, Arabidopsis thaliana columbia
agctcttcatcgactcactttaagggaagccggtacccctgcaaggtccggtcccgaatttccgggtcgacccaagccttcccaaaaacgggaatcttggaaccattgcttccattgaaatccggtttattggtggaaccaaccttttaacctgaagaaccttctttggaaccctcattaattcccgccgggcttttcgacccaccggggttaacctgaacatgacccacccactgggcttcttggcccgaacctttcgtcggaggagaattccttgacctatttatacaaatttccttcttaaccacaacacacgagcggttccaaacaacagactacggaataaacctctcttttactctctggtgaaatttgatccaacttggaatttgattttaaatgactttttaattcccgttggtggaattccaattcattcaggggttaatgaccgttcaatcttttaattgaaaaggaaatatgaattaaaaaaaggccggcc

SEQ ID NO: 125768 - DNA, 550 bp, Arabidopsis thaliana columbia
  unsure (1)..(550): unsure at all n locations
tgattctgccnnnnnnnnnnnnnnnnnnnnnnnnnnnnnnnnnnnnnnnnnnnnnnnnnnnnnnnnnnnnnnnnnnnnnnnccacgcgtccgccgacactgcattttccgagtactcaagagaaaggcgatggggtcatcacagtcttcgcaattactcgatgaagaagaagaagaagaagatgaagcagagagcgaaggtgaagaagtagaagaagaagaagatgaagcagagagcgaattgaataacagaagaatcgagctggataatctcttggtcaagaaagttctcgagcaagagcctgagatgcttccttgtcacgcctctgcttctccactctctcctcagctctcttctcttggaactcctcgaatcggaccttccattaaagtctgggatccttacaacgtcctcgcgccacctcctccttcttctccgcctcttttctctcgtatctcctccgccgcggaacacgatcgctccgccgtgacggaagtctatttcatcagccacggcgaggtgtgatctcaatctcaggcctgatctgatt

SEQ ID NO: 125769 - DNA, 508 bp, Arabidopsis thaliana columbia
  unsure (1)..(508): unsure at all n locations
atgattctccnnnnnnnnnnnnnnnnnnnnnnnnnnnnnnnnnnnnnnnnnnnnnnnnnnnnnnnnnnnnnnnnnnnnnnnccacgcgtccgcggacgcgtgggcggacgccgtgggttttttttctttntgttcaacgaatctctatctctctctagatttggggatttgctctcttcctcttgcttcttgggcctacttctgctccattgaaaggttgaatgaacgcgtggctaattgggtgagatacgaggagagtttgattccgcgcgattttcatggtgaaatgaattaccgattggggttcctgagctggagaattcggattctatcaaccctaaatcttcgatccatcatttatctgtgtcctgagccataccctgaggacaatctcaagtctcttgcatccaacaacattaagcttttccagttcgggattgaaggcaaaacggatcctccaactcctatgccaaaggatacagtgttgagtgctcttagagtactagtt

SEQ ID NO: 125770 - DNA, 320 bp, Arabidopsis thaliana columbia
  unsure (1)..(320): unsure at all n locations
atgatactccnnnnnnnnnnnnnnnnnnnnnnnnnnnnnnnnnnnnnnnnnnnnnnnnnnnnnnnnnnnnnnnnnnnnnnccacgcgtncgaaggatatgggcatcaatcctaaggtaaggggcacgaacttagccggtggtaccgccgctttgggaattcacttgggaacgcttttttttttttttttttttttctttaccaaccccaaaatcaaatctcaaaatttcccttttcttcccgaatttttcacaggttttgggggttttccaaaaatttttttagccttcccagaggggaagggcctccctcttggggggg

SEQ ID NO: 125771 - DNA, 532 bp, Arabidopsis thaliana columbia
cagctctatacgactcactatagggaagctggtacgcctgcaggtaccggtccggattcccggtcgaccacgcgtccggtcaagctctcatgatttcacaccatgctttcacttgaccagaattcgggcatgctatgggaccaaaacacgtgggaagttgcaaatgaccgaatggcatttcaaacgcttctcataacggacgaccttttcaggatttctgacgtgaaaacaaggaagaagtatgtgaatttggtggagtcggtaaaagtttcgggaggagatgcttttatattttcggcgatgcatgtgtcaggagaacaattggcacagctgactggatagcagctcttctcaggttccctttaccagaactcgaagacattgagatgtaaaaaaatcttcggcttatagaaaacaatacaacaaatcatacacatctctcataatttatagtttatttgtactcagtgtcataaaaagagatttgtaactcattacaaattataagataaccattcgttgctgttttgtt

SEQ ID NO: 125772 - DNA, 397 bp, Arabidopsis thaliana columbia
  unsure (1)..(397): unsure at all n locations
cagctctcatacgactcactataggaagctgtacgcctgcagtaccggtcccgtatttccggggtcgaccacgcgtncaggccttgcactctgttgttaacaaagactgtctggttatgctccactgtccaagttggcttgcttcaggtaatccaaaccgtttgctaaaaattttcggggggggcaattcccccaaatttttttttttttttaaaaaagccctttgggctttttaccttgtttttttaatccccccccccccaaaattttttaaaaacccccccttttaaaaggggttttctttgggggggaaaaatttttttttttttggaaaaaacaccccccccctggggggagaaaattttttttgccccccccccttaaaaaaaaaaaaaaa

SEQ ID NO: 125773 - DNA, 635 bp, Arabidopsis thaliana columbia
  unsure (1)..(635): unsure at all n locations
tacgactcactattagtggaaagctggtaccgcnctgcagggtacncgggtcccgnggaatttcccggggctaaggattctagggtgcggnctggtttagcccaacaaacngtanattcaccttggtgtnntcaccatttggtggttggtttggtcatttctttgtgtgtcccaattccttggttcccaatcattgaccaaagtttcctttcacgggagacaaaccgagcctggatgacacaatagaaggacctcttgtccaaaacgagattttctataaccagactgcaaacacctgatctaatctttgaagtgaagtggaaagatgaagaaagcccaaaaggatgtaggaatttggcttccctggccttcaacgagagaacataaagaagaatttgccgcattttgcaagcaccagctaattgcagggcaggtngcaggaagggggccggttccgggtggaatagacnggagaagggcccgcataagaaggggaaggattttcacttctaacgccagggcacttgggtgaaagnccgactttctgggctcatttttcttctcctttgcttgcttggttctgggttcggggttggacagttaattgacaattcttggtcagattgagtcagtct

SEQ ID NO: 125774 - DNA, 370 bp, Arabidopsis thaliana columbia
  unsure (1)..(370): unsure at all n locations
ccnnnnnnnnnnnnnnnnnnnnnnnnnnnnnnnnnnnnnnnnnnnnnnnnnnnnnnnnnnnnnnnnnnnnnnnnnccacgcgttcggttaagcctgaaggtagaatcttctccaccgaggacataaaactacgcatgccgttacatcgacctaccagacgctgttttaacgtagttaggaataggtcgagtactacttcttcttgactagtcctaagggccagcacacaatagtttttgttacactaagagcctgaattgaagcgaacatacgcatgttctgtggacgattactagccgtttacttgccacccggagagctttcgatcacgaagattggtacttgacaaaccgcgaagaactggttcaat

SEQ ID NO: 125775 - DNA, 464 bp, Arabidopsis thaliana columbia
  unsure (1)..(464): unsure at all n locations
tctccagctatctacgactcactatagggaagctgctcgcctgcagtaccgtccggattccgggtcgaccacgcgtccgcgagctcctgagctgnnaacgaaatcgtcttgtaaaagagaacagacccgtccagaaaccacggctgggaaaagtttgaaaaggggaaatgtttttctttggcttttttcaaccttagccctgcgaggctttgggttttaaaaagccaggcccccttggttaaaacccccggtatttttcccaaaggggtttgggttctaaaagtttgggaaaaaattattccccgtctaaattttggaaattttggggggggggggttttgttttttcccaaaaacatccacacggggggtttttgggggaatttttttggggcccccaaaattccccaaaaggggggaaaaaacccccaatttaaacaccccgccctctttttgggggggggg

SEQ ID NO: 125776 - DNA, 491 bp, Arabidopsis thaliana columbia
  unsure (1)..(491): unsure at all n locations
atgatactccagctatatacgactcactatagggaaaggtggtacgctgcaggcccgggccggaattcccgggcgacccaggggccggacgaatttttataaagggaacccattcgggggccagggggttttaccggaaaanggggggggccccttcccggaagaaaaccccttcctgggggccagagaaaaaaaaccncaaccccctcttctttatatncnccnnttttttgagttttttataagggggggggggggggaaaaaacactctttttttgcagaaaaaatatattacggggagggctccttttggttgggcgcggggggggggaggaacacaacccctatggaggggcagaaaagaggggggtgcccccaaaaaaaaaaatctgtgggggggggggggggccccccnacaaaaaaanaggaggggggggggcggcccccccccaggggagagggggggcgccccccaagagggggagggggg

SEQ ID NO: 125777 - DNA, 534 bp, Arabidopsis thaliana columbia
  unsure (1)..(534): unsure at all n locations
nnnnnnnnnnnnnnnnnnnnnnnnnnnnnnnnnnnnnnnnnnnnnnnnnnnnnnnnnnnnnnnnnnnnnnccacgcgtccgggagtgcatatgaggaaaaattcttaccaagatggagtgtatgggacgaattgtccaatcccaccaggcaagaattacacttatgactttcaagtcaaagatcaggtcggtagttacttctacttcccttccctcgccgtccaatattttgccggtggttatggcagcctccgtatatacagcctccctcgcatccccgtccctttccctgaacccgcagaagatttcaccttcctcgtaaacgattggtatcgacgtaaccatacgactttgaagaaaattttggatggaggacgcaagttaccgttaatgcctgatggggttatgatcaatggccagggagtaagtactgtttattctatcaccgtcgacaaaggtaaaacgtacagattcagagtatcaaatgtagggcttcaaacctccctgaatttagaaatattaggtcatcagctt

SEQ ID NO: 125778 - DNA, 388 bp, Arabidopsis thaliana columbia
cagctctcatacgactcactataggaagctgtacgcctgcagtcccgtccagatttccggtcgaccccgcgtccgccctttcccatttcgggaattttcttttaccttccggctgatttcccggaaaatcctctttatttaaccgccctaaaccctcccaaaaacaaggggttttttttgttgaaaacctttatttggggggaccctttggtttttcccattggggggaaccgggggggttaaaccccttttttgggttttttagagcaaactctttcttgagaaagaaaaaaaaaaaaccccccccaaaaaatttctaaaaaaaatttttttttttttttttttccccccgcgtttttttcccccccgcccaaaaaaagaacccccc

SEQ ID NO: 125779 - DNA, 361 bp, Arabidopsis thaliana columbia
cagcttatcatactaggagctgtccctgcagtccgtccgattccgttgcccaactcggaattggaacctaatggggccttactagggtttaatcacggtttacccaaaataaaggggggggccccccccttttgtgaaattggaaaaaagaaaacttttttttttgggtcccccaaaaaaaaaaaaaatttttgggggttttttccccccccttcacaagggggggtgttacccccccccccgggggggaaaaaaaggggggggagaaaaaaaatattttatttggggggggggggggggggtttttttttcttttttgtgggggggaaaccccaacacccccttttttttttggttgggg

SEQ ID NO: 125780 - DNA, 483 bp, Arabidopsis thaliana columbia
  unsure (1)..(483): unsure at all n locations
nnnnnnnnnnnnnnnnnnnnnnnnnnnnnnnnnnnnnnnnnnnnnnnnnnnnnnnnnnnnnnnnnnnnnnnccacgcgtccgatcgagaggcttacgatatacaatattgctgtggcgggaactgctgcgactcttttaggatccacgtattcatacaaggactcctcctaatggctgtattagagcatgttgcctaaaacatactctaatgcaaatactcagcattttatatgatatcgagccgacaaactaagaacaatgcactcggacgatatcgaactctaacagctttgatgataaattgacttccacattagaggacacttacattggtgccaggagaatgatgtgatgttccaatgtggaccctctatataacagaaaccccaacatcagacgacaaatgctgaacatagacttactactcattggtgctacacatgcacaaggattacagctctaatgaaacgatacacctaacg

SEQ ID NO: 125781 - DNA, 529 bp, Arabidopsis thaliana columbia
  unsure (1)..(529): unsure at all n locations
cagctctctacgactcactttanggaaagctggtacgcctgcaggtaccggtccggaattcccgggtcgacccacgcgtccgaaaaaccgagagttgcaattaatgcgactaatggaccatccaaatgtggtttccttgaagcattgtttcttctctacaacgactagagatgagctcttcctcaatctcgttatggagtatgtaccagagacattgtaccgggttttgaagcactatactagttcaaaccagcggatgcctatcttctatgtcaaactttacacataccaaatcttcagaggcttggcttatatccatactgctcctggtgtctgccacagagatgtgaaaccacaaaatcttttggttgatcccctcacccatcagtgtaagctctgtgattttggaagtgcaaaagtactggtgaaaggtgaagcaaacatatcatatatctgctctcggtattaccgagctccagaactcatctttggtgccacagagtatacatcatccattgatatatggtct

SEQ ID NO: 125782 - DNA, 518 bp, Arabidopsis thaliana columbia
  unsure (1)..(518): unsure at all n locations
nnnnnnnnnnnnnnnnnnnnnnnnnnnnnnnnnnnnnnnnnnnnnnnnnnnnnnnnnnnnnnnnnnnnnnccacgcgtgcgccagaaatgatatatgatgatgatgtacttgcgtgtgtttgtagatagatatttggtagagagacccatatatatggagtttggtctttataaaaaaaaaaaaaaaaaaaagggccggccgtttttgaggatcaagctttactccgcttggttgggagggtataattttttttttagggggccctataattaaattcaccgggcgcgggttttacacccgtgtggccggggaaaacccctggggttcccccacttattttgcgtttgtggaaaaattccccttttttgcagtggggggtttatatgaaaaggggccccacccatatgcccttctcaaacagttgggccacctttaaagggataggggaccgcccccctttccgggcttttattacggggggggtgtgggggtctccccccggtggaccctctctctt

SEQ ID NO: 125783 - DNA, 514 bp, Arabidopsis thaliana columbia
  unsure (1)..(514): unsure at all n locations
nnnnnnnnnnnnnnnnnnnnnnnnnnnnnnnnnnnnnnnnnnnnnnnnnnnnnnnnnnnnnnnnnnnnnnnnnnnctttttttttttttttttttttttttttttttttttttccaatcccaaaaaccaaatagaaattaggaaaaagtaataattagaccaaccattcaacagcaactgagaaaaaaaaaaaaatagaacattcagtacatgtagttaaaactaaataataaccactaaaaatctaataagccaatttctccaatatgcaggtcctttcttcttctttattgggggcccccatgaaaataaaagaagagagggaacccaaaactaaaagattttatcatcattcatcaatgaacaacaacttgttgatcatcgatgagcatcactgagctgtgatgatgaaccatgtgccaccttccattggggaactcgaacacattggttattaggaatggaccaccatccacgttcaggtatgcctttatggggacccaagccatgtttg

SEQ ID NO: 125784 - DNA, 510 bp, Arabidopsis thaliana columbia
  unsure (1)..(510): unsure at all n locations
nnnnnnnnnnnnnnnnnnnnnnnnnnnnnnnnnnnnnnnnnnnnnnnnnnnnnnnnnnnnnnnnnnnnnnnnnctttttttttttttttggagctaattttgagatgacattagtataatgatacaaggaattgtgttattgcaaaagcgtaaattaaaaattatagaagaaaaaacaatagaacgtggagcagtttgatcaaaatcttgaatttgctcaaactttagagaaaacaataaactcaaaaattcagattgagaaaccgattcattcaaaacggtttgatccggttacgatcctctggaagatgttgaaccaactgttcaaatactgcaatgcatcctacttgatgttgaaattcctagtctccgtgtggttcagattcatgagatatagagcgtgtgcactactaatattcccaacatgcgattaatcctcgtgttcatcatcgctttcagaatcggatctaacatcttcgctaagcttgcctcgatcttgcacttgtttca

SEQ ID NO: 125785 - DNA, 279 bp, Arabidopsis thaliana columbia
ctctatacctctaagagctgtccctgcagtacgtcgatcagtgaccacgtcgcagtgtttgcctgtaaccgaattttggttcaattaaaattggtaaatggtttgttaaacaaatttccggattttttaaaaatttttttggggtattggaaaagaattttttccccaaagggaattttaaattttttcctttggactaaaaaaaaaaattgttgaaaaaattagttgccccccacaaaaggggttttttttttttcccttttttttgaaccactcccc

SEQ ID NO: 125786 - DNA, 492 bp, Arabidopsis thaliana columbia
atgacgtcgcatggcacgcgtacgtagcttggatcctctagagcggccgcccttttttttttttttttttttttttttttttttttttttttttttttttttttttttttttgggaaggcaatttttatattcaatatgcttaaaaaattttttaaaaaaaaaattttttttaaacaagagtaaagagggggataggcaaactcccataaattttttggggcccaaaacgcttaaaccaggtagacccttaatggaagtaaaaaaaaattgcaaaactgatcacttgaaattgcattccattttgggcaatgtgatttttattttatttggtggggctgaaaatatataaccaggagaagaacttcaagatggctctgactcgaaaaacccggaatgcctttttgcttaaattggtcttcaaaaacactgagaaactgaaatcttatctggttgtagggaaacaaaaaaaaaatttttattgggagaaatgg

SEQ ID NO: 125787 - DNA, 544 bp, Arabidopsis thaliana columbia
  unsure (1)..(544): unsure at all n locations
ccnnnnnnnnnnnnnnnnnnnnnnnnnnnnnnnnnnnnnnnnnnnnnnnnnnnnnnnnnnnnnnnnnnnnnnccacgcgtccgcggacgcgtgggttggagagtagaagagatcttgattttggaaagtgcagagagttttccagggcttcctcggtccaccttgagaaaacttatgacccacctgtagagtttatgtcaagaattcttggaaccctttgcagggctgtgggaattcctgaaaccggattttcacgtttagtttctaccgnccaatgggttcttttatgccccttccttgattggttcttccttggaaagaaatggtttaatcttaactggnttaacttttggattanaaataagctggttgaaaatgccaggaggtgtaaattcattttaatcccaagtttgggggagaaaatctaaccctggacccttgatggcataagcagcttgtttaactttactcataaaactggtaaggtttgacagtctggtccccaagtcaggcttgggctgcattacttgtctaccttaaatct

SEQ ID NO: 125788 - DNA, 488 bp, Arabidopsis thaliana columbia
  unsure (1)..(488): unsure at all n locations
gccagctctaatacgactcacttatagggaagctggtacgcctgcaggtaccagtccagaaattccaggtcgacccacgcgtncgctacaatgagagactcttaggaatcactcannacatcgagaattggaccnggttagtttgtgtaggataagtcaagaatagcaagagagctttgggtgcaagtttcaagaggtatgtttccctgtaaactattgggtcatgcaaataaaagttagttaaaaatgggtggtttagaaatgggcccttaaaaagggttttaacccaaatcttaaaaccccccccccggaatttccttaaaactttccccgaaactctttaaaaggggggaaaaaaattgtaaaaaaatttctctttggggaaaaaaggaaggggtaaaaacacctctgggagactcctcttttttttttattggggaaaaagggtttttttccccaatttttgaaagggtgttttaaaaaggggg

SEQ ID NO: 125789 - DNA, 368 bp, Arabidopsis thaliana columbia
  unsure (1)..(368): unsure at all n locations
atgacgtcgcatgcacgcgtacgtaagcttggatcctctagagcggccgccctttntttttttttttttttttttttttttttttttttttttttttttttttttttttttnaaanggaccggacccattggattttgtaataaaaaaaatttagtttttaatttttttcaggaagatcaaattaaattttagacaacaaattaaatgaccttgggaatggttatttggtcgggtaaaaagggattattggttttccacatttcccaaatggatcattgatgttacgttggaggttaaagtaaccggtatcttcccaaattaacccccatgaattgggaatgatccaattattttcaccacttggggg

SEQ ID NO: 125790 - DNA, 527 bp, Arabidopsis thaliana columbia
  unsure (1)..(527): unsure at all n locations
cagctctatacgactcaccctagggaaagctggtacgcctgcaggtaccggtccggaattcccgggcctgcccacgcgtccgcccacgcgtccgatctcactgaaactagagagaaaaccaaatggcggctactccaatcagagttatagtctcagctcttgtgatcctctcggtattactactttctctgngggnggnnnnnccaccacaaaaccacaaatttgggcggggaccagacagagggggcgcgctgatggtccaaccatggctttgtggagaattcgaagaactatattggtcttgggagagaaagagaaacgaattaagatcttaaaagcaacttggagtttggcgataaacacatttctgttccgaaccgacctttggagtaggggtggccaggtcgctgatcaacaaatgaaaagttaagcgattttttaaagaagagatgggaagaactaagattcggggaaactggaaaaatttggccaaaaaagaaaaggtttggccggtgaagtgattggga

SEQ ID NO: 125791 - DNA, 522 bp, Arabidopsis thaliana columbia
  unsure (1)..(522): unsure at all n locations
gcaagcacgcgtacgtaagcttggaacctctaaagacgggctcgcctggggggttgggtttccaccaaaaccaaaacanaaaaacacgaggggacgcaacaccaccccgaagaaacaccgagcaccggacacgggcaaaagcccaaaacgcgcaatacccaacccccgagcggggagaacgaaacagaaacaacacacagaaaggctttattttgggggggggaaactcccaacaaaccaaaagagccaggaaaaaccagctcgaaaaaaacccacaatgagggcacaccccaaacaacaaagccccaaaagaccacccagaggggacggccccaggagcccgcggcagggggggcgtggctcacccacggaaacaacagaacggacacaaaccaccggggggaggacccgcaaaggacccgaaacggcacgcccattcccgcccagaccacaaaacccaaatagcattcccccgcccccacaccggggagaaggcccccgcccccaggtaaacccccgcgc

SEQ ID NO: 125792 - DNA, 503 bp, Arabidopsis thaliana columbia
  unsure (1)..(503): unsure at all n locations
cttgacgtcgcatgcacgcgtacgtaagcttggatcctctagagcggcctgccttttttttttttttttttttttttttttttttttttttttttttttttttttttttttttttttttttttttttnaaaagagggtttcctttcaattaaagaaaatttttttaaaaggcccttttgttttttaagaagaaaagtttaaaaactttacttttttcaagggggaaaggcccaaatgtttcccccgggttttaaaaaaagaaagcccctttgttttaaaataaaaaaccagtaaagccccctgaaaatggtgggtaatgaaaactccccccatgtggactttggaaccaaagtttttttaggcnnaaaggggaaggtaaaaaaaattcaaagattagtcctttcagggggaattaaaatttttaagggacaaatttttgggaaaacagctttttttgatacaaaagagggggaaaagggcaatggggtttcatttgccaggga

SEQ ID NO: 125793 - DNA, 641 bp, Arabidopsis thaliana columbia
ctctagcttttaaagcgaaaatcaatatcggcgcaaagcatgcccactccatgtagggcccttggtcctccaatccctgcattgtactccaaccccactgatatatgaattgtcctacatccaataaacacgaatactctaccataagcgaaagaccatacctacaattgaggccctcttaggcaaccatttcaccaacttcacaaaagcccaaagaattcattacgaaatctttcgctcccctcacccctccctctccgtaatataacttttaccacactccaccagtcaaacctcaaccaccttcacaacacatcatacttataaccccgcactcccacactcctcacccctctcacaccccacccatctactacccccgtaactaatacaccagccaccaactactatacacctcaaatcacaactctctatcctacacctctctttgtgctcttctatacccacctcaacatcatcaaccataccactaattaacaaatgcactccgaccatcataacaatccaccaaaatttcagacatacatacacatatcaaataaaacacccttctctctacatcccatacaaactcgctaactcaatacaaatctcccacctctaatataatctccactcac

SEQ ID NO: 125794 - DNA, 416 bp, Arabidopsis thaliana columbia
ctgtccctgcagtccgtccgattcagtggaccagcttcgtcccgcgtcgaaagagttagaaaattgggatgggagggtttaaattttcaatttttggggttttaaactaaaaagggtttttttttctttttttttttaaacccccttttttttgggggttttttgggaaaaacacatttttttggatttttttaaaccccctttggttttttgaaaaaactctcttcctccccaaaaaaaaaatttttaaccctcttttttttttttttttttatttttaaaaaaaaaaaaaaaatttttttctttttggggggtccccccccgcgggggagaaaaaaaaaaaaaaaaaaaaattttttttttttttgaggaaaaacaatttcctccggccgcaaaaaaaaattggtgggggaaat

SEQ ID NO: 125795 - DNA, 482 bp, Arabidopsis thaliana columbia
actatgacgtcgcatgcacgcgtacgtaagcttggatcctctagagcggccgccctttttttttttttttttttttttttttttttttttttttttttttttttttttttggggagttttttccccatagataaaaaaattttttagattttagacccaaatggtttaacttttaacacaaacttggggaacagcttgaaagacaaaattaaagagaccgtggtccacaaaaaacaaaaaacaactttggtcccacttccacattatttttattcacttttatcatatttttcttttaataagacactttttttttttttttttcctctccagggggcttggggggaaaacctggaagcttttttttgatcttgtccataaatccctttttttcctccgggaagtgaagaatcggggtttgtgttttaaccacgggtgtggggttgaccaattgggaaacctctgggttttttgtgggggct

SEQ ID NO: 125796 - DNA, 513 bp, Arabidopsis thaliana columbia
  unsure (1)..(513): unsure at all n locations
ctccgctctcgctcgttctaccggtttttccctgcttcttcccctttggcctgcccccctagtattcgccgcctctattcgactcacttagggaaggttggtccgcctggcgggtccgggcccggaattcccgggccgnnnnnntttgtgtcccaccaaccccgaatttaggtttgggtttttttcccgccccccggacttttttttattaaaccccgaattttccccctttttttgggggggggggggaaaaaacccttccggggggttttaccccccccctttttgggngagggtcccccgggctccggntttttttttccggggggggtttgcccccccccccggggttcccccccccccncgtgtcccccccccccccggggggcccccttttttttttaagaccccccccagagggctccaaaaagaaacgctccgcgggggtgtctttttttattttatcccccccgggggggggggggnccnaaaaataaattaatttgtaggggg

SEQ ID NO: 125797 - DNA, 539 bp, Arabidopsis thaliana columbia
  unsure (1)..(539): unsure at all n locations
ctagtatatgccnnnnnnnnnnnnnnnnnnnnnnnnnnnnnnnnnnnnnnnnnnnnnnnnnnnnnnnnnnnnnnnnnnnnnnncacgcgttcggcaatttcagaagaaaactgagagagtcgctcgagaagagaacgagcaaagcttttcaatccatgtttattctcttgtatggcgcctactttatttactcgctatgttcgtaactatcccatgccgttcttnagataannannntttgtgttgcgcaacaacacaccaaaccccttttgggggtttaagtttttttgtctcgccccccccaaaatcttttttttaatttacacggaaaacttttcaactctttttttaaggggggggggaaaaaaaaacccttcggggtggttcccccccccccctgggcccaagggggtttcccccccggggtttccccccgggaaatattattccccccggggggttttttttttaaccccccccccaccccgcggggcgtgttttctctctgaataaaaaaaaaaaaagagggaggggccccc

SEQ ID NO: 125798 - DNA, 491 bp, Arabidopsis thaliana columbia
ctatgacgtcgcatgcacgcgtacgtaagcttggatcctctagagcggccgcccttttttttttttttttttttttatttttttttttttttttttttttttttttttggtaaaaaaaatgtttttttttttaagaatgttttttggggaaaaaaaagggttaaacagggaaaaagggacccaaccgggtcttttttttcaaaaattctgaaaaaccatcaattggcccaaagtttgggctttgccgtttccccagcgattgacccaaaaaacaggttgaaaaaaaaaccctttgggttcaatccccaaaaaggacccttaaaaaaaaaaaaagaaaaaaccccttaattgggtttttaaaaaagggaaaaaattttttttataaaaggtatagaagcgttttttttatttggctttttaaaaaaccgaaaaaggggggttaaccaaattaccattctattccaaattaaaacttcctttccttttttacc

SEQ ID NO: 125799 - DNA, 399 bp, Arabidopsis thaliana columbia
  unsure (1)..(399): unsure at all n locations
gacgncgcatgcacgcgtacgtaagcttggatcctctagagcggctcccttggggttttatttccacgaacacccaccgaattaccacnaaggcgccgacctcggaagaaaagaaagacccgcctgaaatgggggcttccaagggcccaaaaagcacgccttcgcctttttaagaatattaaaaacgaccccccacacacgctgctcttttttcgggtggttgccccataagagccaacaacagccaccccttttcggcccctattgatgtcataatagacaaagcgccctctctctaatccattcccatggtgccgccccccttatttatgcgcccctggcccctcctttggtgaaccggcgtggacccttccccgcgtataatattcccccttccgt

SEQ ID NO: 125800 - DNA, 366 bp, Arabidopsis thaliana columbia
gggaagctggctccccctgaagtacccggtccggaattcccaggtttaaccaagcgttccaacacttacttgtaaccaccgcgcaaaaactgggaaggttacttgaagtttacctctgatgtaaaatatataatagattagcaagctaaacagctacctatgtgtatcctcaatgcgttgaagaggagagaaaagaggtcacggctcaatgggagattgtctgtgtagcggagtgtcctagcacctataccctttacataattgaagataataaactggatgtcatgtatagaaaaagaaaaagcgccaactcttaactatgatgacaatgtgccataacagaagtatgcctatgttttattacaa

SEQ ID NO: 125801 - DNA, 493 bp, Arabidopsis thaliana columbia
atgacgtcgcatgcacgcgtacgtaagcttggatcctctagagcggccgccctttttttttttttttgggaaaaattgattggattttgggtgaaccaaagataagaaatccaaatgactcctgccacctattatactattccttggatctaatactcagattctattggctacaatctcattcacaccaatcttaaatggttaccggtgtaatgcaaaaagatgagtggctattccaccacttaaaccattgtctccatcaatcctttttctgaagtaggaaactcgggtgagatctgccattctccatccactaagaacttaatctcgtaccgcccgggacgaaggaataacgttgtggagaatttggtgaataaagctgagtactcaggcgatagatcctcacgttggctccatccatcgaacgatcccattacttgtacactctctgccatgccaatccagaacacatgaacctcctttgactgtgcag

SEQ ID NO: 125802 - DNA, 482 bp, Arabidopsis thaliana columbia
gacgtcgcatgcacgcgtacgtaagcttggatcctctagagcggccgcccttttttttttttttttttttttttttttttttataatatgttcaacttttttatttttttttttcttttaaaggaaatttcccaggttgagccaatgaggtaaaagacgtttcattttgacatttttttgcaaaagaccaatagacaaaaccccacaaggttaaaaaaataaaaaataattgagacacttgtttacatttgacaacgactttggtccttttttacaaataatattcatttccaagcttgtaggaactgaaatgttccaccttgaaagtccactcgcctttcacaggatcataagacacaaactgagcttcttgttccccaatttttcttttgagcattttcttggacttggccaattttttgccttccattaattgggtgccggtctttttggccatacattttattgttagcaaagttacc

SEQ ID NO: 125803 - DNA, 494 bp, Arabidopsis thaliana columbia
  unsure (1)..(494): unsure at all n locations
ctatgacgtcgcatgcacgcgtacgtaagcttggatcctctagagcggccgccctttttttttttttttttaaaccaattcttaatcttctgtaagtgaagaataattacacattaataagtaatcatatcacaaacacatacaatcaaccctaaacagaggtgatcaccagatannnnnnccngcnaggaaattccaatatgtgagtggccctaaggattatgatctcctggaagaaaacgtggaagataaggtatccaagtgaccggatttttccaatcgaaagccggcaatgccagattcgggtttccgaaaggtaaagaagggaaagggaaagacggaaaaggcggtagagttggcaatggaggtagatccggatatggccaagggaaccaatacggtgccaaataaggccagaagaatttcgaatctctaaacttcttctccaccttctcggccctttggggatgtttcttccctccgtttccacacaa

SEQ ID NO: 125804 - DNA, 529 bp, Arabidopsis thaliana columbia
  unsure (1)..(529): unsure at all n locations
acgtcgcatgcacgcgtacgtaagcttggatcctctagagcggctcttcctttgtttttttttcctttttaattnnataaaaaatttgtaataaatttttttttgngggaaccaaacatcccatacttattgcttatgctctgtttactgagttcaccggggatacctcnnnnnnnnnnnggtttttgttttttcccaaaacctcctttttttttttttttttgtttgggggaaaaaaaaaaaaaacaaaaaccccattgtgttttttttttcaaaaaaaaaggaggagagggggttttttttgtcccccttagaccccctttttaaaagttcctagggaaaaaacacgtttttttggggttttaccccccaaatttggtttttttttttttgcggtcctttgggcccatcccttcttaatggatattgctctccccccaacacgtacctgcaaatatttcccttttgtttgtcccacgcccaatattttttggagggcccccggcctctccatttatcttccctgccc

SEQ ID NO: 125805 - DNA, 481 bp, Arabidopsis thaliana columbia
  unsure (1)..(481): unsure at all n locations
acgtcgcatcgcacgcctacgtaagcttggatcctctagagcggtctccctggggttttttttcccaaaacaaacacccttttctcgccnctatgaacgcctcaatctatgaaaaaagcccttgccttgttgctttgggatcacaaaacccaaatgcggacagccaataaagagaccgacggaaccaaaaccccaaaaccaccttattttttttgggggggggnaccacccccaagcacagggcttaggcaaatccagcaaaaacaaaactaagaaggcctactctagcaaccaacgtagcggcccaggtgaaaatctcaggccaccccatacggcgaagggccccccccacgaggtagaccctccaagcctccaaccccgccgcagccccgttaaaacccgaccacctcccccttccccccaccgcttatcatcccgactcctgtcccgccccacccctggttttgtcccccgcccattt

SEQ ID NO: 125806 - DNA, 163 bp, Arabidopsis thaliana columbia
gccccccgcaggacccggtcggaatttccgggtttatccaccccgtccactccttctgcttgtttatatccacaaaacggagcctccgcgttaaaggatagacgaagaaacctttcgatttcatctacatcactatactcgatgcatataattcagtcgctga

SEQ ID NO: 125807 - DNA, 288 bp, Arabidopsis thaliana columbia
ctatgacgtcgcatggcacgcgtacgtagcttggatcctctagagcggccgccctttttttttttttttttttttttttgtttttaatgtttttatcatttttttttttgttgtgtcttggagcggggaaaaccggggactacataagtttcataacttttcataacaaaagggttaaagctattttgttctttcattttaagaaagatccaaattttgggggtttccatgctgcaaacttctcaaaaaaaatggcgaaaaaggttccaaaaggttttgatttttaac

SEQ ID NO: 125808 - DNA, 484 bp, Arabidopsis thaliana columbia
  unsure (1)..(484): unsure at all n locations
nnnnnnnnnnnnnnnnnnnnnnnnnnnnnnnnnnnnnnnnnnnnnnnnnnnnnnnnnnnnnnnnnnnnnctttntttttttttttttttttttnaaaatataaaggtcgtgaccacaccttttcagaatgagtaaagttgaaatttatattacaatcttcagaaagaagattcttcctaaacattttagggtcaaatttatagacttcacttattaggagaataaaactagaaatgaaggtattgatgaagcccacgccagaaaaaagaaaggaacattttttcatacatgtttatatatggtacggtatatgatcttcttcttcctcgcctgatctctttccatcatcagctcttttgttacacattcattaatgcgtacgtacaaagataaaccataatcatacccccgctatatatctatacccatatatatacgtataagngtatatatgtgtgtatatattataaggctttagtaatag

SEQ ID NO: 125809 - DNA, 491 bp, Arabidopsis thaliana columbia
  unsure (1)..(491): unsure at all n locations
nnnnnnnnnnnnnnnnnnnnnnnnnnnnnnnnnnnnnnnnnnnnnnnnnnnnnnnnnnnnnnnnnnnnnctttttttttttttttacgggagactgctttcttttattttcagaaaatgtacatttgatatcttacaagttacaacaaacacattccttacatagttatgtttgattctcgggttcggtttagtcttcatggtcccatagatcagccacactacggaatggaccttcggtcttgttgacgaaaagatcctcaccgtctatcactcgtttctggtcagtgatgctgttgagagcttggaagtcttgttcagggatcacccaatcaaacactttgatgttctctttgatcctctctggattcaatgacttagggatgacacttgttcctctctgcaaaccccatttcactagaatctgtcccggtgtcttattcagcttcttcggtatcctatccaccgtctgatcgtgtatcagatctctcc

SEQ ID NO: 125810 - DNA, 523 bp, Arabidopsis thaliana columbia
  unsure (1)..(523): unsure at all n locations
nnnnnnnnnnnnnnnnnnnnnnnnnnnnnnnnnnnnnnnnnnnnnnnnnnnnnnnnnnnnnnnnnnnnnnnnnnctttttttttttttttgtccacctaaaataggtgtatacctctggactataatggagcagagaaaactggctaaatctcagaaacacgacaactagagaccaaaaaggtacaacacaaacgggggtcaagctgcacctatagtgcatcatgggagtgcaagcgtccaactacctatccgaataacaaaaagccgctgaaccaagggagatgagatgattctctggtccacaagaagctttatattgttgacctgacgaaacccacttataagatcatgcacacactgacgaccgttgacggtacatgccaccactggcatgtgctagatagagcttgggcttgcttcttcgtccatatgccacaattacaaacgctgtacctacatgtggtgtcaccagcagacggtccattctccgctgaactactatgaactatatcggatactgca

SEQ ID NO: 125811 - DNA, 492 bp, Arabidopsis thaliana columbia
atgacgtcgcatgcacgcgtacgtaagcttggatcctctagagcggccgccctttttttttttttttttttttttttttttttttttttttttttttttgtggggaatttttaggggagggaaaaaataggggtttaaacataaaaattttttaaacatcaacaatggcttaaaatctccaaagccctttatttggggagaaccctaaattcttttttttttaaaaaaaaatgttttattttttaaaacctctggctaaaccctaagccaggattggccccaagttttctttccttccaattataacccttttgcaaaaaaccctttggttgacccatcggaaccattcgcccaaggttttaaaccttaaaaaatgtgaaaggccccggtttttttaaccaccccttttttttaccctttctttggaaggcccccttttttgtggacccaaacctttttggcgcaaccattttttggggccccccccccggg

SEQ ID NO: 125812 - DNA, 249 bp, Arabidopsis thaliana columbia
  unsure (1)..(249): unsure at all n locations
tgagtttccactctacactctaggagctgtcctgagtcgtcgattcgtgacactcggtttgtggacgtacccccgaccatgggtgggtttccttaaaatttttaattcccaaactacagtnnttcgggggaaatacaaaatggttttaaacttttttttttttaaaaaaagggggaaaaaaaaatttttttttaaacgggggggggtttttttttttaaaacccccctcccaaaagaaaaaaagccctt

SEQ ID NO: 125813 - DNA, 255 bp, Arabidopsis thaliana columbia
gatcgcagcttatacactattaggagctgtccctgcagtcgtcgatccgtcgcacgcgcagtatacctactaaatatgagactgggagtgtcctggcagggctgacaacaagttaaggacgtccctaatcgaaaggccccgttaagggggggaaaaccggggaattccccggttgaaaaaccgttaatttccaaaattttttcgcggcaaaaccctttttaaaaattttaaaaaaactttttttttttaaaaaaa

SEQ ID NO: 125814 - DNA, 243 bp, Arabidopsis thaliana columbia
ctatgacgtcgcatgcacgcgtacgtaagcttggatcctctagagcggccgccctttttttttttttttggttggaatggattcaacttctctttttggttcaatggcaagaaaaatctttgggttatttcgaaggttcctctcatggtatacatataggggacatagcttatagcttgaggttgctcaaaatggacccgtcgaccggatattgatatgcctcgaaattgaattgcctgccta

SEQ ID NO: 125815 - DNA, 456 bp, Arabidopsis thaliana columbia
  unsure (1)..(456): unsure at all n locations
cctcacagctccgattagggagcccgggccttgcggtcgcaccgaatacgtgaaaaccatccatagcgggagcagaaaacggcaagtataggggtgcaagaggacatatccgcgagtggtttaaaacagaactttcgatttagacgtagatttataacggcataaatcggagtttgaatagtgtgccccaagacgcatactatataccccaaaaantttttttccaacccccctgggaattgtggccaaatncttatagcgactcatctttagggggaaaagctgggggccccccccggcagggtccccggggttcccgcgggaaaaatttttccccgggggggtttggggaaccccaaaaggcggttcccggccccaacccgggtacaaaaataaaaatttttttttacaaaaaaaaggaattcttttggggggaaacccctttattttggtggg

SEQ ID NO: 125816 - DNA, 483 bp, Arabidopsis thaliana columbia
  unsure (1)..(483): unsure at all n locations
tttncaaaaattttnggggtccaagggggcccaaccaaagctgggacccccaaaaggggttgcccgggcggtcaaaccccccaaaagaaacccaaacgccgacccccaggagccgacaaacccacccggggggccccggccccccgcgacccgaggaaagccccgggaacaaaagagcagaccgccccgcgccacggaaagagggggacagcgaggacaccgacatcccggaagatttttcgggcgggggagacccaaaaaaccccaaccgcggacccacagacccccacccgcaaaccgcgaacaaaacaacccccccacagacacccaaagccccaggaaacgagcccgagggcaggccccccacgccccaccgacgcacgccgaagaaggcaccccccccccgcaggaagaacaccagcgcacccacgacaccgccgcgagacgcgaccacaccagagcaacaccacacaacccgacccc

SEQ ID NO: 125817 - DNA, 538 bp, Arabidopsis thaliana columbia
ggaaagcggccccccccgcaggacccggcccggaattccaggtttaaccaaggggcccaagcaacgcccaacgagcgctacaataacgaacggcggcggaccatggacccgcaactctcgcaggcaacgagctgacaaaccccacgacacataacgtcagaccgctagcagggaggacgatccccgtacgaacacaatagttggagagcactaaagaccttagcctggaggagcaaaaggggttcgacgcacgacacgcccaccactaagcaacaccgaacaggcccaccggacatcggcacccacacgcccacccgccccgggtgctaagcgcggtgcaccggcacaacaccaaacaacccacccatagcgccagacgatatagcaggatgggagtcacggaccccacaacccacactagcaccactcttcgaccaaggtgtacaaaccgccctcgagcgacacactcccagctctcacgagacctggcctcaccaacaacatacatcagaaaatacgcgacacaccacgaccccaa

SEQ ID NO: 125818 - DNA, 499 bp, Arabidopsis thaliana columbia
ctatgacgtcgcatgcacgcgtacgtaagcttggatcctctagagcggccgccctttttttttttttttatatcgtctacgaaggttcaataaagatctactatagctttatcttacttgtacaatactttgccatgagcttctgtgttattgtaaaactaaccttaattcacacattggcgcgaggaagataacacggctgagattattatgagagctttctataattgacaaatctgtaaaaacttctgaatcatgctgaaagtgtaaggcgaaaggctcacccgatgatgatggtgattacttgagcagcggaagagtctcccgtgctttgttgccggagccattgtcccatgacatttgctcgtcacctcctataaccagaaacgtactctttcccacctggctagccaaagtctggctctctgctctcagcaagacctccgttatttgaagggacttcactaaccccatcatgagcatcagtcttcctagcttt

SEQ ID NO: 125819 - DNA, 255 bp, Arabidopsis thaliana columbia
agagctgtcctgagtcgtcgatccgtgacacgcgtcatggaaatgggtcgaacttagggtcggaacttaaatttgggtccaaaccttgggaataacctttttgaaaaacggtttttgccaaaattcaaaaaggggggggaaaattttttccccttttgaaaaaaaaattttttttttgggggaaaaaaaagggggggaaaaaaaatttggggggggttttttttttttaaaaaaaaaaatggggcccccaaaaaa

SEQ ID NO: 125820 - DNA, 499 bp, Arabidopsis thaliana columbia
atataaaaaaactatgacgtcgcatgcacgcctacctaagcttggatcctttagagcgggcggccttttttttttttttttccggaaaccggtttcttttattttcagaaaatggtcctttggtatcctaccaggtaccaccaacccctttcttaacttggtatggttgaatcctggggtccggttagtttttatgggcccataaaacaggcacccttccggatggaccctggggcctggtgaccaaaagaaccctaaccgttattaattccttgttggccagggatgctgtggaaacctggaaagcctggtcaaggaatcccccaatcaaaaacttgaaggttcttttggaccctcctgggattcaaggcctaagggatgacccttgttccctcttggaaacccaattcaattcaatttggcccgggggccttattagctttcttggttatctatccaccgtgtgatcgggtttaaaatctttcccgcttttttgaaa

SEQ ID NO: 125821 - DNA, 503 bp, Arabidopsis thaliana columbia
  unsure (1)..(503): unsure at all n locations
gactcactattagggaagctggtacgcctgcaggtaccggtccggaattcccgggtcgacccacgcgtncgaggacgcgttcagccacgcgttcggggtcacagtttcacagacacgcggctccttgatggttggcttccgccgacagccggcgtgtgtatgttccttccatacggaattctgcccgttagcgtttgattattttggctgactagggctttttcagtggataagaaacgagacgaggctcgattcaccggagagtcaaagaggcaaggaggagaaagcccatggcacatgccaagtttaccttggaagggcaaaatatggaatgcacttcacttttaagtgggcccaaaatcccaaccgttggaactcggctcgtggcgatttgggttctaagcccgccccccccgttggacttgaattcgtgaggggcgccttttgcgcctttgtacagctttggggtgtggtgattagatggaggtcgggccaaggaacaa

SEQ ID NO: 125822 - DNA, 422 bp, Arabidopsis thaliana columbia
  unsure (1)..(422): unsure at all n locations
gggccccctaaggccgattttcccccgggaaccggaatattcaccggggtgtcgccccctcagcctgccntcggcgggagagactatagatatccctccgcatcatcccctccccctttatataaagcaacgttatctcccaactaaaagtgattctacccaccgccacatacaatctcccgcggataagaaaatatttaaaattttgttccaacaaccccctgggtaggtttttcgccccaaacctcttttaaaacccccctccccctctaggggaaaaacctggggtcccccccccccaggggccccgggcccccgaaattttcccggggggccccccccccccccccccaaaaaaaaaaaacaaaatgggggaaaaaaggagattggcgaaaaaccccccccggggggggggccccccc

SEQ ID NO: 125823 - DNA, 490 bp, Arabidopsis thaliana columbia
  unsure (1)..(490): unsure at all n locations
actatgacgtcgcatgcacgcgtacgtaagcttggatcctctagagcggccgccctttnttttttttttttttttttttttttttttttttttaaaccgcaacatgaatgtattgtaaaacgtttttgctccaaaatactacaattaccagatgatagtaataataaatatcttaaaagcaaaactgagactacaagagacaaaaccacaatagtctttataactgcagagatagatagacttagatgatgccgatcttgttagcaacatccaaagcatcatagtctggtgtaagcctcacgtaagccttcttggttccatcaggcctgatgagtgtgttcactttcttggtctggatgtcatacatcttcttaacagcatccttaatcttcttcttgtcagcacgaatgtcaacaatgaaaacaagagtggtggtggcttcaatcttcttcatcgcagattcagtggtgagtgggtacttaaggatttg

SEQ ID NO: 125824 - DNA, 446 bp, Arabidopsis thaliana columbia
  unsure (1)..(446): unsure at all n locations
tctatacgactcactatagggaaaagctgtacgcctgcaggtaccggtccagaatcccaggtcgaccacgcgtncgcagacgcgtgggtccagatntcgtgtgtaagaatcattcaagcatgtctcngctaaagttgtactacaaaaagctgatctaaagccaaggccttaaagcagaaaagctgtgaatcttgtcaagcctctaaaaaaagggcaaaagggttgggcccgggccccctttcaaggccaaaagcttttacccaagccttaaaatggggagtccccacaaatcgcgcctccctaaagaaacaattgggtcccctcccaaaccttctaatccccctccccccctgatattgcgaaaaaaaaattagaaaaaccccccccttgttttctttttggacaatttggcggccaaaaaaaaaaaataagggcgctttaaaaaa

SEQ ID NO: 125825 - DNA, 512 bp, Arabidopsis thaliana columbia
  unsure (1)..(512): unsure at all n locations
nnnnnnnnnnnnnnnnnnnnnnnnnnnnnnnnnnnnnnnnnnnnnnnnnnnnnnnnnnnnnnnnnnnnnnnnnnctttttttttttttttagcgtgcaaaaatatatggattgaagattttgagatagatgtgatgtgaaccatagtattatacatgaaagaaaatttaaaaaagttaactatcgagattccgaggaagatgtcaccggagatgtccttggaaccggcacgggaaactcatgaatctcatcaatccaaggattagtcttcttcttcttctccttggacggatcgatagttctcaaagctctccaaaccgcactattacacttaaaaccggatccaaaagcaatctgccaagtcctatctcctctcttaatccttcctttagcctcactatacgcaagctcataccaaagcgagctactcgaagtatttccaaaccggttcaaagtcatcctcgaaggttccatatgccactcagataaatccaaattcttctcaatctcatt

SEQ ID NO: 125826 - DNA, 427 bp, Arabidopsis thaliana columbia
  unsure (1)..(427): unsure at all n locations
actatgacgtcgcatgcacgcgtacgtaagcttggatcctctagagcggccgccctttntttttttttttttttttttttttttttttttgggggaaggaaaggtgaaattagatccaaaaggtaaccaaccttttggccatcaggggcaacttatccttaaagagtgaaaagaaaggttttaagaagatttgaaggctaaaaaccttgatggaaaccataatggggaagccttttcatatcgaaagatcccactggcggggagggaggatattggatttcttattggttggcaaagccatcggataaatagacctgttgatttgggacgtcccccaggtcttctaccatttttctaaggccatagggggggaaggcctgctggaaaaatataacgggctaaaaaacttttttactgtccggccaaa

SEQ ID NO: 125827 - DNA, 520 bp, Arabidopsis thaliana columbia
  unsure (1)..(520): unsure at all n locations
nnnnnnnnnnnnnnnnnnnnnnnnnnnnnnnnnnnnnnnnnnnnnnnnnnnnnnnnnnnnnnnnnnnnnnnnnnnctttttttttttttttcaaacgaatatgaccttatcattaaagctcatctgaatttgatgaatactaaaaagagagccaaccaaaaagcttggtgtaggaactgagtagctttctcaaagtaatctaagaaagaacaaaaatgttagattttcatcaaaccaattgggatatttgaagaaaagaaaataccttcgcactggtagatgggggtcctgcggtgccgcccaatggttggggacctaaaccatgtttgggaacctttggatttaattctggacccttggaagccaattccagtgatcttgcatagggagcattcttcggttgcttctccaaagcttggtgaaaaagcaaaataactttctcaaagggatctctagcctcagtttgatcaggagtcaaaccccatatgaagtatgagcatncccatgcccaaagagcatt

SEQ ID NO: 125828 - DNA, 374 bp, Arabidopsis thaliana columbia
  unsure (1)..(374): unsure at all n locations
atttgccacttatacgactattaggaagctgtcgcctgcagtccggtcgattccggtgaccagcgtcggaacccccatattgggaacaaccgttaggaactaagtgaaaacgtaacttcggccctggggtgggtttaaaacctttttggggaaaaaatttaatttttttcccgttttttttaaacccccggggttttagatttttttgggggttttttttgagaaagccccccacttggcccttccaaaaaaaaaaaaaaaaaactttttgggattttttttttggcccccgggggggggttttttttttttttntttngggagggaacacacacccccgcggggggggnnnnntttttttttttctctttttt

SEQ ID NO: 125829 - DNA, 492 bp, Arabidopsis thaliana columbia
  unsure (1)..(492): unsure at all n locations
agacttatatagggaagctggtctgctgaggtatggtacggattatgggtcgaacagtggtgggaggggaaaaaagaaaannntttttgtgtggaaaaaaaaaaaaaaaanattttttttggggggttttttaggggttttttttttttttcggccagactttattaaaggattaatttttagggggaaaattttggggttaccccctttggaaggaggtacccgggggcccgggataatttttccggggggtttggacacacacaaggggttttggggccacacaggggtttgtgggttttttaaaaaaaaaaaaaaaaaaaaaaggggggggggtttttcacaagggggggaaattttgtttttttttttttaagaaaaaattttttttttgtggggggggaaaaaaaaatttcggtggttttaaaaaggggtgtgtataaaaaaattttttttttttggggggggggaagaaaaaatattttttttttt

SEQ ID NO: 125830 - DNA, 439 bp, Arabidopsis thaliana columbia
ctatgacgtcgcatgcacgcgtacgtaagcttggatcctctagagcggccgcccttttttttttttttttttttttttttttttgaaacacattgtttttttaccaaaaaaccacccctatttttaatatacgacattatcaacccccaacttccaaaattttgggagggaaaattcaattaatttcaatcgtattttacatcaaagagggtaataaaaaaatagttaactcattgaatttaatctcacggctcggttgaagcacctgattttggttgggattggctatctttctgtgccttatcagccaccaatggtccatttccaccggatctgcgagctcccgtgagttctttatcatttgttcccatggaaagaaaatgtatctttttttcaattgaaagtgttctctttgagccttcaagtgcaacacccatta

SEQ ID NO: 125831 - DNA, 466 bp, Arabidopsis thaliana columbia
  unsure (1)..(466): unsure at all n locations
gctggagatactccactctatcgactcacttaggaagctggtacgcctgcagtaccggtccggaatcccaggtcgaccacgcgtncggtggagagtgcagaaggagtaccccatgccttcattaggatcatcgggattcgacacacccgcaagtncagtgcatcagtttcattgcctacnagccaccagcttnaccggtttattncccttgctttggggtaaacctaaaaccttatcccccttcttgatttaatccctgggttttcaggtttttcttttttttttgggtttaaatttccggacttaaagtttgttttccggtttggaaacaatttttttgggatttcaaagtgggggagaaaaaaaaatgggggggggtctttaaaaaaaaaaaaaagggggggccccttttaggaagaaaaattttaattcccggggggggacacacttatttttttttttttgg

SEQ ID NO: 125832 - DNA, 500 bp, Arabidopsis thaliana columbia
  unsure (1)..(500): unsure at all n locations
nnnnnnnnnnnnnnnnnnnnnnnnnnnnnnnnnnnnnnnnnnnnnnnnnnnnnnnnnnnnnnnnnnnnnctttttttttttttttttttttgctgttcatttttcaactgcacaagctcaacacctgtgacagaggggtccatatatctagaaaaatgatcaggagaaacatttgagagatcttcagactgagaagcctcttctgcagcactagatctgatagtagtctttatccttgacattacagcagcttcaatcctctcatttatgaaccgaggattggctaggtttaggactggtcggatcacacagcaagcaaaaagctccctcacggtatagtggaaaaaagcacagtgcagatcctctggcctaaatgttactaaaatgagactgttcactatatgttgcagaaccttatgctcggattcaggagagaacaaagcagggtgcaatttatcttcactggccatcacacgtcttagttctgagtctctgtcttc

SEQ ID NO: 125833 - DNA, 482 bp, Arabidopsis thaliana columbia
ctatgacgtcgcatgcacgcgtacgtaagcttggatcctctagagcggccgccctttttttttttttttgtttgcaaggaacaaaatcattccggacgctatccggatgactcacaagttgattcacacttctgatcgcgtccttcttaacactcagaaccaccccagatgtttccctgggaaaaacaattcaggcgaatcataaactgtcttcaacggaatgagaaggatacactctccctgctactattcagaagagggctggcataaaagcactctccatgctgacggaaatccatatgtgcatgagataagaggaacttatgcgtcgcacgctaatggacagcacggttctttagcctcagcttgagcggggcaagtttgttgaactaaaccacagcccatgctctgctgacgtaaatcggaccctagggggactcggatatctgtaccgtctcttgtgcgtgtaccaggattgctta

SEQ ID NO: 125834 - DNA, 303 bp, Arabidopsis thaliana columbia
tgatatccagctctatacactcataagagctgtcctgagtcgtcgatcagtgacactcgcttgtgtgatgggtggactaaggattttcccttaggtaaattggcccgaagaaacttggccccccgggcctgggcctcagggatttttttacccccccggattttttgggaattttttttggggaaattttttcgccctttttttttttttttgggggaaaaatttttaaaaaaaagggggggttgccccctttttttaaaaaaatttttccaaaaaaaaaaaagggggctttttaaaaaaatt

SEQ ID NO: 125835 - DNA, 509 bp, Arabidopsis thaliana columbia
cctcgcttagtgacctataaagagtatgacgtcgcatgcacgcgtacgtaagcttggatcctctagagcggccgccctttttttttttttttcaaacgaatatgaccttatcattaaagctcatctgaatttgatgaatactaaaaagagagcacacaaaaatgcttgttgaacgaactgtttaacttcctcaaagacatctaagaaagaacaaaagcgttagatactcatcaaaccatgggggatgtttgtataaaagaaaataccttctcactggttaaaggtggacctgctgtgccacccaatggttggggacctaaaccatgtttgtgaacctatgtatttagggctggaccctaggaagccaagtccaaagaccacccatagggagcattacctctgttgctcctccaaagttcgccgaaaaagcacaccacctttttaaaagtggggtgtaccctcaccttgaccacgagttgaaaccctatagcacgtgccattatgcccaa

SEQ ID NO: 125836 - DNA, 485 bp, Arabidopsis thaliana columbia
  unsure (1)..(485): unsure at all n locations
aatgcggaatgnnnnnnnnnnnnnnnnnnnnnnnnnnnnnnnnnnnnnnnnnnnnnnnnnnnnnnnnnnnnnnnnnnnnnnnnnnncttttttttttttttttttttttttttttttttttttttttttttttttttttttttttttttttttttttggggtccccggggtctgaaatataaaccttggtttaaacataccacaatcacaaaatgtttggaaaaatgccctttaaacaagaaatcaaatgaaaattgttttttttttgcgaaaataagtttttatttttaaaatcacaactggctttaagacattaagcccagaccccccccttcgagtttttttgagttttttttacgggtgccatccatattggtggtttttaacaccccccataggggtttgacctttttcaaagccaccaaatcccccattctggccaccaccttgggagtagttgggtgggccaacaacataaccccccg

SEQ ID NO: 125837 - DNA, 390 bp, Arabidopsis thaliana columbia
  unsure (1)..(390): unsure at all n locations
ctgtgtttccactctacgactattaggagctgtccctagtcgtcgattcggtgaccagctcgtgcttgtcaactttgtcggagaaacttatcctgacaaactaatggaaaccttaagggttccccctcctaaaccccccaacccttaggtttttggggggggaagggcaattccgggttttttttgaaaaaaaaaaaaaaggggaaccccggggtttcccccccttttttcccctttttttttggggggaaaaaaaaatgttttttttttttcccccccccggtggggggtttttttcccctgtaaaggntaaaaaaaacccccccccgggggggttttttaaaaaaaaaaatttttttttttccccccaaaaaattttttttttttttt

SEQ ID NO: 125838 - DNA, 284 bp, Arabidopsis thaliana columbia
tgagttccattatcatataggagctgtcctgcagtcgtcgatccgtgacagctcggaattttaattggtaggatccttaagattaagtttgtaaaagttcccaagaaaaaaattccaggattttttttttgcctttaaaaaaaaaacggtcccttttttcccccccaaaagggggggggggccccaaaaaaaatttttagggggggattattttggggggccccccccttttgggggccccggggggaccctgggttttttttaaaaaaaattttttgtgaaaa

SEQ ID NO: 125839 - DNA, 477 bp, Arabidopsis thaliana columbia
actatgacgtcgcatgcacgcgtacgtaagcttggatcctctagagcggcccgccttttttttttttttttttttttttgacctgaagattgaattaagtcttccggaacagtaccaactactgaccaagggtttcatatttgggaccaataaagaggtttcacaaagcttttttacataaaccattccaaatcactggttataagaaaattcactaccgggcaagcttcttactttttaaaatttttcgcaaggaccttaacgggttgggcagggggtgccacggtagggatgttttcctcaagaaccttgggaagaagcttctcttggagaacatggttccttttttgggtatgcctggtcttaaccctcttaaccctaaactgggcaaaccatggctttttttttaccttttcaaccctggaattgggaattcctttcaataacccacccttggtccttgaagacattcccttg

SEQ ID NO: 125840 - DNA, 403 bp, Arabidopsis thaliana columbia
  unsure (1)..(403): unsure at all n locations
nnnnnnnnnnnnnnnnnnnnnnnnnnnnnnnnnnnnnnnnnnnnnnnnnnnnnnnnnnnnnnnnnnnnnnnnnnctttttttttttttttgtgtttaaggcctaatttcacacaaggatacttccaggtgacaagtgcttgaccctgttgcatatactaccatattacgaggggtataaggaccattaatttactagctaatcgaaggcttattcctactttttcaagatggggctcttggttgtaaggactaacttatagtgggcgatactctcagtattcacatgctcagtggacacaagctctctaacaccactgagtacaagatgaaccatatcctgctttgcgatcaaggtgatagccattctacactggacatatgtgctttagagatgactctttg

SEQ ID NO: 125841 - DNA, 398 bp, Arabidopsis thaliana columbia
  unsure (1)..(398): unsure at all n locations
acaaaaaaaaaaaaaaaaaaccttttttctaaaccaccccccactgtgaaagggggaacccccgccgagccccgccccgaaacccggggctccccccggggggggccgaaacaaaacccagaggcccaacagccggcccggacgccagaggcacaggaacggcacgcgcaaaacaaagaagagcgagcaacccacccgcccgcaagcgcaagggagaaaccagagccccancaaaccgaggaagcaccccagagggggcacacacaaacgggggagggcggggcgaggccacaacgcgacccagcaggccaaaggcaagggaaaggaaacacacaggcgccagagacacgacaggaagaactcacgangcaacagaagacgcaggaggagacagccag

SEQ ID NO: 125842 - DNA, 526 bp, Arabidopsis thaliana columbia
aagatacgtcagctctaataccactcactcttaggagagctgtgtcccctgtccgtgccgcgcccgaattcccgggtccacccacaccttccggatatttgtggttggagagaattctgtgggaacccaaagagaatatgtcgttctagaggcatgtgtaagatattgagagatatgggttggagaccttgccaagagagagattccaattatgcgctctcgagtctacatagagggaacgctcagggtctcttcgttcgcgagagtatccgacatcccgagatctcttggcgcctgagatagcacacacaagtagatggtctaatcttcctccagagtcactctgtgatgtgctcaaaagattagaggagtgtgagagtaattggcctgcaagaacacatgttgtggcttgcgcttcggtttgtcggtcttggagagctatgtgccaagagattgttttggggcctgatatctgtgggacactcactttccctgttttcctcaaacagccagggcctcgtgatgc

SEQ ID NO: 125843 - DNA, 471 bp, Arabidopsis thaliana columbia
gaaagctggtacccctgcaggtaccggtcccgaattcccgggtttacccacgcgttcggacaagatgcttgacataggttttgatgcacacattgaattattgtttggaatgttgacctgcctacaggtggtgtttaaacaattaaaaagggcctttcttacaaatccaattaaaatgaaaaaactcaaaccggaaaccttgctaactagtgtattttggcttgaggaaaaagttgttccatcaattctttaatttacttaaaggttgaaataagattaaaacttggacaaaaaatccgttttctaggacttacttcagacccaaattgaggctcattacaggcattcattactgttgttggtaatgaaaaaaatgaggggaacgcttgcttcataaaatgacctgtgcttaaatggacttaccacctgcctgcattcatgcggatggaacacatctgaaagaaaaaaaag

SEQ ID NO: 125844 - DNA, 661 bp, Arabidopsis thaliana columbia
  unsure (1)..(661): unsure at all n locations
cagcctctaatacgactcccttatagggaaagctggtcacgcctgcagtgtcccaggccccgaaatttccccgggctcagaccccaccgcctgtcccggtcaagccttcttggcatgaacactcataagaattctttatcgtcgtccataagcctcggaggctctgttcggaggcctaaagacctctattcctnctggacaaaccggagcctcctaaaataccagatacgccacagcaccgtggattatttggccagttgtaatactatccgggttctttcgtcctgggtgcggaacgactagtaggaatttttatcggcctgccgcgcctaaaacttttttcctaacgcacgcaacggaagcaaacggttcaaaagtctcccaaccttttcctttgtgcccnggatactccaagaacgggcgttggatcgggatgagtgtcctgctcctccccgggtcaccctgtgagccaggctcggaaaagaacactgttgccgcaatcaatctcttgaaagaaagcttggctcgtcgacaacaaccagcccacgcccttaacctgccggtgccttgcctctggtcggcccatacagacacctaacgcttcgcttgaactgaaccatccaggtgtgcgctcctcaacgaccaacgaggaactttcccc

SEQ ID NO: 125845 - DNA, 525 bp, Arabidopsis thaliana columbia
acgccagctctatacgactcactatagggaaagctggtacgcctgcaggtaccggtcccgaatttccgggtcggacccacgcggtccgaaaaaggatatctcggtagtcttggttccattaagtcttccaaggattttattgagaatggggaaaaagaagaaggttccttggaggtacttggatttaatttttggatggtagaaaaccaattttccaaatgggtttttgggaattctttgttctacatctctggtcaaattcttgctagccttgtcatgagcccacccaagcctggtgatgactcatatgactcatacatggcagaaagagatggaattctctcatccatggctaaacgtgcaaagactttggaagacgctctcaacagtttagaaggtgttacatgtaacagagccgaaggagcaatgtatctcttcccgcgaattaaccttcctcaaaaggctatcgaagctgctgaggctgaaaaaactgcaccagatgcgttctactgcaaacgccttctc

SEQ ID NO: 125846 - DNA, 524 bp, Arabidopsis thaliana columbia
  unsure (1)..(524): unsure at all n locations
nnnnnnnnnnnnnnnnnnnnnnnnnnnnnnnnnnnnnnnnnnnnnnnnnnnnnnnnnnnnnnnnnnnnnnnnnnnnnnnnnnnccacgcgtccgcctacaaagacagaaagagatagagagacagagagctagcgacagagatatatctacccacaggactatagtgaccaatgaagcggtactcttctgtacgactgtgaactgaactaaggcaccctagactatgagtccatcgagagggcattctatcttccttgctctatgcttctacattgcgacctacgccatgcgatcgatggaatgcttatgaataagatactgagactcattcggacgagacagatgaaccctatgaaggacttcatttacacgatcaccatgtggaatacgtggaacatcatgccttacctacgctgacatgaggtataacagttgctgtcctacatgagctgatcatctccagtttaagactgtgaacgctctcatgaacgctagactagatcctgaccaatgcctcggatgg

SEQ ID NO: 125847 - DNA, 488 bp, Arabidopsis thaliana columbia
agctggcacgcctgcaggtaccggaccggaattcccgggtcgacccacgcgtccggaaagtaatgcagctgaaagtccttctcctatatggcatcttccatcagaatctggtggagaaggtcacctaagcaatgatgagatgggagcggacgtacgaacaccggacaatgcagacacatggatgactgggagaaccaacgattatgaaagagctgtgccccaccgccttagcccaggatggattctgaaaaaccttacccacctgcgagaagcgaacatcaaagatctcgcctgaacacatcgtcacgaaaacgcctgctgtcgagggctcagcgtcctcacggagacgacacgcctccgactgcaggagaagagcgccattcgcgcggactccacctgccccacggcggctccgcggaggagcgaacctcatcgcggggcgccccctgaccacccagtagggagccgtccccagaccgaccccatgc

SEQ ID NO: 125848 - DNA, 512 bp, Arabidopsis thaliana columbia
atgatactcagctctatacgactcactatagggaaggctgggtcccctgcaggtcccggtccgaatttccgggtcggaccaacccttccgaagaacctttttcaaacttggcggcggggaccttggtggcggactcgttttcccgatttttgttccgccgcgattctcttttgttttcctgattaaggagggagtctcgagaacacgacgacgacgttaattctccgttatgaccagaagacttactactacggcatgctcgtgccggaggagcagattcgttcaaaaactactcgaaagacggtaatgtcgtaaccgattcgttccggagatacagccgtaacgcggcgggtcacgacgataaattcactgtctacggtgaaaacagtaacgtggtagaggaaggattcaattcatacggaacattcggaaccggcggcgccggagatttcactaactaccaaaacaacgtgaacaatccaacgagtcgattcacggcgtattccgacgga

SEQ ID NO: 125849 - DNA, 519 bp, Arabidopsis thaliana columbia
gatacgccagctctatacgactcactataggggaaagctgggtacgccctgcaggtaccgggtcccgaatttccgggtccggaccacgcctccggtttaaggggggacctggaatcccaccatataccactttaactggaaatgcctttgattctgattaatagcccggtgaagaaaatctttatctctcatttcataaccctagccgccgtgtcgttgctgatttgcttcaagattcgatggaccgccaccaccagaccatgtcggctattagctcgacaacattcgatcattcatgtgcgaacaatttttcagctatcccacggattttcatttccaattgagtacagactcctgcgacgattattgtggaggatgaactgcccattgtgactggacaccataaggaagagcttgatgctgaactatacggaaggaggctggatgatttcgactctgctggacgtgctgatggaactaaagaaactactgctattgtgaaatgctactatgacatgc

SEQ ID NO: 125850 - DNA, 512 bp, Arabidopsis thaliana columbia
tttatacaactaatataagggaaggctggtccgcctgcaggacccggtccggaattcccgggtcgacccacgcgtccgcccacgcgtccgatttcaagtttattttttttcttaacagatttcaatatatttgtgcgagtttttaaccaaattagacatttttaatcaatttttttctgagatgcgcaagaataaaagagtctcatccattcatgcgaatgtgtacctagaattgaatcaggtggctcaatccccacccttactcttttatggagctcaagatcttggatcatgtgtagattgaacacagtcatccatttccagagactcacttatcctttggtagcttctactacgaaacataacaataacagtttgctttagaagagattttcagatggtgctgccactgacgactcatcactgatctaagattatctaaatgaatctgttcttcgacctctcactaccgatgagtcgaagtcactgttcatctgtgctgatagatcaac

SEQ ID NO: 125851 - DNA, 489 bp, Arabidopsis thaliana columbia
acaacaatttgggaaagcgggcccccggcaggcccggcccgaattcccggtttgacccacgcgtccgcacacaacaaacggtcttttttcatattcacatctcacccagacgcaaccgctaaggctgatctctcccaatttacagccattccccatcaaaaatctctgacacagtgagatctccctcggagaaaaagactgagaccaaccactcgatgaagacgctcactctacgttggaagccacacacctcaacagagaccatagactctaatttcaccaaagcccaaaggggatgatgctaacaaacccaacacccttcatcacgacagacactacaaaaggcagacgaagcatgccgaaacggaactccaccaacaacaacacccaaaagccgacgcaaaccgccctcaagaacttttgcacacaaagcaggacaccaagcccattcccccccaagaacaccgaccccctaggcacccgcctcgc

SEQ ID NO: 125852 - DNA, 485 bp, Arabidopsis thaliana columbia
cagctgctatacgactcactatagggaaagctggtacgcctgcaggtaccgggccggaattcccggggtcgcccacgcgttcgcttcaagggtgtgaccctgagaatcacaacaccaaacaatctcactcgaaattcctttgactcatcattctcaccattgtggagaagaattcgtctcttttagctcaaaaccctagcccgcgaaggccgccgtggtttttcttggcgatcggataccggccccacccgaactggccggttctatcttggcggccatcgatccggcctttacggattttctttcggtaatccttggcggttcaacttccgatccagtagagacctctggcgaccaagaaaggggggggaggtatggccctttgcaatgggccccaaaagggaggacctggaggctgaacttatgggagggaggtggaatgatttgaccttcctggaaggtccttttggacttaaggaggctcc

SEQ ID NO: 125853 - DNA, 476 bp, Arabidopsis thaliana columbia
  unsure (1)..(476): unsure at all n locations
accgcggccgcgagttccccggggtcgacaccacacgcgtcgcgggcactgagaaccatatatatgcatatctctcatatcttctcttatatggcctcattataacacacatatatatatgccnccacaatatttagattggattagagaggtgtgtggaatgtggcgaaagagtatgccgagtgttcgttagagaagatcttctatgaggattgctctgtctgcagggttgatcatatgaagaggcttccgcgtggatttctcttgtgagagctttataccgtgtggatcatcgttctttgcaccgctgtgcccattttttctatattcccctttctatactatatgattgatgattncaacattgcagagagagaagaggacattgggctctacgctggatttggtgggtgctctttcatgctcggacgagcttttacatctgtggcatggagacttgttgctgatcgttatgg

SEQ ID NO: 125854 - DNA, 518 bp, Arabidopsis thaliana columbia
  unsure (1)..(518): unsure at all n locations
annnnnnnnnnnnnnnnnnnnnnnnnnnnnnnnnnnnnnnnnnnnnnnnnnnnnnnnnnnnnnnnnnnnnnnnnnnnnnnccacagcgttcggtttcttggcggtattggcttcggcggcattttcaccggcttcacacggacatgggccggattatggggcaaaagatattgggcctttcttctggcaacaacccaacttttcatatacattagccggccgacttttttgtgattattcgggtcaaacattaacaaacggcgggagataagttaaggccgccttaaaaataagcttttcccacgttaaaagggcgcgaaaaaacctggcgggggtgcaagactcgggggggaaaaaaaagcagaagaaagcggccctggtgaactgtgtggaaataatggaaaactctgtgaacaagctaagccgtacgctcggcgtttggaagcacctccgtgtctctggcggttcagctaaagagttccggtggcaaatgaccaatgcacacacgtgggctagcc

SEQ ID NO: 125855 - DNA, 499 bp, Arabidopsis thaliana columbia
aactcactatagggaaagctggtccgcctgcaggtaccggtccggaattcccgggtcgacccacgcgtccggccagacatactattatctgatcatagaccgactgaggatcgctatactgtgagctccattgtctctgcacaactactccttacgacgcacaatacggcctttggtacttcatccatcattactgtcatagcatgcccaggttcactgtgatcatacgaaagctttcggcatcacacagtcagatccttgactctactcagctgcggatacctcatagtgtcgaacaagtatgtgagaggcctgacactcaccggcataggatatggcgcgcctgtactcgtccttgactgtcgcatcgtgagtacctcagcggtcaatgcccctgtttgtcttgatttagacacttgtgtcttcacaagagagaaagtctaatacgctgcctacgaccagtcattgagagaggaggaagagactagtccaagcatct

SEQ ID NO: 125856 - DNA, 478 bp, Arabidopsis thaliana columbia
  unsure (1)..(478): unsure at all n locations
ccagctctatacgactcactataggnaagctggtacgccctgcagtacctgtccngnantccccggtcgaaccaagcgtnccgatttcctctaactcacctaantnataattccctttcccccttttttttccaaaaaggaaccttagaatccgggtttcgaaaattgccctccccacaaaaaaacaaattttttggggcccccccccaaaagagagagggggtttttacagagacacaccaccattgggggggcccccccctttttttttaaaaaaaaagggcgcccccccccaagaacaaactttttttttttttttttcctcccccccccgggggggggggggttttaaacacacaagaagagggcccccccccttctttaaaaaaaaaaaatatccccccccccccgccggcctctttttttttttggtgggaaaaaacaccaacccaccccccctcctaaaaaaaaaaaaaaa

SEQ ID NO: 125857 - DNA, 482 bp, Arabidopsis thaliana columbia
ctctaatacgactcaatttagggaagctgggacccctgccgggaccgggcccgaattcccgggttgacccacgccttccgccaagttggaaagggttcagaggacggggagggtattggatccgtgggctccccaaagggatttatctgcgatggagaataaggtttctttgttaagaacctttcttattgcctcagctatttcataggaagaggaagcccgggatggataatttcggtcatgagttggccaagttggaacggaacaggtttaggctcagccctcagcaccactctgaggggaaggcaaaccacattgatgatatagccatgaaactcactccacatggctcatatgactacatcaacaatgtctgaaactgctctgacgtactagactagaaccaaccgcactctgattactatagagcgctagacgatcctatgtcccagagaattgcttcgtatgcgagaaggctgaca

SEQ ID NO: 125858 - DNA, 479 bp, Arabidopsis thaliana columbia
acgtgcctgccccccttccgtaacttggaattcaggttcaggggctatcctatattttggcctaccaggcaagaatttaattccgggaaaaggatgattcattcggatcaacatgaaagcccacttcttggccagattttatatatgggaaagaggtttacctccgtgcttatatggtacaatcctcttcccgcggagcctcctttcttctcggtccgcagagacaaaatgtaggactggtgccaacagttaatcacggaagaaaggactcactgcgccaagatcactaactaatctaatagaatagaaaatcctaatataatagaaaagaaaagaactggcttttctgtatacttatgtatactttccccggttccgttgctactgcgggctttacgcaattgatcggatcatctagatatcccttcacacaacataggacgtcgaaaggatctcggagacccgccaaagcacgaaag

SEQ ID NO: 125859 - DNA, 360 bp, Arabidopsis thaliana columbia
  unsure (1)..(360): unsure at all n locations
ggtgcacttagagacttgcggcatgccgctcgagccgatcgctcggcgtctcgatctactggatcaacgctcgcgagatcggagagaggatacgttatggctctcatgagatgataagtgcatcgagacctgggtcatgctatcgagatctacaccgactctcagtcgcttcgcatcgctatgcagcggaggctcttgtttgtcaacaagtgcagactctctgaactactgattcgccgctagtaaaggattgccctgggtactgtatcacggcgtgcataaagatcttcgaatcaatgtagttcgccccggagagatgcagctntagcgatcgatagtgttggaactgttccagctcct

SEQ ID NO: 125860 - DNA, 496 bp, Arabidopsis thaliana columbia
  unsure (1)..(496): unsure at all n locations
tgacacttcagacttgacgccatgcaccgtcgtagctcggattggctcagttagtatgaaggtatcgaaagtatgcggattcagtggaaggatgaaagacagagagcaaaaattgaatattaatgatatattattcccaattcggaaagtctatgaggtcactgtaangaaaagcantgtaataaagcatcaatacagattcattcagattatttagataaatctgttccgaaaacaaaaaaaattaagagccttgagccaataaaaactaagaaaatcgactcaaaaacaaataaaaaaaatgaaattcccgatttcatataagagctccattgtagaattcgggcctaatgattaatcaagaaagccgatgggaacgactggaacccatgaatatagaggattctattgaaaaataaatcttagtaattcattggacaggatggcggaataaaccagattattatctattcttatttttattcagagatctcct

SEQ ID NO: 125861 - DNA, 505 bp, Arabidopsis thaliana columbia
  unsure (1)..(505): unsure at all n locations
tatacagagctttgacgtcgcatgcacgcgtacgtaaagctcggaattcaggatcgagctcactggtcagaggaagcacattgacctaagggcgaaggatgacaaacttcttctctacggggagaagccagtcattgttttcgtgatcaggaaccctgaggacatcctatggggtgaggctggagctgacttggttgttgagtctactggtgtttccactgactttgacaaggctgctgctaactagaagggtggtgctaaaaaggttgtcatctctgccccaagcaaagatgcgcccatgttcgttgttggtgtcaacgagcacgagtacaagtctgaccttgacattgtttccaacgctagttgcaccactaactgccttgctcctcttgccaaggttattaatgacaggttttggcattggtgagggactcatgaccactgtncactctatcactgctactcagaagacagtttgtggtccatcaatgatggactggagagg

SEQ ID NO: 125862 - DNA, 506 bp, Arabidopsis thaliana columbia
accgcctaaccaccaatttgaaattatggccgaattcaaaacaagttaccgttttggtggaggtaaaaaaacagttcctcacattccaaaggggtaacggagtaaccccgcttaaccactccgtccaaataaaagggtggccgaatatcttaattaccttaatgtcctttcagcttaagaatctttcgggggattgcctcaatccctttttatctaagagggggggccactagaataggttaataaatgcttaaaaacttcaatattataaatacactcttccctaccctaatacggaagaccaagacgatcgaaattcatcataaatcacttggaagaagatctttactttggttttacagccggccaaatggttcaaccccattacttttcccgcgataacaccaactctcctaaacaatcatatcgaaacaatgggaaattaacttcaccttccattcaccccgaatggattttaagacaaacataacccggaaaaatcaaaa

SEQ ID NO: 125863 - DNA, 592 bp, Arabidopsis thaliana columbia
cggccttagaagggggttgcccgagggggctaggctgacataaaaaccaggcggcacaagtcccaatagcacaacccattgcacaaagggacctggccctaagaggaaacaaccggtcgcggaagcgtttccctaataaacaaggcaaaactagccaccaccgagggcgcccgaccaaacaactcagcaccgggagatttttttttttgtatgggggggaggacacacacagcgcagcggccaaagccgacacccccgtgtcgacctaccttcaagagtaatacaccatcacgccacaagacctccaacaaacacagctcaagaacacatcttacgcacgccaccacccacgcgccaagccacctgcacgccaacaccatttcgacacaatcgaacccccccacccgaaattagacactcccgacgccatcctccacacatgtcccgccccctctatagcactgatcgccgtacgccacccgcgcaccgtttgccattgcccctgtaacacccccagacacaatacccagccgcaccccatactacgccccgtacgcccggaccgtcacgtcgaactgtgtttaaccataca

SEQ ID NO: 125864 - DNA, 506 bp, Arabidopsis thaliana columbia
ctatacaagaactttgacggggcaagccacgcctccgaaacttggaattcaggttcagctaagctaaaagggtataaggtaatggaacctaccttttccccccctccttgggcctcctggtaccgctatggagctggactaacaaacattaccatggttaatacttccggcaaaatggtgcttttggacatcgcggctgtgacggaaagagagacgggagttttatccgaactcgccggttgtggactgatcaaatccgtagttacggttccttgaatttggatgcaagatttcaagacggctcattacacgatgacgtcacctaaggctatgtttgctagccaaatgatgggaacggtcgttggatgcatcgtgacgccgttaagtttctttttgttctacaaagcgttcgacattgaaaaaccctaaacgagaattcacggctccttacgctttgatttacagaaaatatggcgattcttggggtgcaaggcttctctgctctg

SEQ ID NO: 125865 - DNA, 178 bp, Arabidopsis thaliana columbia
  unsure (1)..(178): unsure at all n locations
cccnnaaaaggggctgcccaggggggggagaaccacccaaaaaaccccaagaccccccaaagaaggggcccgcacccgcgcccgggaaaggccgccgccggaggcacaacacgacacgaggcggcccgaacagggcgaacgcccgcaagacagaagacccaccgcccacaagggaaga

SEQ ID NO: 125866 - DNA, 502 bp, Arabidopsis thaliana columbia
  unsure (1)..(502): unsure at all n locations
acgtcgcatgcacgcgtacgtaagctcgggatttcagctcgaagaagctctatgatttcacttaccccttctcaatcagtcagccacagtggtttcgacttcctcctattagaatacgggtgtagattcctgacgggaaacactaacatctcttgttaaccggagcacgatcacttagctcgacgactggtggtgatcatccacagcgagctctatggtattaggagaaagcttaggggtttttgagggtcccagagagaangagaaaagaacatggatatttgagaagacgattctnacgcttcgaggaaagcttatgcagagtcacggacaaggatcaaaggccggtttgcgaaaagatcagagacagataacgacgacattttccttagtcatgtttatgcttcagcagcacacgcacagtacggtgtcgtaccaacgttctgattcgaatctacggtggataaacaatcaacctgaagacttatatcttccaccgttg

SEQ ID NO: 125867 - DNA, 424 bp, Arabidopsis thaliana columbia
aagatgaatactgtcagtggcgataaagtggtcaaagagtcgccagggcgcggaaatccccacctttgggactgtgccctcaatacgatcacacttattccttgggagttctagctaacgattcttaccaacaattttaactccacccttagtgggttcaccccaaatggtcccctccaagatgtagtggccaatcacttaaggacgatttttttttttggggggggaggacagggctgatgaaaatctttggaaaaagccacaaagtcgaccacctaagggatcgggtattattcagcgcaccaaaagcacaaaattttataccgtcaaggcgcacaccgtaaagcggaatctctttacaaaatcgacccgttccatctttccatgtcaggacctccgtcttaaaccaaatatcctcgacaca

SEQ ID NO: 125868 - DNA, 508 bp, Arabidopsis thaliana columbia
  unsure (1)..(508): unsure at all n locations
tgacactatagnaagactatgacgtcgcatgcacgcgtacgtagctcggattcgctcgagcactgttcgatctacaagggacgcacggcaggcttaaatttcccgtcgtcgtgaccgacaccagagatgtgacatctcttgttatccagtctgctctgatatggggaaatcattatctactgaaaagtcaagctaaatcgaatcttccgatggatttgcccgcaaaaccgtaactcgaatacaatactgttcatttccggacgatcattgacctggcacagacggggaagcgatcacaaatcgatccataacctccttgaatatcgtctccgtggaggagaaactctctacgggtttctttttactatccttctcgccgacattagccgatatcgctgttcacgccgattactataacgtcgccgttgatatgaaccatggtcccggaggtataccggaagcttggaatagtattcgagctcttaacgccgccggaacatcagccatt

SEQ ID NO: 125869 - DNA, 478 bp, Arabidopsis thaliana columbia
atgacacaatgactaccctctttaaggtgtggcgttagggacctagaatctgattaccggagtattgggagatgctcgacgaatcttatgactgcagactgccttgtttctaccacctctgtttcgattgtgatgcgtggttatctagaatcattcctcgcaccgtaggacatcagtggtttgtcctggggggctgtggcacttccctctggataactattttacaaattatgtagcctccgctcccgtaccggaccggctgacagaacagattggcctttcttgaagttccagaggcagaaatttcactcttgattctcttccccctggggaccttgtacgacggggtcctaaagggcccccagcccctgtacttcttgctcacgccaacggggccctaatccccctatcccccccttggggccccccccctcccaattccccgttctccttcccgccttgggcccgtaaacaattt

SEQ ID NO: 125870 - DNA, 528 bp, Arabidopsis thaliana columbia
  unsure (1)..(528): unsure at all n locations
cagggagcccccaccacacaaacacggagaaccccccgagaggggaagcccggagcaagggcaaggaacccaccccaccgacacaaacgcgaaaccacgccggcgccaagcaggcaaaacgcagaaaaaaggaggaccagggccacaccagccacaccgaaacacaaagagcgtttttttttaggggggggggggaacaaaaaaaacccaaacaaccccaccagggaaaaaaagaccgccaagacaaaaccgcaaccacgaaaaaacggcaccccacanccnaaaaacgggacgaaaccaaacgcaaaccaagacaacgacacaccccgcacacacaaaaccagcaaccccgccccccgggcaaggcccgcgacaacaccgaaaacgccacaccaccccccccaaacacaagcgacgccccccacgcccccaaccgcgcaaccaaacacgaacgcaaacccaaggggaaacaaccacccaccaagaaacccgggggacaaacagaacgcaacacgcggaacacaaaaa

SEQ ID NO: 125871 - DNA, 500 bp, Arabidopsis thaliana columbia
ttgacgtcgcctgcacgcctacgtaagcctggaattccggttgggggaacacaaagaattctttacggttaattcctcattccttggtacctacgggttttacttgatggctggcattttaatttaagaattctcgggggttgttccggttcccaaattagccttcccagagatcaaaccccttagttggtttttgaaaaatttccctgctgttctaatgaacgagagcaacacaggaggccagttccagaagcctgaacaaccaatgcaaagccttgacacaatcatccaaatcatctttgaagccacaattcccgttgttcgaaaccgttgcctaaacgatttcatgactgacattcttgatcttgacgatgacatggatgactttgattctgaatctgaaatcgacattgacagtagcggagagatagtttacgctctctaataaaaagccttttttaacaaccaaaacacttctctatctgttctaagaccagtag

SEQ ID NO: 125872 - DNA, 516 bp, Arabidopsis thaliana columbia
  unsure (1)..(516): unsure at all n locations
ccaccgaaagctggaacccanaaaggggttccttgggggggagggggccaacacacaaantttccataaaggggggcgcacccccccgtacccgcaccggggcgaaacaacccacccggaacctaacaacgccggcatccgcgggggaaaaacacctggtggcctcgcgcatcacaatggactaaacactttcatgcctcgcgggggggaggacccnaaatacccnacacggccactccaaaagagaacacaccatcccccttccctggggggggggggcggccctcacccaaacgaataggcctccggtctagggcacctcttatcggtcggcaaccctccaacaacaaccanagttagcttctaacacacacaccgttccgtataccaccctaactcccaccaccctttgtcaaacacagaagcccgaaacccggaggccctccctcccaccccctcgtcatgcgcataaacagccactggcaccgctcaccccccgcccattaaccaaacgca

SEQ ID NO: 125873 - DNA, 414 bp, Arabidopsis thaliana columbia
agggtttgaccaaagggaggaaggcgccgacaaaagagcgaaaagaagcaaccgaggacaggaaagacaagcggggccagcaccggcccaaacgcaacgcgaggaaagacacacgaaagagcccgaccaacaaccgaccggcagcggacaaaaacaaaaaagaaatttttggaggggggggggagcgcagaaagaagcctgaaccggcgtctatgaaccaccggcaccgaagaatgcccctgcacaaaccaaaggaccctaaaacagcgaaaagacaagagcacgaaggcccacgaaccgggggccgcggcgcaggaggcaaggtcgccgggcccagcacataacgccggcccggcacgcggcaggcgaccacccgtaacgggagagccagaaagagcgcagcccccgcggggg

SEQ ID NO: 125874 - DNA, 365 bp, Arabidopsis thaliana columbia
aggaaggggttttcaagaggtgaggaatccaagccgaattcttttgattcccggggggggacctatggggatgggtggtagaaaacaaaaaacacgtacagcccagtgggggggcgaatttcccaaggcgcgactcttcgggtgcaattgtgagaactaaaaaaattttttttttttggggaggggcccgcagaaccagagacgcaaaggagcaaaaagaacccccggcagaaaaaaacaaacaccgcgcagcataacccgcaccaaaaaaccatcttagcgccgctgtttattagccggacaatatacaacctcgtatatcgttaaacacaacctcgctatattgttggtggaagatccattat

SEQ ID NO: 125875 - DNA, 419 bp, Arabidopsis thaliana columbia
tgcactatagagacttgcgcctgccgctctagctgatcgctggccgagctacagtctattagtcaaacatcgactgaaagatctgcgcacatcatagcgcatagtgaacaagagagaagaaccagtctgcaagagatcatacatgcttgttgaggtgactctcttcatggatgctgagcattcaatacatgggatattgctatttgggacaagacgcatgaggtgcttaagcccaagcagcagtcaaggttgatgatgacacgatgatgagaccgggagattcatcttggcctagagctcaatttttgtctgaagttgggatttattctttaccttatactgccccgttctaatgctcgattctttttgttctagctttagacttagcttgtacagtgtttgactgtttgtaacaacaa

SEQ ID NO: 125876 - DNA, 481 bp, Arabidopsis thaliana columbia
gcctggcccgcctccgtagcctggaattccggttcggggaaggtgggggttccagggccagttaggggccgctttttccgatccattccttttaaggctcttttttttcttggcggttttaataaaccatctccgatctttcctcctccgtctaacctttaagtcaaatcctaatctccccgaagacgatgtctctatagcatcgggactagccaacataatcgttctcgccgatcagcttagtttgaatcggttattctcgtaccggtgcggtgacggaggtggtggcggctccgattgtgttgcgtgtttgtcgaagttaaaggaaggtgaagaggtgaggaagctggaatgtcgacacgtgttccacaagaagtgtttggaaggatggcttcatcaattcaatttcacttgtcctctttgtagatctgctttggtttccgatgattgcgtctctaaaacgcagcgtagcgttgggagg

SEQ ID NO: 125877 - DNA, 495 bp, Arabidopsis thaliana columbia
  unsure (1)..(495): unsure at all n locations
acgggcctgccccccttccgtaacttggaatttaggttcaaggttcgggaaggtctacctttccaacgaggagcatgactatagattctcggtttcaaagcgattctcaggcgagcgaggcgtcaccagaagttggatccgtcggcgactcatggtgttacgcagttctcagatctgactcggtctgagttccgtaagaagcacttgtgggttagaagtggctttaagcttcctaaagatgccaacaaggctccgattctccctaccgaaaatctccctgaggattttgattggagagatcatggcgccgttactcccgtcanaaatcagggatcttgcggctcttgctggagtttcagcgccactggagctttggaaggtgctaacttcctcgctaccgaaaactcgtcagcctcagcgaacacagctcgtcgactgtgatcacgagtgtgatcccgaggaggcagattcctgcgactctgggtgcattggtgg

SEQ ID NO: 125878 - DNA, 498 bp, Arabidopsis thaliana columbia
ctttgacgtcgcatgcaccccttcctaaacttggaattcagtttgagccattaacccccagtcacttgatctaattcggggttatttggtttagaaccaccgggggattggtcattggattaaaaaatatttaaaaggttaataagggtcctttaccaggccaaggccttaagggcctatataaaattttaccaccataatggcatgctcaattatctctaaccctagctatgttaggctctttaaccataatggtagctcaccatatgtattccatgcccccttatccatatttagctactgactatgctacacaactgtcattgttcacacatcacatgtggattggaggatttctcatagttggtgctgctgcgcatgcagccatttttatggtaagagactatgatccaactaatcgatataacgatttattagatcgtgtcctgaggcatcgcgatgcaatcatatcacatctcaactgggtatgtatatttt

SEQ ID NO: 125879 - DNA, 492 bp, Arabidopsis thaliana columbia
  unsure (1)..(492): unsure at all n locations
gacgtcgcctgcacgcctaccttagctcggaattcaggttgaggggaaccgaaaagaatgagaaaacccagccgggctcaccggaaatacactttttggtgcttgatgggggaaggtttttgaagggaccactgaaccaaaggattaatccgtgggggggaattttgcttgattaacttaaccggccccaggttacctgcggccttaattccacggttagaacctgggatttggttttacctgnggacccaaccaccgggagaatcaccagaggttagcttgggcccttcaacagcgccaagcagatcttcccacaatcccttcaacattgaaggaggagctcaaaacaaatccatttatgcgtgttgataagccagagatacaggagaaactcggttgcaagtcgccaattgatacaatggagggaagttcggaacaggagggatcagtggaggggatgatgataaatggagagcttcttgcctatgtttt

SEQ ID NO: 125880 - DNA, 465 bp, Arabidopsis thaliana columbia
ggcccccttccgtaacctggaatttaggttgaagggaaaccttaacgatgctgttgggcgatatggaatccaattccgttgagccgatgacggaaaaagaccaggcctcctatgtcaaattcgtggcggaggtagtacaacctgaagatgctgcaaaccaaaagggaccaagccgatgaactactagaaataggcggtttgtcctgactggattcaaatgtcgttgagggagcctctttctgctggaacacaccgctatgcagacgtacatgactgctccttaaatgaccatgctgctgcacaagaggcgatagctaaggcaatcccgtatgcgattgcagagaagctagacatagtctgagactctaactggacttgtatgctttaatcacgtggactgaagcatacttgtccagtcagagtctgagacaaggatactcatgttaaaaaggacaaatataaggg

SEQ ID NO: 125881 - DNA, 476 bp, Arabidopsis thaliana columbia
acgggcctgccccccttccgtaacttggaatttaggttcgaaaggcgcccagaagatggcggattggaggccaaaacaatatccacttccatggaggcattcaggtccggggcaccacctcacgggggatccgaagtggggctggaccgtgtggtaatgctcttatgtgccctcaataacatccgcaaaacttcgttattccctcgtgactctcaaaggctcactccctaatatcatggctcttccctggcgactctcaaaggctcgctcccttaatatctatctttgataatagaccccgctcccgatttctaagttatttttttggtgcagttcgttaggtgtatagttatctttaaactatgtatgtgttgtaacctttaaatgattaaggagcagtactatttgcgcttaaaaaaaaaaataaagggcggacgccaactagtgagctcttcgacccgggaataaattcggac

SEQ ID NO: 125882 - DNA, 529 bp, Arabidopsis thaliana columbia
  unsure (1)..(529): unsure at all n locations
aacccaggagagcaaaaaacccgccgcccaaaaacacccaacaacccacccaggccccaaccacaggaacgacccacccacacaagcgcccccacacccccaaacgaccaaggacgagccnaaccacacccgcacactttttttttttccccggcgcgtcgggacacaccaaagcaaacaatgcaaattttaaacgcgcaaaagaaaagagcgccccttttcccctccaacccatcaaacccccctcaccatccatacaaacagccaacctccaacaacacccatcatccatatatactccccaaccgcctttattctcatcaaaaccctccaccccctctccatatccctcctgccaccactataacccaccatttcccaccaccattcccgcacagtaacccccactccgactcgcctctcccatagcccgtctccccctattctacacccaaacccaaatcgccccctcaccaccaataacccccattcacccaagtaacatccctaccaccttcttttcccgttc

SEQ ID NO: 125883 - DNA, 525 bp, Arabidopsis thaliana columbia
ccccaaaaaccccggcacaagagaagcaacgcacaccccaaaaagagcacggaagcacaaccacccacagccaacaggccgcaccgcggaggccgccccgggcgcccagtaaacagacaaagcggggcaaaaaaacaccgaagagacacagagcgcaagacaggggtacacccacgcagcaccggacgaagccacagaaccgacagccagacccgcgaaagcacgagatccggccggagggggcagcgcagagcggcgcgacacagggagccgcccacgtcgaccccaccaccacccagacagcgaaccaccaaaccagaacccgcgaaacaacgaagaaaggagacaacccagaaaggaccacaacaaagccaagggcgaaaaacgctcagacacacccgccccgggagaacacgcggcgcgggacgcccagaaaaccggcgcgagagcaagagacggacaagccagccacaacaacggacgaaggcgccggaagaagcgaggagacagccccagcccccccga

SEQ ID NO: 125884 - DNA, 516 bp, Arabidopsis thaliana columbia
  unsure (1)..(516): unsure at all n locations
tgacactatagnagagctatgacgtcgcatgcacgcgtacgtaagctggaatttcggttgggggttttttaaggcctggaccgatcttttctccgcttggtttaaaacttccgccggggcgggttatcggccgccgaacttaacacaccatcgagatgtcaaaagcgaaggtctccggcggaagttgccacggtggtaacaacctagacacgttcttcctcgacgtggaggttgtaaacgatgaccttaaagagctagatcgtctctgtcacaacctccgatcgagcaacgaacagagcaagacgcttcataacgctaacgcggtgaaggagctgaagaagatgatggacgctgacgtcactgctgcgcttaagacggcgaggcgcttgaaaggaaacctcgaggctttagatcgggctaatgaagtcaaccgaagtttaccggaaagtggaccgggttcgtcgtcggaccggcaaagaacttcggtggttaacgggttgaggaagaagctgaagg

SEQ ID NO: 125885 - DNA, 441 bp, Arabidopsis thaliana columbia
ggggaggggcccaccaacccaaagccaccggagcaccccgaggggacacataacccgacgcagacacccacaccaccccccggcaggcccacccaaggaggataacacaacgagacggaggggacccgccaccacacagaacgcggaccttttttttatggggggggggaacaacgagggcgaccaaccccccgcggatgccccgctcagaacgagcccacacccccagctatcccccataaataacaaacgaagcgcccccacaccaagccgccgcgaccccaccgaaggccgaattcgcaccagggtacaaatgcgacaccacgcgagaacgcaaacccacccacccaggcaaaaacaaacagacgcggtacaccgtcaacatgcccattaggccccaaagaccccccggccgcgacaatccgcttagcgcctatataa

SEQ ID NO: 125886 - DNA, 482 bp, Arabidopsis thaliana columbia
gcccccgaaaacaaaaaggacccgaaaacgcgcgccgaccccgagcgacgagcgacgccaaagcgccgcacgaaggccggcggcactggaaccggaacaccgaaacaagagacagcccacgccaaaaaaggaacgacaaacgagaccatttttttttacgggggggggggaaccgcaaagacagacgccgacccatatacccgacgacaccggcacacccgacggcgcggcaagcgggaaccgcacacaccaaaacaagagaaccgcccgggcaacagcggacgaacaacgccgcaagcgaccgtgccgtggaacctacccccgtaggacatccaacgagcaaccacagccctaaacgccacccggtaacgaaaaaaccaggaccgacgacagacggggagaggaccacagagagcccccaggaaaccacgcgcacgcaccgaaagaacgcgagagccaaacacacaagaccccccaagacc

SEQ ID NO: 125887 - DNA, 489 bp, Arabidopsis thaliana columbia
  unsure (1)..(489): unsure at all n locations
ggtgacactatatagcactatgacgtcgcatgcacgcgtacgtaagcttggatcctctagaggggccgccttacgcgtgcgnagttntttctcttttctcttttttttctcaaggttaccaaagggtttattttaaaaaaacctagagaatagataaaaggtttttgccaagattctttttaggagcctaccccacccctcactttgactgaaagaaaacagggggttcctctgaaaggaaggtcttggaaattggggcatggaaaaacccgttgattaatttttagcataatactgggactggaagcaaaccatttttttcttttaaaaacttcttactggacccttctggaaagttggccttttggtaatttcacccacccattcattggcacgtgaacttttggagaaaagcttctgggcggaaggtccgaccaggttttgaatcgcgggattggggggaaaatacgtcaaggggaaagtttcacc

SEQ ID NO: 125888 - DNA, 511 bp, Arabidopsis thaliana columbia
tgacactatagctagagctatgacgtggcatgcacgcgtacgtgagcttggatcctctagagcgggccgcctttttgtttttttttaattcaaagggaaagatactttattattatttattttaaaatgggaaaaacactgagtagtaaagtacattcgccaatttttattcggggagtggagaactacgatgagggaagccttggaacttttactgatctacacaattaaagaagggccacaactttttcaagttcagtgtcaatttcactctctaaaaaacaaggttttgaaggaagtccagcatttgtacttatggacccacccaggggttatagagaaccagctccatgctgtcctttaacatgcctaatgggaattacaaacccggaaggggctccttgcttggatgcatcatgtgacaatgagtactgggttttcaacttgcttatgggaagattggagaagcctggttgggtgtacttctcaatcggttcctttgcctgggctg

SEQ ID NO: 125889 - DNA, 508 bp, Arabidopsis thaliana columbia
  unsure (1)..(508): unsure at all n locations
nnnnnnnnnnnnnnnnnnnnnnnnnnnnnnnnnnnnnnnnnnnnnnnnnnnnnnnnnnnnnnnnnnnnacctatgcgtncgtacaaatggagactttctgagcgtaaaagagactcatatttccatataaagctaaacttcttttttcttacagtaaaagggaatttcagcacagacaacgtatttttaatagaaacctacaatatcccgctttatatattctagaagaagaaagcacattcttcaccaaatgcatagaagaaggagacttttatgcagcatcctaaccattaccaccattgatggacaagcacccctctttgtctgagcgaattgaagagctctaagcattggttataagtcttgacgtacttttggctccttagaccaggacaacatctctgccacctgttgtaatggcatccaaggaacaactcatctattaaacaaatcgctcctgtcttgattagcctcgggatcagatcgaacttcgttccttcaacatcca

SEQ ID NO: 125890 - DNA, 502 bp, Arabidopsis thaliana columbia
tgaactatagaagagctttgacgtcgcatgcacgcgtacgtaagcttggatcctctagagcggtcgacctttttggtttttttttaaaaaagatgacagaattatattatagaaacatatggtaaaaaagtttgtacaacaacaaatctgattgtatcctatggtttgatgcacagaacaatcgaatagaatacagagtaacgaaacaaattccaaccaaaagttgtttttttcaggggagagaagaaagaatgtttttttttttgtcaaaggagatgagagaatttaccagctgagactgagactataataatatgtaataacagagatcatcaatcatcatcagcgagagtagggtccatacaaatcataaggtgcccaaagagtatcaagtggacaaggccgtctcgaatctaaccgacaccacggtttaccactaccggaccaatgagagcagctaaccggaccgggatgtaaatctctacagctatctctcacgtta

SEQ ID NO: 125891 - DNA, 514 bp, Arabidopsis thaliana columbia
  unsure (1)..(514): unsure at all n locations
nnnnnnnnnnnnnnnnnnnnnnnnnnnnnnnnnnnnnnnnnnnnnnnnnnnnnnnnnnnnnnnnnnnnnnnnnnnnnngccttttttttttttttttattaaatctggaaaattatattaaacacgagagttaataaaggtaaaacccttacaaagcttttctagctttttttttggtttttagaacaaaaacagacgggagatgtttgactgaaacacaagttttcttactggtcatgggttaattagccctctttaccttttatgaaagattgggagagagacccagagagacagagagagaaggagagacagagagagagagatttggatctcaatcggtggaagtgcttagcgcagcaacaaccgctcctggtgtccgaaaagccgaagaaatttccgtatggtctctccacgacgtattgattttcagggacgggtataaccaagacttaaccgaatcacaaaggaacccggttcgacattaagtatagcttcccaatcgatctgtaac

SEQ ID NO: 125892 - DNA, 270 bp, Arabidopsis thaliana columbia
gcccccgggggtttgcatatagagttgacactattagagagagctaatgtacgtccgcctggcccgccttgccgtaaaagcatagggttccttttagaaccggcccgccccattatatattctgttagttctccagggtctcgcccacgggagccgttgatctgtaacgataccgatgtatatgcgtacattggacgatatctgtaccgtgcccgtttttcattctctgttgtaattctgtcaggttcagccccaacctcagcagctata

SEQ ID NO: 125893 - DNA, 520 bp, Arabidopsis thaliana columbia
taggtgacactatagaagagcttgacgtcgcatgcacgccgtacgtaagcctggatcctctagagcggccggcctttttttttttttttttttagaccaaatggttgggacccaacacaatcgaaggttgcaattatttgaacaggataaacctacctggcatgcctcgatttttacagaggcatcaatcccatgggtttttggctttaatatttaaaagaattgaatcttggaagaaaggatcaaccaaaagcttaattaaagaatgtccaagccagggcctggatcattaagcctttttcttaattggctaaaacaaaacttttggccgaatttccaacccacttggttagggaaggtgaaaacctcctggaaaacctaatggaatcttagggtttccctttccgttttccgaacttgaatcatttgaaaagacgggaatcctggaaatatctaagtggcacctctaaggtttcttttccttcaaacagccacgtttccaagtctaatctaatagttt

SEQ ID NO: 125894 - DNA, 453 bp, Arabidopsis thaliana columbia
  unsure (1)..(453): unsure at all n locations
cggnnnnnnnnnnnnnnnnnnnnnnnnnnnnnnnnnnnnnnnnnnnnnnnnnnnnnnnnnnnnnnnnnnnnnnnnnnnnnnnnnnttttttttttttttttttttttttttnttttntnttttnttttttttaaacaccaaaccccttcgaataaaaaattaaatattgggcagcaaagcccctgccaaaggtaaaggctttatgattggagaggtccaaccccaaaaaaagtcttttgagacgattcaacttttgatccctattaccgagcagacaccatgggttactttttttgaagctaacagaggagtgggagaacccttaaccacctgaagacctacctagcttttggcgcccgtatttcctgtgtttgttccccggggcagtcatcgcattaatcctgttgggactaccccaaaatgaagggactacgttggagggttcccgttttt

SEQ ID NO: 125895 - DNA, 512 bp, Arabidopsis thaliana columbia
attgatttaggtgacctttagaagaacttgaccggcgctggcccccttccgtagcctggattcctttgagcgggccggcccttttttttttttttttatttcaggttgccagaaaaaaccagggaagccggcgtttccgggaaaccaccagaactggtccaggcttttttattaaacctggggcctggggggggaggttaataatggtgggaacctaaaacctatgacctcttaatcatagatataggccttttcttccagtatggaccaccatagcctgcagtggaagccttagtcgtcgaaccacctacccagtttaaataggggacccatgtctgggggtcgggatccccaacctctggtggaagtttggccccagcgactagagtcaccgggaaaactgtattcaccttgcttataaacaatggttctactttctgaggactggacccatctagatggaagaggtcactccaggttttccacttccagtccaagtttagggcccttag

SEQ ID NO: 125896 - DNA, 464 bp, Arabidopsis thaliana columbia
ggggcgcttattgggagtttttggcgtcccggccccgtactaagcttgaacctctaaagcggccgcctttttttttttttagtgtttagacagaaacccacgtgtttttaatttgaacgggcgcgtcaaaaatactatggagggggaatggaaaaggttccacacctcacttcctacctatgaaagattgacattcgatcgcaaaaccggttgtgttatttcattggaactgctccccgattagttagcagaacggatgtatcattggccgtttattagaagcagggtgattcactattattttgagagggccgtggtggagacctcaggctcatggtaatgtgagcgcttgggaggtggagagggtgaccggggtattgtagggatcatttgggctgtaaggggtgttacgttgtgtatgcacagagtgtagtgctaaaattgtaatatggggaagggatatt

SEQ ID NO: 125897 - DNA, 233 bp, Arabidopsis thaliana columbia
ctttcacaaggagcccagcgcggccccagtgcccccgaccctagagcctgggaatacttcacgaggggggtccgacctttgattattcttctttatttccaatagaaagcgaccatccctacgacaaacttccaatggtggggcaggcgacgccaccattacaatatttgtgtcttactcacaccgtgatattttatagcgcaatagctacggggactattctctaaatggaa

SEQ ID NO: 125898 - DNA, 579 bp, Arabidopsis thaliana columbia
cccttgaggggtttccggccggcgggcactcccccccccgcggaggaccagttactgcgtaaagacaccgtcctcaagatatagtccagttcccgcgtacgcatatagaccgacgatagtaagagcgagacatactatcatctttgtctatcgctgtcgccaaatatcattattgtcgtgcctctcgttgtataatgtataattgactcacttctttatagctaatttcctaaagcgataggacgcgacgacaatcactcacacgttaggatgactgcgcgcgctccacgtcgggctatggtaatcataagacgagccgtgcagcgtatatccgggcgcacagtggtggttgggtatcgtggaacgcccttaaatgtaacagacggtgtcagcatcccgcgatattatatcttcactatcgacttctattatttactcatcataccttataattgacatagtcctgacgtggtatgctgatatctttctgcccagctttgtcgctctgccgcggtgaggaccaccaccgggcaccgaagctgtgtatgtaacagaagtagttaagcagagggaggaagt

SEQ ID NO: 125899 - DNA, 488 bp, Arabidopsis thaliana columbia
cttgacgtcgcatgcacgcgtacgtaagcttggatcctctagagcggccgccctttttttttttttttcctcgaacatgtgaaataattttaaacctgatggtttatcacggcgggaaccgccacgaagctaatctggcatatgattgggttgtaagaacaaaaacagacggctgatgtgtgactgttactgtctttcttttattgcacaaggtatagtaagaccttttttgttctcatgaaaaattgttgtagatgcactctgttgacagtgagggcaggtgagactgttagaggagagtttatttctctattagtttatcgtgctacggatagggttaaacatcttttgttgtgagtaaatggctgtgtgattgccaaggagtggtcgatatgccacgtatctggtgttaagggccgtggttcaagcgggaagattccctttttctactatagggacgacggtgtaagatactgtagttaaccatt

SEQ ID NO: 125900 - DNA, 455 bp, Arabidopsis thaliana columbia
aaattttggccgtgcctggcccccttccttaacctgggatcctttaaagcggccccccttttttttttttttttatgacactttgacccgtgaccgatacaaaaaattaaaacggattggaaacccattgcccatggttgtgccgcgatatgagaagcataataggccggatggggcaagtccccttaccttaggcggtatatttggtaaaaaccgggactttttcccggagaaccctcgagaccgtgtgcgtgtatccagacacacttctgcactaatcgggatgagcgcccgtaacaggcacgttttctacgtaggccatagatttggtccagcgaggccaatagtacaccccgagagaaataaagaaaccgtatatttgggctttttctaaccgcactcgttattagctactcgtagcgaaaatcgcccgaaagaattaagcaaatataata

SEQ ID NO: 125901 - DNA, 516 bp, Arabidopsis thaliana columbia
  unsure (1)..(516): unsure at all n locations
taggtgacattatagaagaagcttgacgtcgctatgcacgcgtcacgtaagctgggatcctctagagcggccgcccttttttttttttttttttttttttttttttttttttttttttttttttttttttttttttttttttttttttttttttnaaaagggaacctaacacaaaacttttttgaaccaagtttaaaagttttttataagtaaaaacttgggacattacaaaagttggcggcaggtttttatcaactaaaataagaacttttcttaagccacaggcaaattaaacacagaacccaaagaacctttttagaaagcaatgtttaacaacatgttttttattggatagatgtcccttccttggaaatgatgaaaattgttttaaaaagttgacccacctttaatggaattcctttaaaggcgggggaaagccgtcccaaatgcaactggtgggggtttggggggttaagggggaaacaaaaaagcctggatttgcctgaacctcggggg

SEQ ID NO: 125902 - DNA, 431 bp, Arabidopsis thaliana columbia
  unsure (1)..(431): unsure at all n locations
nnnnnnnnnnnnnnnnnnnnnnnnnnnnnnnnnnnnnnnnnnnnnnnnnnnnnnnnnnnnnnnnnnnnnnnnnnnnnnnncttnnttttttttttttttttttttttttttttttttttttttttttttngggggggggaaagaacccatattttatcntacatatgaaaggcgctggtttgggaaaaaccaaagagcttaatttaaaggaagcccaaagaggaaaatactttatttagctgcaaaaagaaaaaaaaacattatttattctttataaaaaaacatgctttgctgcgctcctttgcgatcctttcacaccaatggaaggtgtataaatattttccctccatgaaagagggaaaaaaactttttatttttttaaagggaggacttctggaccattgtttttttttgagtcaaccacggccctg

SEQ ID NO: 125903 - DNA, 443 bp, Arabidopsis thaliana columbia
cttgacgtcgcatgcacgcgtacgtaagcttggatcctttagagcgggcggcctttttttttttttttttttcgaaaaccaattaccattcagattctaaagatatgaataatttacaaaaattcttacaggccaattaagttaaaaaaagaaacaagatttttgggtatttacattggaaatttcaagggttttcttagggtggttgagggagattcattgcttttcttaggctggcaaaaatgcggttggttttcttttcgcccttgaagttcctttaaccgaaagcttttgtaatgtgtcaatggagattttttctgttccttgagcccctttcaatttgggctgggagctgaaaaattataggtgcgatgttcactttccgcatcccttttgggttacgttggacataacttttctggggttttttttagggaccattg

SEQ ID NO: 125904 - DNA, 496 bp, Arabidopsis thaliana columbia
ctatgacgtcgcatgcacgcctaccttagcctggattctttagaacgggccgcctttttttttttttttaacccaatcctttttttcatttgaacaagggaaagaatttgaccacggaggggttaccaattgggagaagaaaccgggagagaggttagccgccagaactaaccaacctttctgaaccggggaaaaaatggaagaaaacttttaaacctgaaccacctggtattcctttaaacctcttacccaaaagtccaacccatttattaaggtaggtttctttcctggagaacccaccattggccatccagcttcttatttaaggaccacccccccttaacctgaccttaacaggtttaaacctcgccgaaaagggtaaaaggtggcttatttggttcaaacttccaagaaccttcaaggttggtagaaccatctctcgaagcatatatgtccttttccttaaacctaggaaaatagcccagaaaatgtttta

SEQ ID NO: 125905 - DNA, 497 bp, Arabidopsis thaliana columbia
aactatgacgtcgcatgcacccctaccttagcttggatcctttaaagcgggccgcctttttttttttttttgaattaaaacctaattaaatcacattatggtgcattattttggttccagccccttacgaaatgacctttttgggttaccaccaaattaaaaccccaatggcttccacccattactggttccaatgggccaacccttccattaaaccttccttatgacctgggccggcctggttaactggttttaaagggcaaccgatttttttgaacccacaccggtggactcatgacacaataaatttacctttatgggcaaccaacgctgtttattaaagtcaccaatgggattttcaatgactacggtttcaagccaagctggcctaattttcattttttcgaccaatgccgttacatgggaacgtgaatagatcaagtttttaaactctttttcgtccgtgtacaacaagtaatcaatcggcccagaatgat

SEQ ID NO: 125906 - DNA, 508 bp, Arabidopsis thaliana columbia
tagggtgacactatagaagagctatgacgtcgcatgcacgcgtacgttagcttggattcttttgagcgggcggcctttttttttttttttacacagaagaagggtttaggggtccacatgccgaaaccttattttttttacaaattccggtatttttaaatgccaaaacctggttttggtggtggtcttcaaagaagaattcatgggcctaattttgcattacccaccaaagaatttgggagtattagttccttatcaatccggggaggggtggaaagtcctgccccaatgcccttacttttttttggtccggtggaaggtttcaccaaccggtggcaattttttccttccttgatcaagaaccagccaaatgggccagggttcctgggccttaaccgaagccaaatccaaactcttggtttggggtggatggctcggtattaattcttgattgattctcctgacccccaaggacaaccatggttccggtatcaggctgtggcacttt

SEQ ID NO: 125907 - DNA, 491 bp, Arabidopsis thaliana columbia
  unsure (1)..(491): unsure at all n locations
gattaagggaacttttaaaggaacctgacacgtgcctgccccccttccttagcctggattcctttaaaccggccgccctttttttttttttttttttttttttttttttttttttttttttttttnagagaaccaaaccccggttttccgggttcccggcacctttagaacacaccaccaccaccaccaccaccttggcggttttacattccagccaaaaggcaaaagcttagtctgaaattccaaattccattaattctccaccaaaggcccatttgatagccacaaggcagatgcatgggcccttttcttttttatgtgagactttccaggcaacggttttttaatacaaaacgggtttccccaggctgtgaaaacatttcccgccttgagggcccccaaacccctgttgcatgatctggggaacctcaaagcaaagagtctttcttccatggacatcaaatttcttcttaaaagagatgtcttgaaaa

SEQ ID NO: 125908 - DNA, 417 bp, Arabidopsis thaliana columbia
  unsure (1)..(417): unsure at all n locations
cggattagatnnnnnnnnnnnnnnnnnnnnnnnnnnnnnnnnnnnnnnnnnnnnnnnnnnnnnnnnnnnnnnnnnnnnnnnnnnncttttttttttttttttttttttttttttttttttttttttntttttttnttnnccccaaaaattttcttggttcattaaatcctcacacaaatccacttccccccattaaaattattaaataattttcaaaaaaaaaaattttttttattggaaaagtttggggaggaaaaaaaattgtcatttgaaggaaaaaaaacgttatggttctcttttttacattccatggtgattttctttaaagggcatgggaacagcatcgctttagtttgcgaagtttgggttcctttttttatcgaattttattcgaaggaacccgtttgggttttaacc

SEQ ID NO: 125909 - DNA, 503 bp, Arabidopsis thaliana columbia
  unsure (1)..(503): unsure at all n locations
ggatttaggtggacttttggaaggaacctggccgcggctaggcacccgtccgtaggctgggtatcctctgaagcggccgccctttttttttttttttttttttttttttttttttttttttttttttttttttttttttttttttttttttttttttttttttttttttttnnaaaaaaaccaagggggcccctttttttttttccgaaaagaaacccccccccaccccccggttttgttttttgggggggcaacccaacccaattttttggccgcccccccccccccccggtttttaaccccaaaccccccaaaggtttggggtgaaacaaattttttcacccccccggttttttccttaaaaaaaaattccccggccctttgaaaaaaaaaaaggttttcccccccccccccacaaaaaaatttttaaacaacccccctttttgggttttccccccccccctggggggtggggcccctcccgggggggagaaagaaaaaaa

SEQ ID NO: 125910 - DNA, 479 bp, Arabidopsis thaliana columbia
  unsure (1)..(479): unsure at all n locations
tgnnnnnnnnnnnnnnnnnnnnnnnnnnnnnnnnnnnnnnnnnnnnnnnnnnnnnnnnnnnnnnnnnnnnnnnnnnnnctttttttttttttttttcgtttaatttacatattccttataaaaaatgatgttaaaaacattttttttatggacgggggcgactcctttacaaagaactaaactgacttgttcttgacccttgcttcgaaaagaaaaaaacagtttttgcccactcttccagttcccttcccctttttgaaacaatcccattataggttttgtgaagcccctgatttaaaaactgtaaatgggggtaccaaaacattttttttttttacttgaagcacttggcgatcaagaaagcctccccttccaatggctctggggatttaactataagggtcaaagcctccttttgggcttcatctgggatgtaaaccttgtcccattttatcagctttgtgtatgccacttactct

SEQ ID NO: 125911 - DNA, 499 bp, Arabidopsis thaliana columbia
  unsure (1)..(499): unsure at all n locations
gannnnnnnnnnnnnnnnnnnnnnnnnnnnnnnnnnnnnnnnnnnnnnnnnnnnnnnnnnnnnnnnnnnnnnnnnntttnttttttttttttttttttttttttttttttttttttggggaaaaaccttttcattttattagccaggggagccttaaattggaacatacggcttttctaaatcattacctttgaagaagaaaaaccaaaaccgagcggaatgcccaatttgtttttttttttgattcaacccttccgaaaccagaattccaaaagggaagattattggggaaaccaattaccgaaaaaaagcctggggtggtttggttctatttctttttcaaaaaacccgacccctgggttcaccccggaattcccgaccgggacctggagggggtccaagttttccttatggggggccgattaaaacctgggggaaacaagggcaatagctgttccctggggaaaatggtaatccgttaaaaattccaaaaaaattc

SEQ ID NO: 125912 - DNA, 387 bp, Arabidopsis thaliana columbia
  unsure (1)..(387): unsure at all n locations
annnnnnnnnnnnnnnnnnnnnnnnnnnnnnnnnnnnnnnnnnnnnnnnnnnnnnnnnnnnnnnnnnnnnnncggccttttttttttttttttcgaactaaacagaatttattattttgcccaacaaacattattattgttcacgattatttcggaacggaaatggcgcggaacaatagttcaaagaccttattattacggggactggaaaccgccaagagaggttaattaagggccaagaaacgacagcggttttgggggaaggggcattttcagaagggttccaaagcttgaagaatggcagctttgaccttttcaaaggcttcaacttcaaagctggaaccaaccaaggtatctttggatccctaccttaagtctttcttttgg

SEQ ID NO: 125913 - DNA, 252 bp, Arabidopsis thaliana columbia
cgacctagtcttgggtctttagagcgggccgcctttttatgtcttcttggtcgcggcagcccagccgtgtttctcgtccccgaatgatagctttcttttttagcaattccgcctcgcctttgcagaaggaatgtacccccgctccatattttctcacctcacttgtccttctctcggcgtctccttttgttgggtagtgagcatgatcttcgaggagggaaagcaattcctcgcgagcacgcaacgagcgct

SEQ ID NO: 125914 - DNA, 426 bp, Arabidopsis thaliana columbia
gtagcctgggttcttttgaaccggcggccctttttttttttttttttttttttttttttaacaagaatcctctggataaggaaaaaaattttggctcagaatttaagtttcaaaccaaaccaaagctttctttttggacaaaggattggcggacaaaaaaaaaaaccggccccccccttcaccccggcccgggccaacgggagaattcacaaaaaaggccttcaaaggtggtaaaagctttccaaaaaagcaggatgggcctgtgccaaagatctttataattaccgtcaggtcttatggagagagaaggctccagacgcggttccaggcttcttaagcaaaactccccggacccgtgggcggacccgtgggtcaacccgggaattcgggacgggtacctgcgggcgtcccagttttccctatagg

SEQ ID NO: 125915 - DNA, 519 bp, Arabidopsis thaliana columbia
  unsure (1)..(519): unsure at all n locations
nnnnnnnnnnnnnnnnnnnnnnnnnnnnnnnnnnnnnnnnnnnnnnnnnnnnnnnnnnnnnnnnnnnnnnnnnncttttttttttttttttttttttttttttttttttttttttttttttttttttttttttttttttttttttttttttttttttttttttttnggggaacttgggaaacctttttgctttttttttcccccaacccacttttttaaccccgggggcttttccgtttttgtaaacatttaacaatgggccaattttttttgacccaaaaacaaaggtttgttttaataacccacttttttatttaaatttcccccaagagacacccggaacaggttgtttccccgagctttttaccgggggaaaaggccaataaagggggaggggcctttctaagggccttgagctttttccccaaaatagggaacctttcctctcccccaagggggaggttaaagcccaaaacctgggggtttttttaaaaaattttcacggggaaaaaccttgaa

SEQ ID NO: 125916 - DNA, 519 bp, Arabidopsis thaliana columbia
  unsure (1)..(519): unsure at all n locations
ttgnnnnnnnnnnnnnnnnnnnnnnnnnnnnnnnnnnnnnnnnnnnnnnnnnnnnnnnnnnnnnnnnnnnnnnnnnnnnctttttttttttttttgtggtaataagaatatatatatgaatttcaagttccaagagaaaccattacacacgagattccaatatgagcagagagtaagaagaagaagaagagagttacaacaatgaaaacactcaggagagacatcatgatacaataggcagaacacaacaatcaatggtttgctgctaaacaacttgagaaatcaatttttttctgactatgacactgcagaggagacaccaacacatcttgaagcacagatactatcactcctcattagacatgcagaccgttttaccggagttgctgctttgtctacttgtgacgccttctgtgatgataagccagttgctgtgtttggagtctgtggaggtgtaaacaccactgaagctgagaacgattgagcttgaactgaatcagaaccttcgttttctgatga

SEQ ID NO: 125917 - DNA, 481 bp, Arabidopsis thaliana columbia
ccttttggaaaaactattaccttgcatgccccccttccttagcctggattcttttaaaccggccggccttttttttttttttttaaaccaattttttttttttaccccttcaatttaagaaaaccaaaaagggaggaaggaaggaattaaaaggtaaaaccttatttttaacctttttcttaaaaaaaattaaaaaattattggaccttttacccccaaaaaagaaaggaaccggaaacccaaattgtgacggaaaagtttaattacaccattaattactttcattttttttagttgacatttttagctcctttcttcctttcattataattcgatcgcaaatcttattataggccagtttttacctagttccgtacaatatcttttcctcggatggcgccttgttgagatcagggaggacaaagaacctcccttgattttgcaagtcatctgtttttgcaagattttgacccctgtaccc

SEQ ID NO: 125918 - DNA, 490 bp, Arabidopsis thaliana columbia
ttagggtgacactattagaagaactattaccttgcatgccccccttccttagcttggattcttttaaaccggcggccctttttttttttttttttttttttttttttttttttttttttttttttttttttcaccttaaaccttgccttttaggggggtgaaaccttgtacctttccggtccaaaaaattcaaccaagggggcaattgggattggccttatttctttaaacagttttttatttggaccaaggaaaatgggaatttaattggcccttttttaagcccccaccccaattttttttatttccgttgttgttgaaggcattccttgggccggttttggttttttccccacttttaaacaaaagttgggtttgaaaaaacctcaaaattcccttcgtttgcaacaccaaaaaaaaaatggttgggcgaaaaataaacctttgccccttttggttttgaattacctccaatgctttaagttgaaaa

SEQ ID NO: 125919 - DNA, 494 bp, Arabidopsis thaliana columbia
ctatgaacttgcctgccccccttccttagcctggattcttttaaaccggccgccttttttttttttttttaaaccaattttttttttttaccccttcaatttaagaaaaccaaaaaggaaggaaggaaggaattaaaaagtaaaaccttatttttcacctttttcttaaaaaaaattcaaaaattattggacctttttaccccaaaaaaagaaggaaccggaaacccaaattgtgacgggagagtttcattacaccactaattacattcacttttcttagtggacatctttagctccttttttcctttcactataattagatcgcaaatttcttataggccagtttttatctagttccgcacaatatcttttcctcggatggcgccttgttgagatcaggggggacaaaaaatctcccctgattttgagagtcactgttttttgcaagattttgatccctgtacccgctcgagttgggatttacaattcaaatc

SEQ ID NO: 125920 - DNA, 499 bp, Arabidopsis thaliana columbia
gggtgcaccttataaaagagtcttgacgtcgcttgcacgcttacttaaccttggatcccttagagcggccgccctttcattttcatgttcaccggaccttaccatacttgtctgtaagaagacgcgtggtggaccgcaatgctaccgaataaatatgaggaaagagaatggaacgagatcgatagacaatatgaaactatcacaaatatgttctcgtatattatgatctagaaattgagcgataataatgtagccgttctaaattagggcaaccagtgtatatagtaggcgaagagaaaatgaatagatttatttcacgatacggcgtagatgtggacccgaatctagcttaagctgcgaccaactttattatcaacagtactagagtcaaaccacaagcccaatcagtgtaatagagagggtgcgcggcgactgtggaacctgtggaagacgtgtgaccatcgtctacgaacttaccagaatccatattatcgtaagt

SEQ ID NO: 125921 - DNA, 514 bp, Arabidopsis thaliana columbia
  unsure (1)..(514): unsure at all n locations
gnnnnnnnnnnnnnnnnnnnnnnnnnnnnnnnnnnnnnnnnnnnnnnnnnnnnnnnnnnnnnnnnnnnnnnnnnnnctttttttttttttttttttttttttttttttttttttttttttttttttttttttttttaattttttttttttaaaacaatttaaaccggttttaaagcctttgtttttgagattccaaataaaatgggtaacgggttttatttttccctttctttggaaacacagtaggggatgaaaattttaaagatgcttttttaaaattgacatttttgtttgaaaaataaataaaaccacttttttgcttaggggttttacacgcctttccacattgaattgaacttcaaatagaccggggattccggccgttattttttgacctttttttacggggccaacaccttttggggggcctgtaaaaatgacattttctttgaaaagggtgattatagaacttatgtagctaatggggggggggaccttgaatttaatatttttg

SEQ ID NO: 125922 - DNA, 509 bp, Arabidopsis thaliana columbia
  unsure (1)..(509): unsure at all n locations
nnnnnnnnnnnnnnnnnnnnnnnnnnnnnnnnnnnnnnnnnnnnnnnnnnnnnnnnnnnnnnnnnnnnnnnnncctttttttttttttttttttttttttcaaaaaacccacaggttttatttttgatcagggccgacagaaattacatgccggggggttggaaaatggaccaacctactttggaacttttaaaggtttacccttgaattcaaaaccggtttttttttattatttaactaacttcccattggcttcaaaaccagaaaccggtgaaccaccttcaaaggagggcaagccagccattccttggaaaaacctggggaaaaacagggccccttggtcattgggcctaaaaccagattggaccccaccaatggcagaacctttggtggcccagggaaacccaccagttggaaccagcctggacaaccttttaggcagattaaggacctttttgctcgccaaatcctggcggaaaattctctttgggggctgtttaatccccaaa

SEQ ID NO: 125923 - DNA, 497 bp, Arabidopsis thaliana columbia
  unsure (1)..(497): unsure at all n locations
nnnnnnnnnnnnnnnnnnnnnnnnnnnnnnnnnnnnnnnnnnnnnnnnnnnnnnnnnnnnnnnnnnnnnnnnnnnctttttttttttttttctaataaaggaatatgatttaatacaataaaaagacaacgagtttttcttgttctgtattgtgatttttgacaagaaagaaatcaacctatcatggaaaactgaagtttcctccgatctcagtattaccagccggtggattaatggcgacccaaagaagagaaatggtaatggccacaagaccagaccaaacatacacaatcgttggtgttcttcctcttcttcccattagacctttagcaaatggataaagatgtgccaaaacccaaaaactgaagaacactcctccaatcagtttactccactgaggaaccacactgtaaatcgtcctgctgaatccaaccgcaatcgctatcagattcaccataatgatggtaatcggagggatcataagtgaagtccatttc

SEQ ID NO: 125924 - DNA, 498 bp, Arabidopsis thaliana columbia
  unsure (1)..(498): unsure at all n locations
tnnnnnnnnnnnnnnnnnnnnnnnnnnnnnnnnnnnnnnnnnnnnnnnnnnnnnnnnnnnnnnnnnnnnnctttttttttttttttgctaaacaagattttattccacaaacaaacacaggttacaagtaacgggccgccataattgggccttcaataaaccatattttacattattggcccacttacattaccgggaagcccagttacgttaccactgataacagtcctttagtttgctccttatgctctgaacaaagtaaccacattacctaaactgaataaaaggagctcgcttcttgccacatgtttaacatttttcaacagactgactgtattcttacatgcttggtattatatgcctaatcttcgcagagcacaaattctcggccattttacggaacttgcataggcgtgatctctaaacacttacactccaaaaaccattacccatgataagtggcgatcatccatctgctttatgccataatcctccaca

SEQ ID NO: 125925 - DNA, 463 bp, Arabidopsis thaliana columbia
aacttgacgtgcagccgctcgtagctggtccttaagcggctccttttggttgtgcatggaacatattgtcgggaggagaattcaactccgttcctgtaagttatcacgaaaagcttgcgcttccactacctacgaaattcaataccctcggttatcttgtcgaccttttatcagggggataccccagagtgtactcactcgttgtgggctttcttccaaacgcatacccacccgggcactagttgagattgtgaggctgaaacgatattctttatgcatataccgcacccacgcgctttccctcaccatttctcaagatccaaaggccaatgtacgccaccgattccgcctcacatgtcgccactcaaattaggtctgtctcgggaagaaccggttggtcagaagcacttgttcataagatcgatttggtcatttctggggctagcgtagaacttattgctag

SEQ ID NO: 125926 - DNA, 478 bp, Arabidopsis thaliana columbia
actcactttgggaaaccggccccccgcaggccccgtccagaattcccgggtccacccacgccgtccaaagcctgaaaaaattactaacttctaaaacacttttttgggattaaattatccattagctgcttgattttcattaacaaggcagaagttggcagactggccgtggcaccgaaccgggaaagcccaacctgagaccaacgcctgggcaccgcttatgatgccttgccagccccacaagacaaaacttgtattgcagcgtccaaattatgcttaatgaacaccccccttttccgaaaacctccagttaccggcgaagaaataccaccttgtttgcgacacggcctagcaaatttcctttttgctcccaaactttctaaagaaccgggttcctaaacccttgacctaactccgatttttcaaacctcactgctttgaaccctatcgggggtccctaggcgggactccgatatca

SEQ ID NO: 125927 - DNA, 484 bp, Arabidopsis thaliana columbia
gtcgcatgcacgcgtacgtaagcttggatcctctagagcggccgcccctttggttttttgttttttttttttttttttttttttttttttgggggggatggttcttttttttctccggtgtgttgggttttgtggttcatcggcttaaaaaaaaaaccttgttgaccgggggtttttttcttttccaccccccctttttgccgggggtttttttgagggggtgtggtttaaaaagggtggcgagaaactagaggggcgcggcttcttactagaacctctttccccaagaagaaaacacgggggtgggggggtcctcgtttggcccccggggatttttttaacgggtttgggggcccgtttggcttttttgggccaaatctttttgccccccgggcgcgccgcccctgtttctcccccctattaggtgggtgggtgtttttttccgaggggagttctccccctgttgctttgggtcctcggcaga

SEQ ID NO: 125928 - DNA, 305 bp, Arabidopsis thaliana columbia
aagagctcttacgtgtcatgcgcgcctatcctagagtggatactctagagcgggcgccccctttttttctttgtgtttctttgtatgggactccctttactgtacctcgcttccgagttcgatgagtttctgggaagggagatggaatctttgtctgaaaaagcgttgctttctttcagatgatttatacaagagatgagacccctttgctttcaccatattctttacaaatttcaagggttaccctcagtttatgggcaaatgctgattaatcctgtttctctttcatttagttcctagttctc

SEQ ID NO: 125929 - DNA, 275 bp, Arabidopsis thaliana columbia
gtatatattgctctgggggcgggctggtttttgcgtggactctatgaaagagctatgacgtcgcatgcacgcgtacgtgagcttggattctatagagcggccgcccttttttttcttttttcttagaagtagggagtcattgagtggggctggggaccctttgcctgtatatatggatagaggcagtaaacacccgttgagaaaaaactaagatttccgtacttaatgttaagagtcagagagaactgttcatgtttcacgcaaaaccaaaacct

SEQ ID NO: 125930 - DNA, 535 bp, Arabidopsis thaliana columbia
  unsure (1)..(535): unsure at all n locations
aggggaaaaaggggaaaaaaaactagtacctccatgtctatccaactcacttaagggaaagctgngccgcctgcaggtaccggtccggaattcccgggtcgacccacgcgtccgcggacgcctggatattttacgttatcttctcatctttcaattcatatattagtagaatgagtattaaaataatccatcgggtggctaacgcatccatgaattagcttcttgatcatcaacaaatggtgcatttaagagacaaaggggttccttgccgatttaggaacatgctttcgtggtgaagcaaacggacaatacgcacatgtcgtttctttaggtgtcagggccactaaaagaagcttagataagatcgaccgcgaccccttcagtgtgcggcacccctcactagcaaatccaacaagatacctacacgcgtaaaatgcataacatatcgcagttgcggctgctatgtgcccgccctcgtttaagacagccgacctactctgtgctggtaacaaccccagatggatcgcttgacctg

SEQ ID NO: 125931 - DNA, 507 bp, Arabidopsis thaliana columbia
  unsure (1)..(507): unsure at all n locations
ctctattccgactcactatagggaaagctggtccgcctgcaggtcccggtccggaattcccgggtcgacccacgcgtccgcggacgcgtgggttttttccgtttttttttcatcttttaatttatatattagtgaatgattattaatattattattgtgtggcttacggattcatgaatttgcttcttgatcatcgagaaatggtgtatgtaagagacgaaggggttgtttggtaatttaggaacatgtctttctggtaaaaaaaaaaaaaaaaaaaaaaaaaaaaaaaaaaaaaaaaaaaaaaaaaaaaaaaaaaaaaaaaaaaaaaaaaaaaaaaaaaaaaaaaaaaangggggcggccgttttaaaggatccaagtttacttccccgtgcttgcaaggtattagtttttttatggggccccctaattcaattccacggcccgtcgtttaacaccgtgggaacgggaaaaccccggcggtacccaaattaaatgcctttgaagaa

SEQ ID NO: 125932 - DNA, 106 bp, Arabidopsis thaliana columbia
acctgcacgtactgtccgatatgggttgccacgcgtacctcacggtacgacgcctgataagctcatacatgtctagccatagaacacgtggatagggcatgattta

SEQ ID NO: 125933 - DNA, 495 bp, Arabidopsis thaliana columbia
  unsure (1)..(495): unsure at all n locations
nnnnnnnnnnnnnnnnnnnnnnnnnnnnnnnnnnnnnnnnnnnnnnnnnnnnnnnnnnnnnnnnnnnnnncttttggttttttttttatgtattcagaatttactattcattctgatgactgaaaaaaaacccacaatatggcgccggatattccgaacattggagaaatagcaactggtccagggggctcccatttgccatggcctttttacagaaacgggggtaaatcgcaaaaccggaggacgatccctaatcgcacaccatttttagataatcagcgttgaaaaataggtttccagaatcctgagcaagaggtggtatatggagaaattgaacctgctaaaaaaagaacaaagccttgggacaaaacctaatggttctattccgagggggaaccagggtgagtaacaccaatacttggggtggatctcttgcccaatttccagatgagaacatttaccaccacttcctcgtaggaagggcctacccggggg

SEQ ID NO: 125934 - DNA, 544 bp, Arabidopsis thaliana columbia
cgatttatgatgacctatgacaggagctatgacctcgaatgcacgcctacgtagcttggatcctctagagcggccggccttttgattttttctcataagccaaacatagtgcatccttgtcgaggagaattaagaactgttcatatagctttaaaggtttgtcaccattaaaaagctttaaattctttcgaacaatcatgatccagaaattgataagacccctaaaaacctaaactaagctatggcccggaaaatcttttcataaaaacacaatagtctttttatatcgccacgataaggcctttctactagtaaatcgaaaccctctttttaccctgcccttggtccattagggccattaagggtgagacccatatatacttattaagaagcctttctcattgagacctcgctgttaccgtgttatactatgtttctataatggaatgagtgggaattgttcaggataccccctcctggtcattgtccaggtaaccattctcctctaacctgctgcattctatcgtctaaagccatctccgaa

SEQ ID NO: 125935 - DNA, 462 bp, Arabidopsis thaliana columbia
  unsure (1)..(462): unsure at all n locations
ggtggtagatatgtgggtgtctctcatggaaagagctatgacatcgcatgcgcgcctactgtgaagctactatcctgtagagcggccgcccttctaatatctttggttttctctnacagtggaaaaggcaaatgaagttttatcaatgatagagcgataactagtgccgtggtgagacaaattaatatccaatcccatagggtctgggttagttactttaacaatgatgaaactgaatggaaacttagggagaggtttgtaatatgtaccataagtaccttgagcgtgaggaaatccagcacagtcgttacaactctgagcgaacaagccccctagaagtcgttcttggatcaattgttaatggtctttgtgttcctctacttacgcggtgtgcatttcgggctatttgccccagagacgggttattggtaggggggtaccgctttaaaggccgttcacgct

SEQ ID NO: 125936 - DNA, 135 bp, Arabidopsis thaliana columbia
tatataaggcgactggtggctgtagttagccgtcgacctactagtgcgaactattctatagtaggaagactgggtctaccctcgagggagcccggcggccttgattactgtgggtggcggagcctactacggtcg

SEQ ID NO: 125937 - DNA, 539 bp, Arabidopsis thaliana columbia
accctaccctgtagagctgggaacctctatagaggggcgcgctctttttttttttttttattagtgcgaagcaaaccatcagttaagaaggcgggggcttgagtttcggggactgaaccggggaaataccttttcaccatttcatataataacagcatcatctaaaatcgtttatctggacctgctttagtcatacagctcggagggctagaatcttatctctcggaacttctagatggatagtcagtactgagttagactgtcctcattggatcaagcccatagcagcagataaagagggatccttggtaatagatgtggactacctgcataaacaagttggtctatatttaacaaagtctgggacaggtacatgcataagcataatattatttgcaagtttttaaggttccgcagaagcgtagtatatctttatattttgtccaagataaggtgcacctgaagacttggttcacgtttgggcccagagctatactcaaaaaatgaagtatgttttggaacaaacaggcgaatgatat

SEQ ID NO: 125938 - DNA, 249 bp, Arabidopsis thaliana columbia
aggaggaaagcaaggacacagccaggcagagaacacggggccaggaaaacaccgggagcgaccacacgcgggccaggggaagcagagacagagaacgggaacccgaactgcggagcgaggaaacgacaacagggcacaagcaaagaaggacgaaagaacgcgaagggcaccggcacacacaaaagaccaaagagccagagaagaaacgaacgccaggaacgagaaaccaaggacgacagcgcaaaagaa

SEQ ID NO: 125939 - DNA, 482 bp, Arabidopsis thaliana columbia
  unsure (1)..(482): unsure at all n locations
nnnnnnnnnnnnnnnnnnnnnnnnnnnnnnnnnnnnnnnnnnnnnnnnnnnnnnnnnnnnnnnnnnnnncttttttttttttttttaataagaagatgttcatttgattattagtacatggagtcttaatttgggaaaataagatgttctttgtgagccatggtctactcttgtgtgcttaaatccctttttttttgaaattcatatttactagtctctaccccccctaaagaaccttatttaccaacatctcaaaggtcaatttaaaagaaccatgcctatgctccggtcctttatatcgcaagcgccggcactcttacgccttatattgatatgcttcccttcttttcaatccataactccttaccacggcctaaactttttttgttttacatttccacccatctaattcccaactcccattcgaaaccaaaaactaccatttagttgggggctctggaaaaaacgggcaccacaccttg

SEQ ID NO: 125940 - DNA, 536 bp, Arabidopsis thaliana columbia
aggtgaactatagaaagagctatgacgtcgcatgcacgcgtacgtaagctttgattcttttagaggcgcccggcccttttttttttttttttttttttaaagatggaaggtcccaggtaacgggtttaaaaggattttaggaaccaaaggaagttcttatgcctccggattaccaaaggtaaacttttaagttaaggttgaccaaaacccaaattcttagttattaccagcataacttttttgggccaacctaattccaattctaagaaagacaagggaaaaaaaaaatgattttatcaacaatgacccgtaggcagatctgatctctcagcacttcatttacaaccttaccccgggtgggacttttaagccttcatatgacaggcatggttgctacaccggttattaagacgaccactgtgtaagttcgaacagacgggtttttcccagattggaatcgcctagaccccggttacaagtcgggccaagagtgggccccggggaacaccgaaaatgacgatgaagttgcctcccct

SEQ ID NO: 125941 - DNA, 565 bp, Arabidopsis thaliana columbia
gacaaaggaaaaaaaaatttgcagtgtctctgttgctctaaactcctttttaaggaaagcagcaacgcgcgcggtcccaaagaatatctggggggacacatcgtccgcgcccccaaaacatggatggagtgagacatgatgtatacaacaacacctactacggaccgacaagaaggctttacgagatcacctccacaaccacgaggcagtgagtccgaagcagcgagacctgctagaatgcatatgtttaaaaaacattgtaaaaaacaggtccgaatgactagccagagtcacagatcagtccattcgagaaaaaaggacgtggcggaagaacaaaatgaacaccaaggaagtaggacaccgcgtcaaagccagggaacacacaaaaacagtaaacgatatactacacacagcccaaaacgaacgcaatgagggacagaacactaacagtatcacagctggtactgttgtcaaaagctaaaagaagtgaagttcacaggctaaagcatggggagagcacacccacaaaggatccaaagacaaacagatcgaaatgaacagaagt

SEQ ID NO: 125942 - DNA, 478 bp, Arabidopsis thaliana columbia
  unsure (1)..(478): unsure at all n locations
nnnnnnnnnnnnnnnnnnnnnnnnnnnnnnnnnnnnnnnnnnnnnnnnnnnnnnnnnnnnnnnnnnnnnnctttttttttttttttttagcatccatatctttacatttatttagattgactgaaacaaacccctaaaacgggcccggaatttactgacaattggaaccaaaaaaaaagtggtggggggcacccctttgacatgtcctatataaaaaccaaaggataacccggaaaaccaaaaaacgatcccttattcaaaaccatttttccaaatcgggataataattatagggttgccttcatattgggcaaacagtgtttcttggagaaatggaaggcggttccaataagcaaccgatcactgggcggatacctaacttttttcttgtcgcgcggggcacagggagtgggttataacacattacagggggtgccctcccctggccaaatttccccgacggaaaaacatgttgtag

SEQ ID NO: 125943 - DNA, 462 bp, Arabidopsis thaliana columbia
ggaagccgggccacccccgcagaccaccggacccaggaaacccccggggagaaacccagccgggcgcggggcagacgagcagacggagcccagccaagcacacagagcgaagagcacacccacacgcgaggcggaccaacggcccgacaaacgcaccggcagcacggaacaaaacaacaaaaagccaagccccgccaaacgacgcaacaaaacccagcagaaaagacggaacgaaagagagaacaagcaacgcagggagcgcaaaaagcacggaacagggggaggcagaacgcaggagagacacggcccgacaccaccaaagcgcaggcaagaggcaggacagagacgcgagccaacgggccccggcaccacgaagcagcagagagcagaagccggaccgccacgggcaccacaacggggagcacggggacagggcaggacccacacaggcagaacacaggg

SEQ ID NO: 125944 - DNA, 418 bp, Arabidopsis thaliana columbia
  unsure (1)..(418): unsure at all n locations
nnnnnnnnnnnnnnnnnnnnnnnnnnnnnnnnnnnnnnnnnnnnnnnnnnnnnnnnnnnnnnnnnnnnnnnnnnnnnnnnnncttttttttttttttttaattattcatatcttactattcattcatatgactgaaacaaaacccatattagggcgccggatataatgaacattggaaacataacaaagggtggtgggggccccccatatcacatgtccttttaataaaaccaaggataaaccgcaaaatcccaaaacgagtcctaatgcgaaaccatctttacataaccagataacaaatatagattgccgtcataatgggcataaattgtatcatagagagatagaatgcggtcgcagaaacaaccaatcacttgcgcgatagccaactgtgtattctccggggcgtctccggagt

SEQ ID NO: 125945 - DNA, 402 bp, Arabidopsis thaliana columbia
ccaaaacaaaactcttaagatgcaagcgcacctatcgcagcagctatgatctagaatggccgccctctgtgagcttggatcctctaaaagcgggacggccctggtacaaagttttttttacagtgagcaaaaacatataatctcatctcctgagaagagaagggaataaaagtaaaccacatcgcaccagccccttaaagggccaatatcaccttctgaaagggcataaagatactgtaagcaacaacaaatatggtcgagatagtcagcgggggccacatgaaactaacgcataggatctaacgctggaagaaatgccccatgaagagcaaaatttcttttccgacaccccaggaaggaagacacgcacccccggacaaaaaaaagaccacaacacccccc

SEQ ID NO: 125946 - DNA, 249 bp, Arabidopsis thaliana columbia
tgtgctctaaagccgataaccatctttcgggtaacctagcctactccgtccctcgggaaccacaagggggtagacagggatattcacctgttggtcatcgactaccgctttccgcccggtcttagggccctgactcaccctccggtggacgaacccttggtggaggaccctatggggttttcggggcctttggattcttaccaatggttggcgttacttaaagccgacatttttcgctttccgctttcg

SEQ ID NO: 125947 - DNA, 564 bp, Arabidopsis thaliana columbia
ccccacccaatcaaaactctgaatctcctaaagagccttcccccttgggtctgtggaccctacaaaacacaagcaatcatcactgtggtaaggacgagctttgcttacaccgatcaatcaagaaataaggccttaacagcctcccatctgcaaactgaacaccccaatacattaaattggccctctgtcgccagcaccccggaacttttatagcaggggaccaaacactatacaagtaaaaaagctactgccaagaaccaagactactgaagctcaccctaccacctagaaaagagaatcaactcataaacaccgtccaccccaacaaaatgcggataacacccaagaccaccttgcaccgattgggccaaacccacacttcatacaacatcttatagggacacaggactcatcacaacttgctttttgctaacaaaacatttgatgttacaattaaaatcacaatagcatctctcgcccactcatccgacgaagtcctcaccctcactccatatcactatggggcagagctacagaattaagcaaactcagctcaaaaaaaat

SEQ ID NO: 125948 - DNA, 445 bp, Arabidopsis thaliana columbia
tgacgtcgcatgcaccgcgtacgtaagcttggatcctctaaagcgggcgccccttttggtgttttgtggttatacaaaaaggaggcggcctctccttttggggaaaatgggggagcaaagaatggcaattcagagaaagcgcgtgcggggccggaccacccaaagggggctcaagagctggagtaatcgaaggaagcatagctatgccaaaactggtgtttataacgcgggggaccaaccattaccgaggggggggacaaacgagaagcaccgcgacgagtctgccaaaagctctcctagagaagaggagaggacgacttggaagcggggtagatcttccgtggatcacgaggaggcatatatacgcccagtagtgaagaacagacgggatgtcgcttagagggaattcacatactcgcaatgaatgcgcgagcgagaaatggag

SEQ ID NO: 125949 - DNA, 375 bp, Arabidopsis thaliana columbia
ggcagcccccccaacgggtgccaagaggttcccggggggggaccaaaagggaccccccatgaccgaaccataagacacccccgagcaaaggacccagtgaaaaaacccacacggggctaaagagagggcataaccacacaccttccccggcggaacccccagcgaaagcccagaacgcccctcccccccgggtccgccccccccaaaagcccggacctcccgcggctcccccggggccgcagcatcccgcaggcggcccccccccgccccgcgggagataggcgggataggccagaccacctgcagactgcagggcaggaggagccgaccgtaccgcatgacgcggcaaaccccggcggggcgagaggacgaggg

SEQ ID NO: 125950 - DNA, 575 bp, Arabidopsis thaliana columbia
aaggcggcagccgcccgccttcaggagctgggatcctaaagagggggcgccctttttgttttttttttataggttctgggtacttctgggcaggcggcgaatcctttactttttctctctgaatccgagcgtaaacattctgtgagacaaaattttcttcttacacttgatccatagaacaagagagttttgtattctcgaatccaaaaattttatctccggtggtaagtggcggctcacttttggtgggctttattaagggggtagactctcgtgcttggaaacaccgccctctgacgattgtaatagcttccttctgtctgggagaaggggccccccacaccttggtatcaaaggcctttcacggggattagttgtatatttaataacaaaatctccgactgtgaggaaaagaggcctaggtgatttatgccaactcctggtttctatatggtatccgttcgtggttctttggagtggggcttcttcctgtcgggctacttattatactcattgcatcagcgtgtagaacacgtctgctaggattcaacacagcgtacgttatttctcccttt

SEQ ID NO: 125951 - DNA, 550 bp, Arabidopsis thaliana columbia
acacttcacttttaggaaaagctgcaacgcttgcaggcacccgtccggaatccccggttcgacccacccgtccgctcttgctccaaatttcatctctgcgccgcttttcctccttcgccatagtaattccccggaataattatctacctatgcatctcccaacacctcccgtaaacaatgccctatcttcccgcccttaccctctcaattcctcgtcgcgacctgcgattccttccctctaatttttcaccacacatggtagactaatcaaacctctccgagagttattcctagctggtatcggtcctgttccctctcccgtattcaatttaccggatctttcccttaccacaccaactaatctgactcacggacctattcacctgccccctttgaatacccctccgttctccaacagacccccataccttctgtcttactctattcagacggccctcctcgccgtggtggaccccttttcacctttcaccttcttgagcatcgcctcccgcgcggcacctttatccagctttccttatttacatatggt

SEQ ID NO: 125952 - DNA, 497 bp, Arabidopsis thaliana columbia
accgtcgcatgccacccgctcgtaagcttggatcctctaaagcgggcgccccttttttttttttttttataaaaagaagtttatttggatttgaccccaagggttctttatctgggaaaataaaaagttcttttgtgaaaaagggaacaaaaaaaaaaacttcaaaaccttaactcctacccctccaattttacaaaacccaaccccccaaaagaaacctggtgacaacccttacccgggggaacggaaaataaccaatttttttctcccccgccttcattaggctaggccgcctttaatcccacttaaaaacccacgcctccccgtcccttagccccctacctgcaataaacccccccggaaacacttgaacccctcacgtcccaaaaaaaacaattcgacaaccccggttgcccaaaaagaatccaccagttcctcggaggaaggaaaaacccccacaactcccattggagatccccccgaaagctcttccatat

SEQ ID NO: 125953 - DNA, 318 bp, Arabidopsis thaliana columbia
cgactcacctatggaggaaagctgggcccccggagggccaggacagaaatccgggagcagcccacgcgtgcgcgactcatcatggtctatgcatttcatacttagagtagttattgttactggctagtgggcggaataaaggatgggggcccacgattacgcgggccgtacactttcagtgttacgatgtgctgcgacgacgacgcataagggtgggtgataggacattaagggaatagatccacgggtacaaatatacgctactcgacagaatggaggagaataatggggccgtacacttggtatgagcagtgaggt

SEQ ID NO: 125954 - DNA, 503 bp, Arabidopsis thaliana columbia
gccccctttttttttttttttttataaaccatggttcttaattacagttttgttggctgacctattcaagcaacaacaagaacgtttttattgggctgaaaaacacttcaaccactccaccggtccgttagcaggcctaggcgctgaggatctctaaataacacgactttaagagggggggggcaaaccccccccctcgccaaagcgagtacatggaataccaagagtatcactcctatatatatctgagtcaataataggtgtttcttcacttttagggattcctacaagccgttaacgcccgtggtccggtgcctaaacaccccctcactcggagtattcctcatccctcccttggggcgtaccgcacacctcggcgtgcgtgagatggcttcaccacacccatatcccacctgagtgtgctttcgcgtaccgccagagacacaacggcggtcggtgctctatcgctccttgtggaacacttgcgtctctcgacccatgta

SEQ ID NO: 125955 - DNA, 375 bp, Arabidopsis thaliana columbia
agagctatgacgtcgcatgcacgcgtacgtaagctgggctcctctagaggcggccgcccttttttttttttttttatgaactgtattaaatttctatcgctgatccgtggattcagattttcgggcgccttgagcattgtttatcgctctttcccagttttcgttgggcaacgtccctgacccacaaatgaattgacatgcccttcaggagccccatgtgcctacaaaggctagatgattacggcctgaaattacctggaggaacgatacactgatgcgtattctctcgcccatacattcaatatgtttagaggccgcccgagggagacgtgctatattctgactggaggcagcctgagactggcacagaaacaa

SEQ ID NO: 125956 - DNA, 555 bp, Arabidopsis thaliana columbia
gctacctgatgtaactggagaggagagcattagaagttttttgtctatacgactcatattgggaaagctggtacgcctgcaggtaccgggccggaattcccgggtcgacccacgcgtccgggctacattacagggaccgatctatcctaagcagacattgctactttgcggcgtctctgcgaccgtgttctctggcactgtcccggaatgtagtgactgagaataccactttggggagattttcgcaattgatagctgaacagtggctggtgaatatctctgtattggtaagccgtcgaatggtgctccagtagattaaaaccgagcacagtgttgtggtggcagggctcacagtgccgcactaggcacagtgaggcagagcacgccccatgactcacccagtggccatcagaggggatcaccaataagcgtctggtagccacccaggtatttgtgcatccatgactcaagcagccgttgtgaaaccggacagaaagttgtatgccttgttgaatcaacggaggagaatctttccgatcgtcgcatgttccgtct

SEQ ID NO: 125957 - DNA, 274 bp, Arabidopsis thaliana columbia
ttgtgtgggaggtgtcacgaaggctgggttgctcttggggtccttataaaaaatcttagatttcagtgcacgcttacaagagggtgtatcctctagagcgcgccccctttaaaacttgggaccccaagggaggggcgccttttttgtgtttttgtagcacacggaacgcacattttttccggaggaggcctacacactcccggctgtaaaagaaattttccccttcacgctactcgttatagtcgcgagaagggcggcttcaacaccactcgct

SEQ ID NO: 125958 - DNA, 511 bp, Arabidopsis thaliana columbia
  unsure (1)..(511): unsure at all n locations
tattccaattcattatagggaaggctggtccgcctgcaggtaccggtccggatttcccgggtcgacccacgcgtccgcggacgcgtcggtgcaatcgtgggatgtgcaacgcgtgtcctacaccaaaaggattactcggatggagtgataaatgcgcaccacctaaaacgacgcagttttgcagcggagtcaagggtaaaactgtcaattattataagatagtcggtgttgagcattttactgggccttatgttaatgatggacaaggcccaacttctgtgaacgattgcaaggccaagtgcgatcgtgattgcaagtgtttgggttacttctacaaagagaaagacaagaaatgtttgcttgctcctctgcttggtacacttatcaaagatgccaacacttcttctgttgcttacatcaaatattagtgtttttttgggaaagttatttaccgaattctttntgaattcttagagatttaatgaataatcggtgtgcttgtaatgatcca

SEQ ID NO: 125959 - DNA, 454 bp, Arabidopsis thaliana columbia
agacttgtatgaccatgcctcgcctcctaggctaggaatccttatagcgggcggcctttcttttttttttttttgacgaggctggggtcttgttaagactgcggcggtatccttttagaatatctaggcacccatagcgtacagtaggactgaagacatgacacatcttactatctcaagagagccatagacgccctggtgcatggtatatgtaagatctctacctcgtggctaatcattgcagggagacaccgctccgaggggagtagagccatgggaattacaattgctacaaagcctgagctcatcagagtcctcagaagtcaaaagaggacatagactgcaatgtcttgtgaaataaatttccctccttcgtcaataggctgttcacaacgactccgccggtcgtgtattatgtgtagcaccacagcgagaatgataatgagcgctctga

SEQ ID NO: 125960 - DNA, 492 bp, Arabidopsis thaliana columbia
ggaaagctggtcgcctgcaggtcccgggcccggatttccgggttcgcccacgcgttcgcggacgcctaccgccacgccgtccgtttgtcccactctctcttttctctttctgtccaaagcttttgaaatctcagatatacaaaacaagataaatctactaaaagaattctgaaataatgagttgcaatggttgtcgagttctacgaaaagggtgcaatgagaattggatcctccgtccatgtattcaatggatcgaataacctgaagctcaagggcacgccacccgttttctgcgttaagtttttgggccgtggccggtttaatgggttttattctgcgaccgacccggaatcttaatgcccctgtacttaaaaacaaaaaactgttggggcctttagatcttcgagtaaacgttgtcggtgttgtttctgatgggaaagggattttggcctttttacagtgtggaatgagctttggtatacaaagcttggg

SEQ ID NO: 125961 - DNA, 522 bp, Arabidopsis thaliana columbia
ccgacccttattattagttgctcgcaccccgcacaagatttttgagcgcataagcacagggccccttccccaacaggggaaggggggaaagaggtagtacccgaggccctttgtggaggatacccgcccacggcgtccggttgtagataattaaatcaacaggcgcagaaagaccaccccccaacaaatgaaagaattgatacgagatgtgacacctgcacttcgaaaaaaaaggatagtattaacacacaccccggcaaaagacctgctgtgagctatgacatgtcctcccgccagcccgctatcatatatcaatagagagaccatgttcccgcatactaaaggaggaccctctcccatgctgaggcgcaaatcctttgaacagggcacagagtcataacacttcttgactgccgttggcatggaatgagatggggtcgagtacacagcgtccccaggcagtgtgtatgcaacggactgcttactactatttctcaaactaacgatgcacgcatatcttga

SEQ ID NO: 125962 - DNA, 238 bp, Arabidopsis thaliana columbia
  unsure (1)..(238): unsure at all n locations
ggnnnnnnnnnnnnnnnnnnnnnnnnnnnnnnnnnnnnnnnnnnnnnnnnnnnnnnnnnnnnnnnnnnnnnnnnnnnnnnnnctttttttttttttttcattgttaaacattattcattctgaaaagaagaaaaaaaaacaaatcataagctttaaagcttatcatctttaaagcttatcatctttcaacaaacataccaaaatgcaaaacccttaaaactaagcatgcttagcctgg

SEQ ID NO: 125963 - DNA, 491 bp, Arabidopsis thaliana columbia
cggcctccccctctccttgtctagttctttcgcaagacacaccactgcaccattaggagaagcggaaaggattgctacacgtatctaatgcctcaagccaacttccccctcagaagggaaagtcattacacataaacgcacctgaatcttaggagtcaagtcgacaaacaagacccggaactttactcggacgcgaaacgaacaatttcacagacgttatacacctccaaggcagcccaaaccagcgcgcgtgccgcctcctagtctcaccaaaccaaaggaactctccgatcgcggccttcttaaatgtattactacacaacacctatacacacctaacaatttaaagccccagtccaagtacagcaaacgtgatatcgacatacccactatatcaacctacaatcatccgtagcgcacaccagcctcccacaacctccaagagggatctgtgcacatcctaatagcagcactataagtataaatttgac

SEQ ID NO: 125964 - DNA, 519 bp, Arabidopsis thaliana columbia
atttactcggaatcgctctgaagggaccttccaacactaacagacaatatgtgtgctttggtgataaaatctgaaataccgccaccagaaaaaaatatggtcagcgttggcaaaaaaagttccgatccttcttaagggtattttattgcgcctaaatcaaaacgtgggtttgaagaagaattttattccaagcccaactctagtgaagggcccggtgtgaaaaaaattgaactccccgaccatggggtcccctgcttgagtaaggtaacaagttaaagggttcggttccccagaattttttgggccttttgccatggccgagatataaaatcgatcatgggccccctatcttcaaggtagggaacaaagggctcctttttattataaagggtacaaaacggctgtttgggattcgaattggagtccgtaaccagattgttcttgtgttttgaagacctagggaaagggggggggacacctgtgggggggccctggggttatatgagacggcgcttaagg

SEQ ID NO: 125965 - DNA, 382 bp, Arabidopsis thaliana columbia
agctatgacgtcgcatgcacgcttgcgttaggctgggatcctttagagcggccgccctttcttattttttttagtgtcctatataaattctagtgagaagagaatgagtctggttcgagagctaggtgaggtcacagtcactctcggttgctcgcggggaacagaccccggagttactcccacgcctgctgtgcccttcgcgaatagggattggcttatgttcgaggctttcagcgggggagaggttgcgatacgttctcccacgattaatatatattcacaccatataggagtagatgtttaagtggaggcccatccactacacactatctattgctcagcatggcgcccgcgtctaactacttctttgtatttcgggagg

SEQ ID NO: 125966 - DNA, 524 bp, Arabidopsis thaliana columbia
atctaagagatatgaggttcgatttttaggagcctctatgaggacattgtaactgcatgccacttctacgcgagacttctatgcctctcgagagcccccccccttatcccttggactccaatggagggggcgctctttatttttcaatcgtatgggaccacgtcggcttgcacacgacgcaacacgagctccaaggcatcctataaagatcccctagctgctaaaatgtatacgctaagttggggggctcactccgaaaattgtgatgtgctagaacacaatccctcccaagtgatagagcggatcctgccagcccctcatcgaataaacaaggacggtccatttgttccgtaaacattatatctagtatgtagatatctcaccagctgctctcagcgcaaatatctttctccttcttagcccccatgcggtgtcacacatgtacgtgaatgaaatgcgacagagctggctttacttacgttaattctattccgcaagttactacttaagctcataacctccca

SEQ ID NO: 125967 - DNA, 376 bp, Arabidopsis thaliana columbia
gcagaaccacactttaggggaaaggcggggaacggcccggcagggcgcccgggaacgggaaaaaccccgagaccgaacccacagcagcggcggaacacaaaaacgccaagaagagcgaacacagccgaccaacaggagagcgcgggcccacagcagggcagaagcacaaggggacgagaggcgcccgcgaagcagcgcatccaggaggaagagcaaaaaaggaacgcggaaaacgagagaagaaagaagacgcctaccaccggccgaaaggcgcaacagaaggggggagaggaaataccagaccaacgggaggggagagccgaggccaggaggcaccaggagcagcagaagagaccggaaccaccaaagagcggga

SEQ ID NO: 125968 - DNA, 257 bp, Arabidopsis thaliana columbia
agcgctatgactgtgcctgcgcacgccctcgagggcttggacctctatagagggggccccctttatagcattggtactctgagcgagggagctctttgatagcgcacgggttctattagcgttatctccggcagggcggaaaaccgagccgtgtggacaagagagtatcgtttctcgcccggattgcaaacagcaggggagtgctgttctcctttctccagacggttaccttctctccagagtcagaactcagactg

SEQ ID NO: 125969 - DNA, 320 bp, Arabidopsis thaliana columbia
ggcaccgcccgagtgacctaagcgccccttgttgtttagaaaaccagaatcccagtaagcaattaaacagaacgtacggaaaaagggactccaaaaacccacccgagtcaaggcccgcaccgcgttgaggggacccgcaggggaggcgagggcagcagcccgacaacagcgaggacagaacacgaaacagagggccaccgcgcagaagcaaaacaagaacttaccccgaaaaaagcataaaaccacaagccaagggaacgggacccaaaaaagaaaaagaataacaaacagcgaaagaaaaaaaagaagaccaaagaaca

SEQ ID NO: 125970 - DNA, 530 bp, Arabidopsis thaliana columbia
gcaggcacgcgtacgtaagctaggatcctctagagcggccgccctttgttttttgttttttataaaaatgccgcatgcttccggacagggggtcataatccaggtgggaaagcacagcgccacttggcacctgggaaaaaaagccaaaggccaccaaacccagcaaggccaaaccaaaaaggctcctccctatccacctaataatttcgcggggggaacgccccccccgcaacggagactaagtgacacgaattgagcaccctggtccctccatatgcgcgcacggcgagagttagactaccgagcactcggcaatggaggtgattcaccaaaagggggcgggtaaaaacatactacgggcagggcatgcgtcagggcgcttctctgaaggagagccaatccctaagcgagagtgggcgatgaccaggagccagtagatctcaagagagagctcaccagggacacacagacaccttaagtacgcacgaggacacactaagccacaatagacgctgagcgctcattcagtc

SEQ ID NO: 125971 - DNA, 218 bp, Arabidopsis thaliana columbia
gggggaaaggcgggaacccccctgcagggaaccagggaccgtgaattcccagggtccgacccaacgccgaccggagtaagaaaagtcgtaaaacgtcgcaaagagaccgtcgaagtaggggagaatccagtaaatcgcctaggggaaagattcaagcgagggaagaagaccccctaggggtatcaaggagggcgtgggcatgtaagtgaccagaccac

SEQ ID NO: 125972 - DNA, 242 bp, Arabidopsis thaliana columbia
  unsure (1)..(242): unsure at all n locations
gnnnnnnnnnnnnnnnnnnnnnnnnnnnnnnnnnnnnnnnnnnnnnnnnnnnnnnnnnnnnnnnnnnnnnnnnnnnnnnnnctttttttttttttttttttgatcaaaacatatgaaggaacaacaagccaccttttttcagattagattgacacaccgacctctatactcccatctgactaagaacttgaatacacgactttgccacgagacaagagataaacagaactgctctaaacacc

SEQ ID NO: 125973 - DNA, 282 bp, Arabidopsis thaliana columbia
gtatctatgaaaatagctatggacgaggcatgcacacatatataagctactatgcagtggagctgccgccctttatttgctttggtttgttatagaagcggacatgggatattcagaaaccaagtcataggtcgagcgatggactgctctgtggaagaaagagtgacgtaaccatctccactgcggcgacttacagagctgctagttcagctctctagagcagctggtgcgaagactatattatagagttagcgctaccggacgcacgggaacattgtattg

SEQ ID NO: 125974 - DNA, 109 bp, Arabidopsis thaliana columbia
gtaagtataacgtcttagtgtgacgagataactgtcaaaattgtgttctaatctttaagtcttcttccatattggtagcatagggttgttctgcgtctctcgtatccgt

SEQ ID NO: 125975 - DNA, 549 bp, Arabidopsis thaliana columbia
  unsure (1)..(549): unsure at all n locations
acactatagnaagactttgacgtcgcatgcacgcgttcttaagcttggatcctcttgagcggccgtccttaggtggaagagggttgattaagagtcgcggcgtctttttttattttatggaacggagaacgattgggtgtaaaacctaaaccccaatcgtcattctattagccctaagttcgacttggacctggtttaaagatacaacgaacagggaactcatcttgggcctttttgtttaaaccggggtaaacttttatccaaacgagggaggaacctttgggttacgtgcaataaaaggccgaaaagggacccttgattgttttcgtaggaaaaagattggtgtattaaggatcttttgaccctttacactgagagatcaaaaagtccaccgtgccttggtaccgcttctggtggacggacactcaatgggtaagctattttctcctggatcatctgagtttaacgagtatcttatcttgttaaaaaggaaatataaaaaccttgggccaatagttgccaaagccacaattggaactttaagggcaa

SEQ ID NO: 125976 - DNA, 556 bp, Arabidopsis thaliana columbia
  unsure (1)..(556): unsure at all n locations
cgattnnnnnnnnnnnnnnnnnnnnnnnnnnnnnnnnnnnnnnnnnnnnnnnnnnnnnnnnnnnnnnnnnnnnnnnnnnnnctttttttttttttttttttttttttttttttttttttttttttttttttttttttttttttttttttttttttggggggaaaaaacaattttattttttcaccattcaccaccaatgataagtttcaattttaaaggcttttgaaattttggactttttttggcagggaatccaaattaaaaaaaaaggggttaaaaaattatttacaattttttttcaattcacgggtttttcaaaaaaatttttgccccataaaccttattttttcgggaaccttttaaaagttgttaaacccccttggaataaaccaaaccgacctttttttccaaacaccccctcaaaattgtttaatagggcccccccaaaaaaccccttcacattggccccatccctcattggtggttgaaaagcttttaaattcccccccttgtttgggacccttttggaaacattaaaaaattttttatccgttgt

SEQ ID NO: 125977 - DNA, 539 bp, Arabidopsis thaliana columbia
acgtggcatgcacgcgcccgtaagctgggatcctctacagcggcctccctctttttttttgtgtttttatactgcccgaggtctctaacaatgggggccgagagccgaatccgaaatgggcatcagcctgcacgacatcaatgccaaaagaacgaagatgacgtccatcccatggagtggagagaacacagagtcttggaacgtgagcacacctcttttttggagggggggcgaggactatgacagggggggtggacgtgagagccccccgccctccacaacactgctgaaatcttcaggcagtggaaatcacatcgcacaaagcaggagcgtgctcccccctcaagatgagctttcggaggggagtttttgtaaattcggttacgccccccgactagctaaggccctggatccagagcggtccgccccgcttgagctggccagtgtgaccatgggttgtcgcgctcacagccggaattcggcaaccttccgtataggtcgcttcagtattatatattgcggctccccatgcccccccg

SEQ ID NO: 125978 - DNA, 165 bp, Arabidopsis thaliana columbia
tagggtttgagggacgagggaacgccatatcttactgcactagagtggttgccactggcgtctcgctcatattacagctttcgtttgcatcagagattatgttaggtagattaatagtctgctttatggattgaggatattgtcagggaaatatgcatgttggag

SEQ ID NO: 125979 - DNA, 431 bp, Arabidopsis thaliana columbia
gatatcactgtacgttgcctgccacctaggctaggtatcccttatagcagagcggcctttctttcttttttttaatggagcctaggaattaaatagacagcattagttcctcgtttaaataatagtactcacaaaatggacatcatggctttagaaaaaagcaattccaactacagaaaggatgtttgtcatccaccatagtcattgtcagagtggcatcacagaatgataagttacctaacgtcaagactacttttcagaagtggttggaggagatgtaggaaaccacaacccaataaaccctgagcctaaaaccaaccacacgaataggcgtaaagaagatcatgcgagcgaggccgacattagagaaatctcattcctatacgacaatgtgatataatctagaaatcacatcgattttgtcagactga

SEQ ID NO: 125980 - DNA, 206 bp, Arabidopsis thaliana columbia
atgctgactaggatcgctagtaagtttcgaactatgagagcaagacttggtaccctctggctgccgcctgcgtcctggtatctacagaatctacgcaccgagttcagcaacacacgcagagtacatacatagaaacctgtgggagataccataatttatataagctagctcagggcaagcctatcagagtgaggatgcagaccgct

SEQ ID NO: 125981 - DNA, 536 bp, Arabidopsis thaliana columbia
  unsure (1)..(536): unsure at all n locations
nnnnnnnnnnnnnnnnnnnnnnnnnnnnnnnnnnnnnnnnnnnnnnnnnnnnnnnnnnnnnnnnnnnnnnnnnnnctttttttttttttttatatcataattctctattacttctggatatctgttataattgaagagaagaatcaattgccgtttttagctacattgcacaaaaaaattaagggcttattaatccaaaaaagggccacacccaaaatgttactcgaaaataactttttaacccctataacaaaaacaacgccctttcagccaagaagaatgaccaactttgttgttgtccttctcctcatccgccgaaaggtacgtacctttcaccggcgtgtttgttttgaaccaaaacgtgggtaccagactcctacgagtacatcgacggtgtttctcctttaacggcaaggttttaatcggttaattggaataagagagagttccagctccgacaaaggttgttgtccccacaataatctgtcccgtttcggcgcagaagctcgtgatcttgaactaaaactagagcttgc

SEQ ID NO: 125982 - DNA, 529 bp, Arabidopsis thaliana columbia
gggatatgttttgtgtgtttggttgacgtggaggtgggttgtcgacgcccagctctcattccgcttccttattatgagtgagtctgatttctcccttgccgttcccttgcatagatttgtcccgaatattccccctgctgcgcggatgtaagaggagttttttcattccagtctgtagccgttcgtaatgagtctaaggtatggcttcggagtcgagttgtatgtggatcgcatagcgtttgggctagggacatccggttgcccttagtgtgtctcgtttgcgattcgttacagtgttctattcaggaacgtatagtgttgggtcattctctttaatttgagtaggtcattgccgttgtattagagttgtctggctttccggcagtatgggcgggcctggtcgggaacactgggcttttcgcgcagtgatatagagaagtgcggaggctgtgccctgtgtcccccttctggggtgggtgccatggggtacaccttcgccatacggtttaccttaccaggttatccgtcc

SEQ ID NO: 125983 - DNA, 145 bp, Arabidopsis thaliana columbia
tccagaagtcataaacggcgacatggggagaagactgagatagaaggactagcgagggtagtcgatagccaaatcaccacaaaagaggggaaaggcgtggagaaccaccctaggcagaggcaggctagagaaccatgaagattcc

SEQ ID NO: 125984 - DNA, 251 bp, Arabidopsis thaliana columbia
tcttgagtttcttttcccgtagaagctttgaactggccagagagattcatagtaagtgagcattggtgaatgggtgtaacacttgggtaagataggtccccatgtgaattccgtggcgctgtaatctattaaaattcagtttattagtgaggtgagtattcttctaagtaattaggcttggattatatagcaatatagaatacatagcgggaagcatgagtggacatcgaataagaaccgaaactcaaaag

SEQ ID NO: 125985 - DNA, 421 bp, Arabidopsis thaliana columbia
atgatacgtcagctctaataccactcactattaggaaagctggtacccctgcaagtaccggtcccgaattcccggggtggctcatgagaagaagatcccttatttttaaaaaccaacgtgcatttgcattaactgggtttggcttttgggttcttttttttacacatgggagaaccttattaaccttaacatttttttttaattttttttttccaaacaaccaccatttccttaacaatgtggtcttaatgtgtaaagaaaacctaaccaatcttttttaagaagacaaccttttaattaacaaacagaacacacggcccacggggtgttacacacaatacttttttgcttaaccgaaaaccaattcaacaatggttggcgtctgaacccaaattggtcggaaaaccgccaaagatctccc

SEQ ID NO: 125986 - DNA, 609 bp, Arabidopsis thaliana columbia
aagagcaactggtgtgccgcccgggggtatggtattagggggcctctttggaagagactttgaaggcggatggccgcgttcgttagcctggattctttaaagggggcgccctttttttttttttttttatgagtcttagatcaaactacaaattaggcaggcattggttgagttttgaaacaagacacttgtttacgtgttgccggcgacattaagatcaatcaacctcctccatatcaacattgagccggttgacaatatcagccagaaagggatatagctatggtccggaaataacaagagtcatataaatcgtggacaaagggaccaacaggatgaacagcatagcagatgcagaggagcattttcttcttaaaggggtactttaccagcgactggtttcttttcggattttgggggtaccaatgcttggaagaatttttcccgccttgtgggcacccgatgcccctgttgcgagatctatgggaaactaagaaaatacggatattagtttcattggcctgtaaagctatttatctaaggagtatgttttagagagcaactaatgtggtgttccatgctgagagtgcgcctgactgggtggcgaaa

SEQ ID NO: 125987 - DNA, 596 bp, Arabidopsis thaliana columbia
gcatcttcacgaaacccccccacccgggattgtattggtgactcttagaagagtctatgacgtcacatgcacgcttcctgtaagcttggatcctctagagcggccgccctttttttttttttttttttgttgtagataaatcattacttcgaatagaaggaattgatatacaacaggggatttggatataaggctcagcggcctccaattgcaaaataaatacttgacatgattaaataagcatgttatgcccattcactggtaggctttaacaagtttttaactctctacatattatttgtactacctgcacttaaacctttaacagatgctccttcttgttgcatagagacactgtatatgagctggtaacatttcaaatggggtcaaaatggaccttcctaaaggctcagggaaataaacttgcttgcaaatattcctggttcaagagcttcattggctcttcccttttcagataaaagcacgacattgaccttaaaattacttggccaacttctcagctaagtcatgagttctctttttttgacatttgaatatggggcgcacatcaattttgtgtcgtccgttggtatttt

SEQ ID NO: 125988 - DNA, 334 bp, Arabidopsis thaliana columbia
gccgtaataaatctatagtaaggaaaagctgtcgcctataccagatgttaggggacttagggtctgattttccgacaagctaagccactgtcgtatcgttggctgtatgcgagatagtaaatcaggaggtcggacgcaggtagagacacgacgaacgaattatagttgcttagtatgcatggataatttataggggctatgcgatcacgcggtacgagcgatattgttcatcgctgattacaaagtatagataagcatcattcgttcgagtagatgataaaagagatgatatctaacacgagatgggatcagatgttaagttgatggtggttgg

SEQ ID NO: 125989 - DNA, 542 bp, Arabidopsis thaliana columbia
  unsure (1)..(542): unsure at all n locations
attgattaggtgacctataaagactatgacgtcgcatgcacgcgtcgtaagcttggatcctctagagcgccgcctttttttttttttttcctctttttctttttttttgttccnnnnccgattggatagattcttggataataaatgaacttttagcttcaaaatctcagtctctttccatgaatcttctaatgttttttaccaaatctttgaacaaaatctatacaaattaccatatcacccttcactcttctccaacgtagtaaatcctttcctctccccctttttcctcctccctccaccggagcaacacaaccagttaaaacaaccggaacaacaacaactactgcgggaacacttgggtgtcggggcattttagacatttccaacaagagcatttcggacattttggcttcccaaagcagctgctgcatttgaacgtgggacagcaacaactactaacacagttttggttttttgcagcaagagaaacatcctttaaaagtcggacacgaacacttgaaacaaccgcagtcgccaca

SEQ ID NO: 125990 - DNA, 321 bp, Arabidopsis thaliana columbia
aagtaaaagtcgcatgttgtaggtatgtcttgtgatatgcgaggaaggcaaacatgcattttaaattagttgttgatccagaccaacgccgggcggactacttaatccattagtatcagtgatactgtgcctgagacgtgggatcccgctcgtcatgtgatagacggcacccgggtaagatccgtgtcagcgacaaagattcatgctgataacctttcgaggagaagtcgttgactgtgtcatcgttgtcattccttttcgcacagttctatctcatgtatagttggcgagagcggaagatcgccagcacgaaacagaggt

SEQ ID NO: 125991 - DNA, 597 bp, Arabidopsis thaliana columbia
  unsure (1)..(597): unsure at all n locations
ccccctactatgtatcactcccttacgttactaacgccagctttatacaactcatattgggaaagctggtacccccgccggtcccggcccggaattcccgggtcaacccacccctccgcggacacgtgggttatctacccctctccttcatctttcaagtaatatataactggaatgattatcaacattatcattgcgtggccctcgcattcatgaacctgccccttgatcaccgaaaaatgctgcatgtcaaacaacaacgggttcatacgtaacttaaggaacatcgttccctggtcacactaacatctcaacaaacaccactattgagcctttacggtcccagttcccacttatatttcataccgtcctcctccctccccattcctctctccttttcggctgccccccctttttctcccttccccttntatccctccccccccatgatccacataaccattccttttccctctacaatctcaatatttaatatctcacacccctcgccattctccgcattccaccacccctccgcttcgttgcccaccactccgtcttctccccccattccctcctttcctctacacccatatt

SEQ ID NO: 125992 - DNA, 224 bp, Arabidopsis thaliana columbia
gatactaagcttatcactactataggagctggcgcctgcagtaccggtccgattccggtgacaccgtcgcactgtatataagatagtactaggacgcatacatcttataacgtcgtaatctaccggcctggttcacgctgctgatagaagtttagcactttcataacagatatttctggttgtcacacacatgacacgatcttgattgaagaccttacagagtg

SEQ ID NO: 125993 - DNA, 523 bp, Arabidopsis thaliana columbia
  unsure (1)..(523): unsure at all n locations
nnnnnnnnnnnnnnnnnnnnnnnnnnnnnnnnnnnnnnnnnnnnnnnnnnnnnnnnnnnnnnnnnnnnnnctttttttttttttttttttgtcgtcttttaaattaaaaccaaagatggaaacagagtatcagaacatccaatcaattaaaacagggcaaatcagattaaacttgacacaaggtctgttgtcttcaacaatgagaggcagaagccaacatggaccaccgtttaagagatggaatcttaacctccattcccgagtggccatatctcgtgctactgtattcgccttagtggatgaaagcttaaaatcgagataccgagtggacttgctacgggactcagttatagaggttacaggtacacagatctaagtttggagcgtacatatgatgttttatttatttgcacaacgcagctcgagcgactctgcatggaactgctaaactatgcacgacctaacctattcacgacactgaaagagccacacgtcgatgncccncatgatatgtcgcctcact

SEQ ID NO: 125994 - DNA, 509 bp, Arabidopsis thaliana columbia
  unsure (1)..(509): unsure at all n locations
cnnnnnnnnnnnnnnnnnnnnnnnnnnnnnnnnnnnnnnnnnnnnnnnnnnnnnnnnnnnnnnnnnnnnnnnccacgcgtccgatctagggtttcagagatcggctgattttcacattcacaagcatggcgactcagatcaacaatacgagaaagtttgtagcggatggtgcattctacgctgaattgaatgaggttctcacaagagagctagcagaggatggttactctggtgttgaggttaaggttactccaatgaagactgtgattatcatcaaagctactcctacttataatgttcttggtgagaatgggaggagaattagggaacagacttctattgcccagacgagattcaccttccagttgaccgtgttcagatctatgctcaaaacgttaacagcaaaggtatctgcaccattcctcatgctgagtctctacactacaagcttctccgagggcttagctgcccccaaggccttttactcgggatctaaaatttgtcatgca

SEQ ID NO: 125995 - DNA, 526 bp, Arabidopsis thaliana columbia
tcacttttagggaaggtggcacgcctggctaggacccgggaccgaattacctggttggaccaagcggtcggccacccgtagaaaaaccctcaatttgtcccccacccttaaaagcgggcccctcgatccgacctaaaaagaatttctacccaagaacccggctttgtaaatacttacttacacattcgaaaaataattcatcccattactgcaaaaagccgagtcataaccgccgagttccccgagccccaacttgccgaagtaaccgcccccccagatcaacctacactttaccgtcatatattagttaccgcgcccaaacccgtgttacgagatcggtagctaatcacccttttggcggtctgactttacccttctctagccagtttctgcagtaaatacactcccatttaccacttaaaagtatccaggtgtacgttttcctgtgaagtacaaataggggtcacgtgcaaaaggcctagccctatccccagtagatcggaatcatgtgtcttccccccccgtt

SEQ ID NO: 125996 - DNA, 591 bp, Arabidopsis thaliana columbia
cgcagggaagagaaaattggtatgtcggttttatccactcatttagggaaagctggtacgcctgcacggaccggtccgggatttccggggccgcccaagccttcgttgaaaaaaactggcataagacaaaaaaggccgaaactcttcacccttcgttgttgaagggacaagccgccttagccataaaggtgtatcccatcggttgagggttaattttaccagctccccggttctcggttattcggatgcttgtaagccaaatacaccatttccgtcggaacgttgtggcttacgcgtacaattccgacaactctgtccccacgaacagtatatggttcattcttagccacactatatcgcaaactctataacaggttacaaggacttttttcctaaccccgacaggcgcagagttcacataacgggtccgaacagcccctctcatatcctatatccctcaccatgccagtacatcaatgtcgttacttaggctttattagcgactagtctgaaatctagtcgccaacacctttgcacaagtacatgagtcaagagaaggccgggagcctcacttacatacaaatttatttt

SEQ ID NO: 125997 - DNA, 492 bp, Arabidopsis thaliana columbia
  unsure (1)..(492): unsure at all n locations
cnnnnnnnnnnnnnnnnnnnnnnnnnnnnnnnnnnnnnnnnnnnnnnnnnnnnnnnnnnnnnnnnnnnnnnnccacgcgtccgctcaaatcatgtatgagaccatcaactatcccgctatgtatgtcgccatccaagctcggtctgtccttgtacagcagtggacgaacaaccgggattgcgctggattctgatgatggagtgtctcacactgagccaatctacgagggtttctctctgcctcatgccatactcctgtttgaccttgctggacgtgaccttactgatgacctgatgacgatcctgacagagagaggtttcatgtaagccacaacagctaaacgtgaaattgtaagagacatcatgggaaaacctctacttttgtagctggtgactacgagcaggagatggaaacctcaaaggccagctattccatggattagaactatgattatccccgatggcaagacatcacgaatggtgctgagcgatt

SEQ ID NO: 125998 - DNA, 523 bp, Arabidopsis thaliana columbia
acattagggaaagctggtacgcctgcaggtaccggtccggaattcccgggtcgacccacgcgtccggtgactcctcctcgattccttcttctcaaactgactgcactcttccttctttgttctgctcactgaaaattagggtttacggtttttgattatcgatctctattactttctgcccctcactctcatggcgatgaattttcaatctatgtgacattgtattccacaatcgcgaatacttttccctgacaatggcgactaccaatgctccacctgagctagcttcaggaaacccttgctgccccgcttgccaagggaagtacataggaatgcccaacaaccgacgatgcttttataagaacggccaactctctctccataacgctattccaacatgttaacgctgaaaattccccttctttagacgaacatttcggcgagatcgccgactggctgggacaccctaatgaaaaatggtttcacctgcccaagcgcctcctttgcacaaacaaaccctctc

SEQ ID NO: 125999 - DNA, 518 bp, Arabidopsis thaliana columbia
  unsure (1)..(518): unsure at all n locations
nnnnnnnnnnnnnnnnnnnnnnnnnnnnnnnnnnnnnnnnnnnnnnnnnnnnnnnnnnnnnnnnnnnnnnccacgcgtccggcagtgacgaatccagatgaagtagcggacgaagttctcgccttgacagaaatgagtgtgagaaaccataccgagaggaggaaactaggttactttacttgcggaacaggaaaccctatcgacgattgttggcgatgtgaccccaattggcacaagaaccgtaaacgcctagcggattgcggtatcggatttggaagaaacgcgatcggtggtcgtgatggacgattctacgtagtcactgacccaagagacgaacatccggttaaccctagaccggggactntacgtcacgccgtgatccaagaccgaccactatggatcgttntcaaacgtgacatggtgattcagctaaacaagagcttatcgttaacagtttcaaaacgatcgatggacgtggcgcaaacgttcacattgctaacggtggttgcatcacgatt

SEQ ID NO: 126000 - DNA, 499 bp, Arabidopsis thaliana columbia
ctctatacgactcactataggggaaagctgggtacgccctgcagggacccgtcccgaattcccggggtcgaccacgccgttccattttgggatttaggggttcgcgaattggaagcggattcctggggaaggttcctggtattggtccgaatttccaaaaaatttttgggattttattaatcaatgacctgcgccaatcattctcttcaattggaaccaaaaagaattgggtccgaattactttccacccttgaaccattggaaccatggcctttggaaaggaatcctttgatcttccttgaaaagggtggtccatcccaaaatgctgagttgatgttcatgcaaatgccttggttggccattcctcctctgtaaactgtgtgtgacattaaaatggtcaaagggaggacttacagtctcttacctcgttgattcatggggtttatctaaaaagctcgctgaatccatctcaaggaaagttagctttgaggacaaggtc

SEQ ID NO: 126001 - DNA, 589 bp, Arabidopsis thaliana columbia
ccaagatccccagggcccggcgggttaaatttgcagctctatacgactcacttagggaaagctggtccgcctgcaggtaccggtccggaattcccgggtcgacccacgcgtccggcgactcttccgacacaataatgtgaactatttacctaatggttttgtaacttcttctcgttaaactacactatggcgcaaattctagtcacggactagggacgcttaatctaagcctatagtccaccccgctgaggaccattttcaatcaacggacaccttcaccttttacagctattcttgtgctcaaccactactttctattctatgaatcattcatcaatggcaagattttacactctcaggactccgtatcccgtaaaatttgtcttagtctgttcttatactctctctgcacgatgttctttataagaacgttgtccagttaacgtcctatgttcaattcctttccgtgtgcaacttttttggcagctgcctctaggacccattggttaaggcctttttcagcaacccctttcgcatgtactactttaacctcttgggcgccatttaaatattttgcgcgatgatcgat

SEQ ID NO: 126002 - DNA, 243 bp, Arabidopsis thaliana columbia
agaacccagctctatacgactattaggaagctgtcgctgagtacggtcggattcgggtgaccacgcgtcgcacgcgtcgaacataatgactattctatctttcttctttttcatttctatttaacttgtcgacacggcggtaactaactaccgcagtcatgacattcgaatgaactcactctagtacatcacgaatttttttaatttacacgcagatttttactggttgcagtttggttttac

SEQ ID NO: 126003 - DNA, 187 bp, Arabidopsis thaliana columbia
ccctatcatattgagtgccggcgcgatccggcacactcgccgctcgcagcgaatgacggagtattaacaattaagctcatcacgtttaatgactttaattggtttgttacttgtatataggtacccgtgtttcagggtaactggaaagtcaacctccgattatggtttccctaaaaacacaaaaatt

SEQ ID NO: 126004 - DNA, 429 bp, Arabidopsis thaliana columbia
gtgaaaagagaggcggaaaggaggagggtagtgtacggagggagagagaagctccatgctattgtcctgactacctatgtggtgatagccgacgacggccttgctggctcccgaatccgggaaccccgtggagtcgtgaatatgatgtctcccatagtgtcaaaggaggcacgcttgttatttgctagccacctacatatttaggaaacctatggtagatattaccgtcagccaaccgctaaacgctcacattctccctccctccgctgtcattacctctcattcgaaggaacagggtatatctccacagaccgcgtaacacgatatcggcaaggacgctgatgggtcacgcagagatatgccagcgaatgctaatcaccacagtcatgttttaagctgcgagcgagagtacaacaccagcgtagtacg

SEQ ID NO: 126005 - DNA, 522 bp, Arabidopsis thaliana columbia
gccaagctctaatacgactgcactatagggaaagctggtacagcctgcaggtaccggaccggaattcccggggttgctccactctccattgcaaagagaggcctctgtaatctctcgcactcacccctgaaaccttgttaatttacttcaactgccgatatacctaaaaactacatccttcttctgtgagctatgataaagatcgcagtatttcactctcttgtcgcttatctgcaggtcgtgtccctctcctgcctgtacctcaatcttagctacctaatgcttgacccacacgaccaaaattattttattgcaatccaagagcccccgttctcttacctaaccctatcaagtcatcgtcccggatatccgttcattgtacatattatctccacagactattcctgccagaataccgtctgaaaacttacccacccttcactaatcctgtctctatttctgccactcactacaccccccattgtccataagtcatcgttctatccatttcgccgctttttt

SEQ ID NO: 126006 - DNA, 120 bp, Arabidopsis thaliana columbia
ctggccgggtaacgcgggtgctagggaatatcgctgagtcccgtgagccaagtccgcctccagtgaagccgcatgacgccagacccgcaagaggaatgaacaagccaacgccaccgagag

SEQ ID NO: 126007 - DNA, 696 bp, Arabidopsis thaliana columbia
gacaagggacgcgctcctaagacgagcccactacatccgcaggagactgctagcaccccacgatgctcacgcagcgccggaatgacattatccccggtgcagcccggcgcatcttacgcatgggcaatcgcggccatgataatatacgctggactcgccctcctctatcggcgccccgcacgggatatgcagcataggatacatatcgctttcagaaccgcggagaggattgtgagctgctccttgggggagaggagggtatagatccagcactctgtacgatctagagcaagagtttctatgatcggacccccggcgccgctatgttcctgattattctgggactgatatcaccgctcactgttgtacgccgtacccccgtacccacgcgatgtttttttatatgctccagcgccgcacccccgtggtcgcggacacatgtatcacctttcccgcatgttgcgtgagcactttacagctgtctcctggcggcagtgagtagtagcgatttgcgtctcctgtgtgccggagttattgaccctgagttgcgccgtgcgtgccacgttagttcgatgctctgtctaccgggcaccaggtggcgccttttgtgtcatacaagtatctacacaaccctgtactcctagcgtcctagataggaggggggtccctgcgtcgattctgtaggatccagggttt

SEQ ID NO: 126008 - DNA, 257 bp, Arabidopsis thaliana columbia
cggggggtatagcgggggacgggccgggaccggcccagcgaggccgcggtatcgaggggcatgcctcgccatactggtgccgtgcgtgtgaatcgcccgctagagtattgtatgcgtcggcccgcgccaccgagtatgttgtacctggttcgtggtgagaagagacgccagtggaaagccgtgtgcgcctggctcccgcatccatgccccgaagtggacgaggagtacgattaccctccaggcccctgtacaggttc

SEQ ID NO: 126009 - DNA, 460 bp, Arabidopsis thaliana columbia
  unsure (1)..(460): unsure at all n locations
nnnnnnnnnnnnnnnnnnnnnnnnnnnnnnnnnnnnnnnnnnnnnnnnnnnnnnnnnnnnnnnnnnnnnnccacgcgttccgccacgcgttcgaaactcttaaaagaacctgtgcttttggatgggtcaacaaaaagcccattggagaccattactggtcaacttagcaatggggagtccaaattctgcagtttcctgtctgaattaagaaaaggtaaagtggaaagaaagggtaaagaccgaattccgcatttgaccaaaggtggatcttttgaaggcgatgtaacttttgaagggagtattattcttggccagccagtggatccaccttgtattaaccggacttgccgaagcattccttgaaaagcttatggccatggttacttcattaaccgtgggaagattggaaccaaggaaccagccaattttggcaatggaattgattaccttcccagccaag

SEQ ID NO: 126010 - DNA, 177 bp, Arabidopsis thaliana columbia
tgtattggggtgtgtggtgttctctcataggagaagtcgcctaatctcccgtgatctgcccttctattatttcacaatcctgcgccagtttttgggacgcgcacctcctgcgtatgttcaatccttgttttgcgatacagagtagagttagtgtttgaatagcggatcgcccagccc

SEQ ID NO: 126011 - DNA, 557 bp, Arabidopsis thaliana columbia
  unsure (1)..(557): unsure at all n locations
ctccagctctatacgactcactatatgggaagctgttacgcctgcaagtaccggtcccggaataatttccgggtccgaccagctcactaatccgcggccccccctttttttttttttttttttttttttttttggggattttttttttttttttttttttttttttttttttttatctttttttatttttttttttnnncccttttaacccaaattccaattttcaaaccccttttttcaaaatttaaactttttttttttggcacttaaaataaattcctctcccccttttttaaaccccaataatttgaaaaaaccctggttttcccaaatttaacccttttaaaaaattcccccttttccaactttgggtaaaaaaaaaaaaagcccccccatccccctttccaaaaatttacacctcctataatgaaaattcccaccccccttttacccccacaaaaaaacccaggggtgtttggttgttatacccccaataaaaccttttatttttcaacagcccctaaaccccggactttaaatttttttcccttcttttc

SEQ ID NO: 126012 - DNA, 548 bp, Arabidopsis thaliana columbia
  unsure (1)..(548): unsure at all n locations
tcgccnnnnnnnnnnnnnnnnnnnnnnnnnnnnnnnnnnnnnnnnnnnnnnnnnnnnnnnnnnnnnnnnnnnnnnnnnnnnnnnnnnnnnnnnnnnnnnnncttttttttttttttttttttttaataaaaatcttaggttaattggtaaaaattaccggcccaccccgaaccattttatttgggagaagattaaaggtcccaaagggtaaattttttgattaccccaaaatggttccttaccaccttttaccattaacccagaaggttccaggttttgggctggtatcttccttaaacccaattagaacttatttattgggtacttttagctggtcaacctaggggaaaagtcttaaacttcttaaggaccaattggctaacttagaaaataatccttaatggtaatttttacaaaggtgggcctttattccaccttcgaaccatgataaaactttctggtggttaattctccgttgggtgcccacttccttggacggtagcaaatgtcttctttttggaataagtcctcgtgtatccagtgattgg

SEQ ID NO: 126013 - DNA, 525 bp, Arabidopsis thaliana columbia
agctcttataccactcacttttaggaaagctggtacccctgccaggaccggtcccgaattaattcccgggtccaccaacctacttatccgcgggccgcctttttttttttttttaaccttgaatgggacctaagaataaaaaaaggcgcaaaccaaataaaaaaacctggaggaaggattaaaccaaacctgcaaaaacccctttttaaggaaaaaataaacccggcggcaacagtaccggcggcaaaaaccggcggggttgcccgcaaaaccaatccaaaaccagttatggccattaccgttaccaattaatcaaaagggaaaaattttcctaaaggactaaaggttcttcttctcctcaccggttgtaacagcaacggaaatggttcctaacccgccgaaactcgatcaaagctcgaatcaatggactatatcgttactacattcaccgataaaactgaagcactctctgcggttgtcaaaaccccggagagcttccacattgccatcgtcgaggtgaatatg

SEQ ID NO: 126014 - DNA, 369 bp, Arabidopsis thaliana columbia
gtattacatgtccagcccttcctcattacaggaacgggtattagtaagacgccccaaagcacttaatacggaatccaattatacggggaaaaggctgcgaccccttggccaggccccccggaccggaatatacccggccaccacacttactgtgaacgagggaaagatttacactgaaatagttatccttcgccccccccgacaacctcctttttttctttcgcagagaaaggaggatacatcccccactatcctcctatacaataattatatgtatgtgctatatgcccctttaacccatcattatccctgattcgtaccagatccattttccactccttttcttgcaacacatgctttattatgtat

SEQ ID NO: 126015 - DNA, 401 bp, Arabidopsis thaliana columbia
  unsure (1)..(401): unsure at all n locations
gcaggtgtccttacactacactttagggcgagatggtagcgcctggaggcaccggtcgtcgtaatgcccgtattacaccatccgccgagccacttgacaaccacgattggtatcggtggcccctattatatctcgccccccctggggtggccgctgtgtttagcccgtccctacgctgaaaaatagcacgccctgtggcctcgtccgtctgtcaaggcccaccatcggcgtgtgtcggctgatcgcgccgtacaacgaatcggtgtctcagctatagctgcgtgcaccccccacactatttccagtacctctgcaatacattcgttatgattgtagctggccatcccacttgtttacgatacccctntgcccgtgggaccttgtgcgctggttgctttaga

SEQ ID NO: 126016 - DNA, 229 bp, Arabidopsis thaliana columbia
cgccctcctagtggcctcgcccgtgtcatcagatcaggatatagccatgccgccacggtctcatcactcgcgtactccacgttatggggggaaaaggcttggcgccggccctgtcgaggtacccacggcactctagttatttccctggcgcccgcatcgagcgcgtggtcaggtagatgcccacagcggctatcctcaccaagttgaaccccacacggcccacgctagt

SEQ ID NO: 126017 - DNA, 139 bp, Arabidopsis thaliana columbia
actccacatccacacccattacatttcgccccctctacaggcacgatgagtctgcatggagctcccaacctccactcaacgaggctaatataccatcagtagtacttccatccatttcacgccgacctatatagcatca

SEQ ID NO: 126018 - DNA, 488 bp, Arabidopsis thaliana columbia
  unsure (1)..(488): unsure at all n locations
nnnnnnnnnnnnnnnnnnnnnnnnnnnnnnnnnnnnnnnnnnnnnnnnnnnnnnnnnnnnnngcccacgcgttcggtatacaacctccaggcttgtaataggttttctggaatgacccacccatgcagcttgcctgcaatgcagatccatgatcacttccacggagtgactacatatgcgctcccccatgacttacctcaatcatcaagtagatgtaataaaccgcaataaatcgctctatctttcatgtctactttcaacaaatccctttggacaaaaacttagcttatcactttgttctccccgcacacctcattgccatcccatagcacatctgatggatcccttcactgacccttaccttccatgtttgatttccgtccgtcatcccctttaatcccaagtttctcatccttcccttatacccttgcggtacaatgtttcgagagcctgattatagcactatttctcccccccctttacatttt

SEQ ID NO: 126019 - DNA, 195 bp, Arabidopsis thaliana columbia
  unsure (1)..(195): unsure at all n locations
ccctccaggtcccgggccggaattcccgggtctacccagggggccgtgcgggtaaaaaatctatccnactcccacaaattaaacatctcctttaaataaaacttttcctaaaaatcgggaaccctgtaaataatatcggacggagactacgccaacatcatacattaactaagatactgcttgaactaaaacaaa

SEQ ID NO: 126020 - DNA, 434 bp, Arabidopsis thaliana columbia
  unsure (1)..(434): unsure at all n locations
gctggtacccctccaggtaccggtccggaattcccgggttaacccacgcggcctagcacgcttacactaacccgcctaataacaataaatattatttccctcacttttactaaccaaataatcaaagccctcctccttataaaactccttaggattcacccaaagctaanaaaaaccattatccaactncgcatatcattcatagtgggggggataanaccaaaatcccnaaccttataaagcaattactgcttttaggataagatgacatctaactatattgctgctcacgtctcaattataaaccaagaagtggtcctgcctctaaacccatatcccgaaacccaccctcctctttctattcatttatcagcactaaacggatcatttctaattcataattgcactcactcttacaaaaaagcttgatataa

SEQ ID NO: 126021 - DNA, 421 bp, Arabidopsis thaliana columbia
tatgccaagctctaataccactcactatagggaaagctggtgccccttcaggtacccggcccgaattccccggtgcttgaaatgggcaggcgtggtttaataatcaaaaagtgggttatgagggaccttcaaggttcctgcctaaaactaactttcgctctgaccttttttttatctatggcaacttatgcaggcgttcttaatagggcttcaatttgtggcaaaaaaatacaaatctttgggaggagggggttgactctcggggttgttcttcttctggatcaatctgggcaacatagtttgtttaaaacccgggtaaaaaacaccctcaaggttgcaaccaaaaagccaaaaccgacatctgtgaatctccctttcgggctttggggctgcaagaacagaacggtggtgtaggggaact

SEQ ID NO: 126022 - DNA, 379 bp, Arabidopsis thaliana columbia
  unsure (1)..(379): unsure at all n locations
tccagctctatacgactcactatagggagagctggtacgcctccaggtaccggtccgggattccccggtgctgnagatgagcatgcggtgtttatnattcaagaagtgtctactgaggagcctcgaggttccgtgctcaaactcacattcgcctgtgactctnttctatcatggtcaactatgtcangcgttcttgatagtgcttcnatttgttgcaagaagatacaaatctttgagaagaggggggttgactctcngggttgttcttcttctggatcaatctgggcaacatagtttgtgtaaaaccccggtagaaaacaccctcaagggtgcaaccaaaaagccaaaaccgacatctgtgaagctccctttcgggctt

SEQ ID NO: 126023 - DNA, 461 bp, Arabidopsis thaliana columbia
aactttatacaataactagagggaggctgggccccctccaggtaccggtccgaaattcccgggttaacccaggggtgcgagagattaccttattttttgtgacccacttatctaaagggggactttgattcttttattatgtgaaaatttctcggtcatactgtagggattatatcctccacagtgtccctaataattaatggatcttaaccaagattgttaattcttttgggggggggataaaccatacaaaccatatgatcaactatgcctaaaatcacacccaatacattttaggagtccgtttttatggtgagatcttatccagggagactcaataataggacccccacgaggcaataatttattacacgggcgaattccacttaataggattggtaatcgcgtacctttacacctggggggcctccttagctcaaatgactgggaaattattttgg

SEQ ID NO: 126024 - DNA, 457 bp, Arabidopsis thaliana columbia
  unsure (1)..(457): unsure at all n locations
cagctctataccactcactatanggaaagctggtacgcctgcaggtacctgtcccgaattcccggtctaccacgcgtgcaggtgactgaatattcncacaatcnaacatggtcctgtcttgtgtggagaagcactatgagccanacctgaangcccttgtgatttagagttacagagatacattaagagggtgcnggatntcacagtancattcatagaccagttatngttagtggaaacgtgcttcacanaaagaanaaaaaacagaaagtgtantgtgagggtcacacccacagngtttatgcctttgctcttaatcaaatanttatctttctcttttttggtattgggcctttttattccatgtgctntattccttactgttggggattaaatgtttgcagagaaagatanntccactgaataaatacacttttacctgtatactgggtatata

SEQ ID NO: 126025 - DNA, 502 bp, Arabidopsis thaliana columbia
  unsure (1)..(502): unsure at all n locations
tctaataccactcactatagggaaagctggtacgcctccaggtaccggtcccgaatntcccggtccacccacgcgtgcgagggataaaataaagaaaaggagcagtttattttcaaaaattaaaaactgtgcttattctccacatccacatgatctctacaatctccaaacactgtgttctttcacaccttacacaaaaaaaaaactggtcttttaaataattaaaaactgtgtcgggtggtttttattattattttgtgatattgatacaaattttttgtgtttataacactaatgcgtatgtgtgatattctcaaaatattttaatatattttataaattaatatttaattaactctgcgtaacaggggcgtaattctagtatatatataattaaagaggggttagaanataagaaaatttacgtactcatcaaatattttactacagacaaattttggcaaaaacaaatttgcaaaaggagtatatattcaacccctac

SEQ ID NO: 126026 - DNA, 155 bp, Arabidopsis thaliana columbia
cactctatacactactataggagctggtaccctacagtaccgtccgaattccggtcaccagcgtcggcggctacgaaccctgggcgaccctggcacccactatggatccatgccaaaaagtacaaacgcgtgactcaacgaaaaacatttgtccg

SEQ ID NO: 126027 - DNA, 441 bp, Arabidopsis thaliana columbia
  unsure (1)..(441): unsure at all n locations
ggaatctggacgcctacaggtccggtccgaatttcccgggtctacccacgcgtgccgagtngagtatttccgtgatgctgaaggccagatgtcttcttttattgacacattttccgttcactcaggccaactctgaagtgtctgctttgctcggtcgtattccgtctgctgtgggttaccagccaactctggcttctgatcttggggcgggggcaaaancnaatcacaaccaccaaaaaagggtctatcacctcantccaagccttctatgtccctgctgatgatttgacggatcctgctcctgccacaacttttgctcactgggacgccacaaccgtgctgtcaagacagatttctgagctcggtatctatcctgctggggatcctttggattccacatcccgtatgctctccccccacattctgggtgaggagcactac

SEQ ID NO: 126028 - DNA, 203 bp, Arabidopsis thaliana columbia
  unsure (1)..(203): unsure at all n locations
aactctatacgatcactataggaaactggtaccctacggtaccggtcggaataattccctgtcacgagctactgtcngcagcccncctttttttttttttttggagttagaatgctatgaattccaaaccagagaagattcaaataaaacagagactaaaaaggctggtcaaacagtaataattcttgcacatgaacactaaa

SEQ ID NO: 126029 - DNA, 502 bp, Arabidopsis thaliana columbia
  unsure (1)..(502): unsure at all n locations
ctctaatacgactcactatagggaaagctgggacgcctacaggtgccgggccggagttcccgggtctacccacgcgtgcgcgggcgcgtncatctcatccaccacgccattcactccggcgtcactttccttgacacctccgatatctacggggctgagaccaacgagcttctcctcagcaaggctctcaaggatggggtgagagaaaaagtggaacttgcgaccaaatatgggagggggtatgcanaggggaaagtanagtttaagggagatcctgcttatgtaagagctgcgtgtgaggctantttaatgcgagtagatgttgcctgcattgatctctattatcagcatcgaattgagactcgtggccctatcgaaatcactattggagagctgaacaaacctattgaagaagggaaaataaagtatatccgttnggctgaagcttcagcttcaactatcagaagagcacatgctgggcacccataacccgtctgcaata

SEQ ID NO: 126030 - DNA, 482 bp, Arabidopsis thaliana columbia
  unsure (1)..(482): unsure at all n locations
gccagnctctaatacgactcactatagggagggctggtgcgcctgcaggtgccgggccggggttcccgggtccacccacgcgtgcgtggtgtgtataattggggtgcagggaaaaggcgagcaccggttanatcatctacgtgtgggtcgagtgttggtgagtcaggtgaggaggaacgtgntcntttggttttggagccaagagagggtgagtcaggaggaagtgagactccacctgtgtggtgagaagactagtaagcctaatccatttggggcagctanaccgagggaggatgttttggcggagaaagggttggattggaagaanattgactcanagattgggggtaagaaaggaggttctcaaacgagtagggcaacgagggcacattctagtagaccttctantgctcaatctaacaggtgtgagagttcaggagtggataatggggtgagaccgagaccaaaggtgagtccttttg

SEQ ID NO: 126031 - DNA, 414 bp, Arabidopsis thaliana columbia
  unsure (1)..(414): unsure at all n locations
ccactctatccatacttaggaaactgtaccctcagtccgtccgaattccggtcaccccgcgtgcggggatttgtgtgagtagtaaatcccaaaatctaaatggctcacggaagctatcctatcaccgctttctccttttactcacaattcctttttcctttccgacactttctcgcttcctctaggggatcttgattanctttacctgcatctccccttacaggggaacttcctattacaaacaacctcaccccctacaaatgatagatatgtgaaaataggagcaatggangaatcttttctttgcacctctcctgccttttagcttcgggaccttcactgcgaaatgctaattcgcttctatttcggacctaaagacagttttataaccatcactgtatatttcttcaaaca

SEQ ID NO: 126032 - DNA, 505 bp, Arabidopsis thaliana columbia
tacgactcactattagggaagctggtacgcctacaggtaccggtcccggatttcccgggtcaacccacgcggccgtggtaaaaaaatttctaagtactatcaaaaagcaaaagatggcccaaaaggtggaagcacaaggaggggaaaggagccaacctatgggacgatggatcgacacatgacgccgtgaccaagattcagctcgcagcaggcatagacggaattcaatatgtgcagtttgattatgtcaagaacggacaacccgaacaagctcctcttcgtggtaccaaaggcgcggttctcccagctgatccgtttgtgattaaccatccagacgaacatctagtttctgtagaagggtggtatagccctgaaggtatcattcaaggaattaagttcatctccaacaagaagacttctgatgtcattggatccgatgagggtactcacttcactctacaaggtaaagacaagaagatcattggctttcatgggtctggcgggg

SEQ ID NO: 126033 - DNA, 467 bp, Arabidopsis thaliana columbia
  unsure (1)..(467): unsure at all n locations
tctaatacgactcactatagggaaagctggtacgcctccaggtaccggtcccgaattccggtcacccacgcgtgcgggggcgtacatcatcatcgcagaggagacgatcttacgcgacgaatccttgagagattgagagggacaagcgagttttgacccaaggattggtgacggtctatattgaacaagtaaacaaggatgcgtaagtggatctgttgtacatgtcagagggggagactcaaatgaagagcaacaactgaaaagttcacagcagncatctgatgcanatcataagaattcaaaaccagcacctgttgcaaaacatgangttaagaaggaagctcttcccatcgaggtcccctccttgtctttngatgaaggcaaggaaaagactgagaattttngatccaaggcactgattggtgaagggtcttatgggaaagtatattatgcgacactaaatgatg

SEQ ID NO: 126034 - DNA, 518 bp, Arabidopsis thaliana columbia
  unsure (1)..(518): unsure at all n locations
cccacctttatacaactattttagggaaagctgttccccctccaggtcccggtccgaatttcccgggtcaacccacggttccggggctgcgaacaatcttcatcgcagggcttcccgatgatgtaaaaaagagagagcttttaaatctcttaagatggttgcctggttacaaggcttctcaggtgaacttcaagggagaaaagcccatggggtttgctcttttctccacagctcaggtggcgatggcagccaaagatacccttcancatatggtgtttgatgctaagtcaaagtctgtgatacatacagagatggccaagaagaatctttttgttaaaagaggtattggtggggattcaaatgcttatgatcaaagtaagcgcctacgaactggtggtgactgcacacactctgtgtatagtccatctnnctttcatccttcaccttctcctgtgtggggacctcctcatggatatatggcacctgcaccttcaccatatgatccctatgcaggttat

SEQ ID NO: 126035 - DNA, 397 bp, Arabidopsis thaliana columbia
  unsure (1)..(397): unsure at all n locations
attaacttcggggaatcctgggccccctccgggtcccggcccgaatttcccgggtcaacccacggggccgtgagaaaatatccaatttcaaaaccaaaaaaatatctcctttcctctctctctactctcttctcttcttctcttcttctcttcttctctggctgggcaaccataattactgtcgtcacctccaggctctctctccttcctccagtcttttccgggggggactcttcttcttcccgttccaaagatatgaatctaaagccaaaaaagaaggtgaaattaaaaaaaaactggagagaaaagtccanacctatcccaccccggaggaacctatcccgctaaagaccattgcagtcagggcgggctatgcaacacctactacattgcccat

SEQ ID NO: 126036 - DNA, 461 bp, Arabidopsis thaliana columbia
gctgggcccctcggtacgggtccggatttcccgggtctaccacgcgtgcgggggcaagcaaaacgctggttgtgttttaaaaaaaaaactttttttttcatttccggaccggacttgaccgggcacctcctgtaatctctgctcacctgtcttcttcttcgatctaactcggcgacggtgcaccttataatgggggggcggcaactattccttttcggcgggatcttcccgaccttcgccggcaactctttttcttaaaattggtggagcagggaagctaccttcactctcatccaagcctggggtaatcgctacgtctacctcagctcaggtaatctgcgtcaaaaacactggcaagggggagtaacgccgttacgaccggactacaacaccggtcggaacgtttccggcggcaaatcgcagccgtatcgcacctgcgttattgtgaaaaccggatcgat

SEQ ID NO: 126037 - DNA, 278 bp, Arabidopsis thaliana columbia
cgggccccccttacggtgcgcccggtcgagagaattcccggttcttcatccccggggtgtagggggcgggattcatcccctattacgccctaactctccaagaaagtgagataaaagcataccgcccaatcgaagaaattgctatgcgcgtatcaccctgtgctcgtggcgtttttccgacgcggaaacatcttttcccgccaccacccgaatacgcgcgttctagcctagttacgggggttcttatatttgggggtggccgcagggcgtcccgggta

SEQ ID NO: 126038 - DNA, 358 bp, Arabidopsis thaliana columbia
ttcttatctacataccaatttaaaatataaacatttctctacttttccaaaacataagttcttaattttttcaaacaatttctcccaaaatataagcttttttaggaggggtgacccctaacccccccaattttaacgacactttaatcctcggtttctttccacctaaccactcctaacacaacccccatttacactttctttcctcccctattaatccggttaccctccctaaccctctattccacccccttcttcaacctaccactcacttcaacccgattttccccctccaaccaaaataatttccacttacacctcatctcaatttccaccacccttccccccccaatccccc

SEQ ID NO: 126039 - DNA, 474 bp, Arabidopsis thaliana columbia
  unsure (1)..(474): unsure at all n locations
tttataaaatataaattaatccattccccgacccttatcctcgcaatcccaatataccccccatacacccgagttttttttttctagattgttttggnccacacaaatcacgcaacttcttcctccttccaccctataaaatccccccccccttctttcttcaccctacgtctctcttcccctttccaccacccacacacattttcctcacctcaccactctttcccccccctttccactcccatctccttttcccctccccaccaccttatattctgttattccccccccctcatctctcctcctttctcacatatacccttttttaacatgaatctaactcaccctcctactatcaccctcccccttcccccttcttcacctctccttttacatattttccccatttatccgatttccacaaccactattctctttcccacctacctttatcctccctcctcatcttccccc

SEQ ID NO: 126040 - DNA, 499 bp, Arabidopsis thaliana columbia
  unsure (1)..(499): unsure at all n locations
aaccccctncatcctacactaaagaaaaaaatcaaacaccccaaaaaactcccttcccctcactctccaccctccttccccccttccacacttaaccttcctccaccacttcacctccacaaactccccaaaccttccttacncccacctatacaatttttttttttggggggggggcccccnccaacccccattaacctctacccacaaacctaccaaccccaccctaagcgcgggggcggctgtcccatttctctccaaccgcgccaccccccccctcacaaacttcacccccattccaacccggatccccgaccccccccccacaccgaatcaatttttcccccctccccctacaaccggcggcgccaagacactcctaaacggacatctttatccacacctttctagaaaccgctgcccccacataccccacctgtgcgtgagttccccagttcccctcccccccctacacaaaaaccccctccccctacccccc

SEQ ID NO: 126041 - DNA, 393 bp, Arabidopsis thaliana columbia
  unsure (1)..(393): unsure at all n locations
ctctcacacataccattcactataatgcaaagctatcaccacactaatgtttatactttnccccgcataaaatccttccttcnatctcccaacaccttcccctaattntcttcctccttatatatacctnaaatttttgggggggggctnccnaacctacctcccattcaaccttccctaattcaaatcaacctgctgactttcaaacccaacccatatgtccctattaccatttaacaacggatgatcacttaaaagactcacccaaacatgtgattgttaatcctcgacttttcactaccggccggtttgggattatttatctttcaagggctataatcgggtcttccgctccaaaaaccgttcacctataaagacccgggttccgcaccc

SEQ ID NO: 126042 - DNA, 749 bp, Arabidopsis thaliana columbia
  unsure (1)..(749): unsure at all n locations
annnnnnnnnnnnnnnnnnnnnnnnnnnnnnnnnnnnnnnnnnnnnnnnnnnnnnnnnnnnnnnnnnnnnnnnnnnnnnnnnnnnnnnnncggccgccttagcttctcaaatcctcgatctcttttgtatcgtgattcattaaccacttcatgataattataatcttccttctcttctgacgattgaattacatcttcttctgatagctgttctgatttttttctgtatacaaagtaaattcaaagtgttttattggtgtcctgcagtggacaaacatcggtattttaatctcctctcgataatgaagtgtttcttgttctctggtggggataagagaggggaacagaagacccctatttcggtttcattgacctctatcttctctgaccgcgaaataaaccgaagcgggtcagagttcaactctcgtgatgtctctgggacgagcacagaatcatccatggggaggaagaactcgtaccctccggtgtctactagagcaagtaatctcagagagttcagcattactgatctcaagtctgcaacaaagaactttagccgatctgttatgattggagaaggcggtttcggttgtgtcttcaggggcacagtgaggaacttagaggactcgtcagttaaaatcgaagtcgcagtgaagcagctcggtaaaagagggttgcaggggcataaggaatgggttacggaagtgaacttcctcggaatagttgagcatacaaacttggtgaaattg

SEQ ID NO: 126043 - DNA, 654 bp, Arabidopsis thaliana columbia
acaaataaacaaaacccggccccgcaccgagggggagggccacacacaaacaaagggaacccctttgcttttaggaaacccagacacaacgaacgacaccaagaacgggggccccccacaaaaaaaagacaaacaccaccacacaacaaaaacaagaaaaccaacaaaacagaccaacccaacccacgaaccaaccaaaaaacaaccaaagcccccccccgcaaaccaacgcaaccccaaaaaggagggaaacaccaacgacaaaaagaccaccaaaccgcacccaggccaacacaaaaaagaagcgaccccaagccaaaacgaagcacaaaaacaaaccggcaaccccgacaaacaaacaccccccaggaacaaacaataccaaacagccgccaccacggaccccccactgcgcgcgggggaacaaaaaaaaaaaggcgcgaaaccacaaaacaaaccccccccaaacaagccgaggagcaaaaccgaaacccgaaacaacagagacaacgcgaacaccacaaaaacccaacaccaaggacacaggacccaacaaaacccacggcgcacaagacccacaacaaaccccaaaacaacacccacagcaccacccgcccaacgaacacaagcaagaccgagccgcaaaacacaaaa

SEQ ID NO: 126044 - DNA, 481 bp, Arabidopsis thaliana columbia
ggcgggcccaaaaagcccgggtgaacgcggaccccgagggggaaaaccgggcaaagggaaaggggaaacaacagggccacaagaggggccacagagaacaaggggaccaagcgcgaccccaacccacgaacagggggcccggggggggcaaaaacccaacaaaccggcggaccaaaaccggaccccccagcccacaacccaacgggcaaccaacccaaccctcaaccgacgagcgccaccccacccaaaaaaaacggggaagcacggcgcccacaggggggcgcgcacccccaaagacagaggagccaaaaagaccccgagcgcagaggccagacaccgagagcgcacacgcaccgaaaggcgccgggccaggggcccccaccggcaggccgaacaccagggggaccgcaagaacacgcgcgccgaagccaaagcccgcgccgacggccaggcgcacgggacaggagagcgagaggcacac

SEQ ID NO: 126045 - DNA, 954 bp, Arabidopsis thaliana columbia
atagggttaagctggcacgcccgccggtaccggtccggaattcccgggtcgacccacgcgtccgttgtgattttataaccaaaatctatgacgggaattatggcgacggcgaatactggccgaggaggtggtaaaaaaggcggtggagctatggatgacgataagatggtcttcaagactaccgatggaattgagcccatcacgagcttcaatgatatgggcattaaggaagatgcgctccgcggtgactacaaatatggattcgagaaaacttccgcgattcagacacagggctgttgtgccgaatcttcaaggacgtgaagttattgctgaaactcaagccgcgtcccggaagacatctatgatagcgctctccgcttggtaaaaagctgaaactcctctctacagaaggtcaaagcccttgacagttatttcccaacaaagaagagcctggcctcccccaaaccagcagaaaaaaccactcccacgcgtatgggggattaaccatagccccaataatttcaagggcgcccaatgactgtagaccattccaagttggggggaaatataattggtcttggcggggaaaaaaaccaattccagtgggaaagcacctaggaatgccaatagcgggttgagcccccaaagaataatgatggttcgttggtgggaacacaaccaccggggttcgcacccttaattgtgttgcccaactgtctttccaaactatagggcggtgaaaacatattttccttctacacaaaaaatcttttattgataaaacattccctggaatactccttgggtcgcgaagtcccaccactcaaaataggcctgggctctcaaagggggtctccataggggacacacccaccctatacaatgggtttaacagagaactgtatgttccaaacaagaaacttccatagggattgttttgggctttccccccac

SEQ ID NO: 126046 - DNA, 748 bp, Arabidopsis thaliana columbia
tacgacccactatagggtaaagctggcacgcccgcaggtaccggtccggaattcccgggtcgacccacgcggccgtttagaattttggaaccaaatgggcccgggcatttttggggagcgcgaaggccggccggaccggaagtggaaacggcagtggcccccccgatgacccaacagttggggcaacagacaccccacggaaatgagcccaacaccagcctcaaggggatgggccacccgggagatgagatcccccgagtggacaaccctgaataataaacagcccaccgcgttccttatataggggtgggtatggcgcatagggggagcgacgggatggggtgtgataaaaccacaagaaggccgccggggaaaacaaccaaaggggagctccccttcggagggaaggacccattgattctgctccccagagaggttctaggcctcggaaagggggccccccacgccgaagaacctgggcgacaccaaaccagcaggaaagaagaaccccaacgcccactctgggatgaaacaaaggcccaaaagggtgcgaggggccaccaatgccaaggggcaatcccgaggggggggacaataagcaggcttgggcgcagaaaggaaccaacccaaaggacaaccccctggcaagaccaaaggggggcgccccccaccgagatcggggggaaattaaaaacatcgcaccccctggcgctcttttctgtcccacacacgcgtccccttggaaacc

SEQ ID NO: 126047 - DNA, 809 bp, Arabidopsis thaliana columbia
ggaggggggaaagggggaaaagggagtgaatttaaagagaaaggaaaaaagggggggggggaaagggggggggaaagggggaaggaagggggggaaagaagggggagaaaaagggaaaagggaaaaggaaggggagggaggagagggggagaaagaaaggaggaaaaagggaggaggaaggggggggaaaagagggaaagaaaagcggggagggcaaagaagaagagggggaagagggggccagaaaaggggaaaaggcgagaaagaaagccccgcccagcgccaaagagggggggagccccccagggaggcgcaaactaccacccgggggaggacacgggagcaccgagggacagcaaacgggggccacccgggaaaacagaaagccacgggggagacccccaaggaagggggcacggggaggcagggagccaaacaaggggcgcacaaccccacaagagggacacgaggcaggggggaacacggagagacgagggacaaaaaaggaagcgccgcgggagaggaggggggaacacgggcgagcgaaacgagaagagacccacgggagacgccccggcacggccaggcggagaacggggagcggccgagagaacccgcgggcagacgacggcaaggcgaacaaagacgaaaaggggcggggaagaagccgcgaagcggcgagcccgggggcagaaaaaacccacagccggcggaagaagaaacacccgaagagaacgcaggggaccccagagcagggaggggggaaagcagaacagaaaaaggaaaagggcggaccaacaaacggagga

SEQ ID NO: 126048 - DNA, 657 bp, Arabidopsis thaliana columbia
  unsure (1)..(657): unsure at all n locations
ggggacggcaccgggtcccggtccggaattcccgggtcgacccacgcgtccgccgctccattgcccagattgggttcggtgttaagtcgcaattagtttctgcaaatcgaacaactcaatcagtttgctttggagctcgttcctctggaattgcattatcttcgagattgcactatgcatcacccattaagcaattttctggggtttatgcgaccaccaagcatcagagaaccgcttgtgttaaatccatggctgctgaggaagaagaagtaacagaacctcaagctaaagtgacaaacaaggtttactttgatgtggaaattggaggtgaagttgctggaagaattgtgatgggtctctttggagaagttgtgcctaaaaccgttgaaaacttccgtgccttgtgtactggtgagaagaaatacgggtacaaaggttcctctttccatcgtattattaaggatttcatgatccaaggaggtgatttcaccganggaaatggtactggaggtattagtatttaccgtgcccaagttcgaagatgaaaactttcaccctgaaagcataactggacctggaaatcttgaagcatggcaaaaacgcttggtcccttaatacctaatgggaaaacccacttttttttatttttgttacccg

SEQ ID NO: 126049 - DNA, 438 bp, Arabidopsis thaliana columbia
acgacccactatagggtaaagctggtacgcccgcaggtaccggtccggaattcccggcacgacccacgcgtccgtgtcaattaacggccaaaaaaaggcggttctactcggaatagtgactaaagtgactttcaccgaagagcacccgacccacacaacatcgctactgaaaacggtactggactgctcgagctaacaccccaaggtattgtgcaaatattcgtcatgaccctaacatggaaaacaatcacccttgaggttgaccagccagacaccaaagaccatggctgactcacggaccggcccgaaaaccggacattacgcaatcgacaaaagttgttgaactcctgatagaccgccgctattatccgctaaaggggggtcaactggctccgttcagaggggacaccttataaaaggcttcttgatagccgaggc

SEQ ID NO: 126050 - DNA, 689 bp, Arabidopsis thaliana columbia
aaacgaccggtatggggtaagctgggacgcctcgcgggtaccggtccggaattcccgggtcgacccacgcggtgattagcatatttgaaacgaactcagtgggcgagctatgctatcagaatcgagcctgaagaagctcaatcaacgagaacgaaagctgcgctggatctctttcatgaaatcatagaagagccattgttcaatcagttgaggacaaaggagcagcttggttatgttgacgagtgtggccctcgcttaacgtatcgtgtgcacggttactgtttctgtgttcaatcttctaagcacggaccagttcatttgctggggagagttgacaatttcataaaacatatcgaatggctcctggaacaactggatgatgaatcctatgaagactaccgaagtggtatgattgctacattgctggaaaaggatacatctttcttgttcgagacaaatgacttatggagtcagattgttgacagaaggtacatgtttgatttgttccacaaagaagcagaagaactaagagttacagaagaagatgtgatcagttgtactaacctattagagatcataccaatgtctggctgcgcagggttgggatcatccattaaaaactaacgtcaatgcgtgagcatgcaaccatgctttagcactctagttacccaccttgtgtggagaactca

SEQ ID NO: 126051 - DNA, 1026 bp, Arabidopsis thaliana columbia
  unsure (1)..(1026): unsure at all n locations
cgccccggaccggaattcccgggtcgacccacgcgtccgtttttccatgtccagattgggttcggtgttaagtcgcaattaggttctgcaaatcgaacaactcaatcagtttgctttggagctcgttcctctggaattgcattatcttcgagattgcactatgcatcacccattaagcaattttctggggtgtatgcgaccaccaagcatcagagaaccgcttgtgttaaatccatggctgctgaggaagaagaagtaacagaacctcaagctaaagtgacaaacaaggtttactttgatgtggaaaatggaggggaaaattcttggaaaaaaatgtgaaaggggggctctttgggaggaaagaatggtgcccttaaaaaacccggctggaaaaaacctttccccgtggcccctttggttggtaacctcggggtcggaaggaaaganaaaaaattaaccgggggttaacccaaagggggggatttccccctccttttttttcccacattccgcggtaattttaaattcttaaaaagggggagaatttttctccatatggggaaatcctctacacaaggggacaagagggttgggaaaatcntttaacaaaccaccccgaaaagggggggaaaacacaatcgggcggcttaaaccctctggggaaaagggtgataaatttatagagtgtaattttttttacaccccggcgtcggcccacagagacagtattctcccgaaacggcattggaaaaaaaaaacctgtttcaacacccccttggtaaagccaattaacctggggaacccctgggaaaattcttttggaggcaatggggcaaaaacggcctgggtcccctaaaatacctaaatggggaaagccccagcttttttcaaatttgttagccccgcccaaagaaactcccatgggttagagaaaaaccaagccattggtccgtggttttgggacaaaagtaaaattgaaagggtatgaaaaccttggttaaggaactcttggagttctcaaaaaaa

SEQ ID NO: 126052 - DNA, 809 bp, Arabidopsis thaliana columbia
  unsure (1)..(809): unsure at all n locations
gcaggtcccggtccggaattcccgggtcgacccacgcgtccggggatattttcatatcgtgtcgntggtgacgcacgtcaccatatgtgtggtcgtcttgcttcgatcatagctaaagagttgctcaatggacagagtgttgttgttgtccgatgtgaggagatttgtttgtctggaggcttggttcgtcataagatgaagtacatgaggttttttaggaaactcatgaacactaaaccttctcatggccctattcatttccgtgctccgtctaagatcttctggcgtaccgttcgtgggatgatttcacacaagaccaagcgtggtgctgctgctcttgcacgtttgaaggtgtttgagggagtaccacctccttatgacaaggtcaagagaatggtcattcctgatgctctcaaggtgttgaggcttcaggctggtcacaatgtctgttagaaacacacatttgtattctgaagctggctggaacccttacgataccatcaatgttcttgaggtgaaaagaaaggagaggccacaagcctttgtttgagccgtaagaagcaacctaacacaagcttataggcctaaaggcctgagaaagtgttgcaggaggcataaaacctttggaattccccaatcctcggaatgattccttggcaattcgaattccaatctaacctgggcngtttgtgatttaccattaattgttttttaagcccccaaccaaaaaattttttttacttcctttaaaaaaacaaaaaagcttttttcccctttgggttggccccccccacatttaaagtttaaaa

SEQ ID NO: 126053 - DNA, 735 bp, Arabidopsis thaliana columbia
actaccgttatgcggtaagctgggccggctcgcgggtccgggttcggagttccacggtcgccccacacgtccatttttatcaggaaacagccggaaactcatcacgggtgaacggaactggggtgtaattcatccccaaatggatgacaagaatgtggcatcttgcgtcagacttttcgtcactttcttctctcagattcacagactggattgatttccaggtgtgttactggctactatctagactctgagagaggtttcttatcttatactccactgctctgatggaagactgagaacctatgttactagagaagagaactgaggaactaatctcggtaagtggtattatcacggactctactgacaccggagatttctcctactcaaggagaacgatccattagacaggatgaacaaggtccttcttagtcgtattctcctgctgatactcaaggacaaggaccaccatctatggagcgagaccgctaccatctgaatcagttcgtaagatcttgcaatataggagtattccatgaggaagtgctgtggattgcgatctaggaggaatatttgtcggttaactctctgtatagagattgtggacgacactaccaaggatagtgtcatctacgttagtatccctggtggatcaggtgcagatgaagagctatattcgatactgttacgcacatccaggctgatgtgtccactgttagcgttgggctagacttt

SEQ ID NO: 126054 - DNA, 377 bp, Arabidopsis thaliana columbia
gggaaggaaggccgacgggcgaaagggaacagcaggagttaaaaacacccccacagcgggaagaaaccggaaaagcggagccccggcaacacaagagggcacggcaaagaaacaggaaacgaaagcagggagaggaaagagaacaaaccacagacaacaagaccaaaccaaacaagaaacagcaagccgagggaccacgaaaaaaggggacaagacggaacaaaaaacggagcaggccaaaaaaaccccggaaacgaaaaagaagggaacagcccccagaaaaaagaaaccaggcacaagcgccaaacgaaaaaaaggggacaccgacccgcaggggcagaaaaaacaaacaagacagaaaaagcgggggaaacagc

SEQ ID NO: 126055 - DNA, 746 bp, Arabidopsis thaliana columbia
gaaacgacccactatggtgttagctgggacgcctccgggtaccggtcccgaattccccccacgaccccgcgtttcggcaggattattaaggatgaaggttttggttctctatggagaggaaacactgccaatgtcatccgctattcccccactcaggccttgaactttgccttcaaagattacttcaaaagacttttcaactttaagaaggacagagatggtgtactggaagaggtttgctggtaacttggcatctggaggagcagctggtgcctcttcccttctgcatgtgtactcccttgactatgcccgtacccgtctagctaatgatgccaaggctgcaaagaaaggaggtggaggaagacagtttgatggtcttgttgatgtctacagaaagacacttaagactgatggtattgctggtctgtaccgtggattcaacatctcatgtgttggtatcattgactaccgcggcctggacttaggactctatgactctgtgaaccctgttctcctaactggtgactgacaggacagattcttcgatagattcgctcttgcatgggttattaccaatggtgcgggtcttgcatcctaccccattgacactgtccgcataagaatgatgatcacgtctggtgaagctgttaagtacaagagttctttggacgccttcaagcatatcctcaagaatgaatgagccaagtcactcttcaagggagctggtgccaacattctgcgtgctg

SEQ ID NO: 126056 - DNA, 769 bp, Arabidopsis thaliana columbia
ctcccgtttgtaatacgacccactatagggtataagctggtacgcctcgcggtaccggtccggaattcccgggtcgacccacgcgtccgtttcactgtttcgcgggcaaccatgttaattccattggagcttacttcgttccaaaatcctccaccactcctgttccttcaacccctttgaagctgaccgcagaaggtggtgagacaggagctgtatgggacgatggttctcacgatgatgttaagaaagtttatgtaggacaaggcaggttatagtattagcgtttgcagtaatcttactgatgcaggtgacgatagtggtgctactgaaaaaaggaggaggggggcaagtggagtatcatgagaggtacgacgagtacagtgtaaacggggagactttggggtggttagagaagagaatgcatttcctgagggaagagatgatgatggttgaggatcgtttgcagaggatgcgacaagaccatgccgccttgaaggctcagttccaccatttggaacgcctcctccgccgcaacaaacagtaaatttgctacaccctactctctgtttgtgcagaatgcggatggatatatgcatgtatgtatgtaatgtattatcggacgttactttgcaaagttgttgttatacctacctactcatatgaatatgagcagagactctgttaaacgaaatgatgtaatcaattgtattcgtgttgcacctgtatcaaagattaaattcacactggtgactccactttctcgcaaaaa

SEQ ID NO: 126057 - DNA, 766 bp, Arabidopsis thaliana columbia
acgacccactataggttaagctggaacgcctccaggtaccggtccggaattcccgggtcgacccacgcgtccgtttcatgtatcgcgggcaaccatgttaattgcattggagcttacttcgttccaaaatcctccaccactcctgttccttcaacccctttgaagctgaccgcacaaggtggtgagacaggagctgcatgggacgatggttctcacgatgatgttaagaaagtttatgtaggacaaggcaggttatagtattagcgattgcagtaatcttactgatgcaggtgacgatagtggtgctactgaaaaaaggaggaggggggcaagtggagtatcatgagaggtacgacgagtacagtgtaaacggggagactttggggtggttagagaagagaatgcatttcctgagggaagagatgatgatggttgacgagtcggtgcagaggatgcgacaagaccatgccgccttgaacgctcagttccaccatttggaacgcctgctacgccgcaacaaacagtaaatttgctacaccctactctctgtttgtgcagaatgcggatggatatatgcatgtatgtatgtaatgtattatcggacgttactttgcaaagttggtgttatacctacctactcatatgaatatgaaccgagacttctgttaaacgaaatgatggaaaccaatggcctttcgtggtggcaccctggtatcaaaaacataaaatgtcacactgggtgaactccaacttttctttgcaaaaa

SEQ ID NO: 126058 - DNA, 865 bp, Arabidopsis thaliana columbia
aggtaccggtccggaattaccgggtcgacaccacgcgaaacttttattatatttcacaccaccccaatgaaaggtgatgttcgagacaaactctgcttctttctcaatcttcctcttaacctgctccaccaataacaacccaaacccggaaagatcaaaccttacactaaaaaatgggagactagtgtgatggacacccgttcaaaactcaacctcctcccaaaaattccaacaaatttcaaaatcgggtttccaatggttcccatgaagttccctgctgggtcttctccaatggaggaaaccacctgtgaaccgtatacccaccaagtttaacgcaccggactattctctttggttataacttgaacccccttcaaccaaaaaactggcctttagaacacccccacttcaaaacatggcccgaaaagaaagacctggtggatgtcctacaaacgcactctccactctgaacttcataaacttccgactgtctaccttataccggggatgaatccccaataaaaccacccttttttttcctccaaaaaaaaaactcaccccgcgtttgggaaatttcccccgttttttccgccccgacacaaatgttaaacctcgtgcgaaaaaattttttttatttggggaaatacttgggaaattttaaaacccccttggttgggcctttccaaaaaaaacctgttcggataacgggtggttaatttaacccctgcgatttcctaaattgttttatatcaaagtggggaatccacaacgccacacactatacccgctctccccaattactaagtaaaaaaactccccaactgggcgattttattttcattaaaacctctcctattctaatggg

SEQ ID NO: 126059 - DNA, 753 bp, Arabidopsis thaliana columbia
  unsure (1)..(753): unsure at all n locations
nnnnnnnnnnnnnnnnnnnnnnnnnnnnnnnnnnnnnnnnnnnnnnnnnnnnnnnnnnnnnnnnnnnnnnnnnntttaattcgtttccgcctacggtatgtgaggatgaatttggtggtgatgacgttaaaatctctaaggctgatgagtttccgggtctagatgaggtgagcgatgtttccttctgcgtcggttcagagaaggctaactgtgttaggtcgctaatcgcagggctttcgcgtccttttgaggccatgttcgatggttctttcgtggaatcaacaacttctgagattgatttctcggacaatggcatctctattgaggcaatgttggcactcaacatatgtagtagaatcaaaagagtcgatctgtttcacgtggaaactgtatgagagctgctccaattagccagcaaattctgctgcgatgatctgaagcctgaatgtgacgctcgctaggctgcttctgtcactgacctcgataaagctctaacctttgtagagtacgcgttggaggaacgcacaacgctgctcttatctgcttgcttgcaagtgtttgtgagagagcttcctcagtctcttcacaatcccaaagtgatgagattcttctgcagctccgaagcgaaagagcaatttgcttttctgggttcagagtgtgtgctcctgttcgactacttcctcagccaagtatgcatggaagacaaactcacgacggacactatgctgttattgctcgagaaaactcgagagt

SEQ ID NO: 126060 - DNA, 758 bp, Arabidopsis thaliana columbia
  unsure (1)..(758): unsure at all n locations
nnnnnnnnnnnnnnnnnnnnnnnnnnnnnnnnnnnnnnnnnnnnnnnnnnnnnnnnnnnnnnnnnnnnnnnnnnnnccacgcgtccgctcagaatttgtgcctcttataggttcattactacacaagtccaaacatcatcaacttttgtgactcaacaatggctttaggctcaatgtcttattatggctctggctcatggactgtgaaactgaacaaagactctgagcgtgctctagcagtctataaccaagacacttcacacccttggcacattgatggtttatctattactggtaaaacaccacaacaagctaacagacagtgagaccttctagcatgtgacagtgaaagcatcaagattggtcacgtgccattatgtggatacaatactgctacaagaaactacatcaggagctcgctgcttgatcaggaactagaggatgagaagcatgaagctgcagtgagacaagaagcaacgaagcctaactacgtctgatcggactgttaaaagagaatcacttctgagacacaagcttcttataatgtctgacgaatcaatgtttgtatctggcaatatgtaatgtacccgcgtaacagatgggtgttttcgggaggcagcgcatgaacaataacactactagtttgtactagactaaaaagaaaaggcgtgcgctctagaggatccattctttagtacacttgcatgcgacatcattagtgtagtatagagtcagccaaattcaatgaattggcgttg

SEQ ID NO: 126061 - DNA, 760 bp, Arabidopsis thaliana columbia
taaccgtaactaaagctggagctacaccgaggtggcggccgctgtagaactagtggatcccccgggctgcttgaattcgcggccgcatttttacgatcttgtttgcctcgttctaatcaatttgacctcaaaaatttaaaagaagaaaaatataaaaaaaaagctataccaaaatgggcacaaacccaatcaatgcccatttgtaccaacctctttgtcttttctccggtcgttgatcgatctcctacgactcatttcatctctgagaaaagtccaaatggaatcgtaatgaaggaggccaagcagtttccttcgtttccctttgtgaattacttcacctcgttttacaacaggtaattgctttacacctctagcctccatcaactccttggctacaccaactgtggcgtctggataacaagtaagtaaaccgcgttcttggcctcgatagcttattttcttagtacatacagaagaaaccggacatgtattctcatctaagattggagaggcgttattggacaagtatcttcttatgtcaccgtgtgttaagattccagctagaaaatcatcgtcatcgaccaccataatgcagttttggtggctctctttaaagatgtttcttgcttctcttagagttgttcctgaagaaactttcacatagttctttgacataacccgcataacttttaagtcttccagaatagtctcttcatccaaaaaggaattatggtcaaggttctctatgacggtaagctca

SEQ ID NO: 126062 - DNA, 775 bp, Arabidopsis thaliana columbia
  unsure (1)..(775): unsure at all n locations
ttnnnnnnnnnnnnnnnnnnnnnnnnnnnnnnnnnnnnnnnnnnnnnnnnnnnnnnnnnnnnnnnnnnnnnnnnnnnnnnnnnnnnncggccgcgcagatttttgaggaaggggaaaattcaaatcaggcagtgactttgaaccagcgaagaagaaaaaagtttagtcaaactgaaaatagagtgtctgaatctacgggaaattatgaagaagatatggaaattcatgaggtccatgtcaacgatgcagagaccagttcccaaaatcaaaagctctttaatgaaagggaggactatagagttcactcaattcgtaatgattctggaaacgaaaacattgagagttctcagcatcaattgaaagaaagattggagactcgttatagcagtgaggatagagtatctgaaatgcgaagaagaaccaaatatagcagtagccaggaggaaggtataaatgtgctccaaaattttccggaggtgacaaataatcagcaacctctagtggaagaaaggatatctaagcaagctggtacgagaaggactactgaacatatttctgaaagttcagaaattcatgacatagacatcagaaatacatatgtctcgcanagagaagaccagattagaaaccaagaatacatgctggcttggtttctggtttgcaatctgaaaggaagcagcaagattatcatattgaacataatcccttgcaaacgacgncatctgacagaacttctgtgtctgtatctcatactagtgatgcagtaaggtatacc

SEQ ID NO: 126063 - DNA, 832 bp, Arabidopsis thaliana columbia
  unsure (1)..(832): unsure at all n locations
taaccgtatctaaagctagctcttccccgtgcaggtacccgttctaaatctccgggatcacccacgcttccgttaatcattgttccgcctgacaatgtttatggggcaagggcatcccccatggaccttccaattaaaaaaacacccgaaggcgattacaggagcataaatggaaccaaacacccctacaaaaaaaataaccaagagcttctaaactaatcttttgcaaaacacatcttaatacacccttactaaacccgttttgttcacctcgtggcttgtcataaacccaaccttacaaaagaatctactatgtttcttctaccatagaactgtaaaaaaagtcttaagctttttacaccatactgtctctttgaacttctcaagttgcacttacaactattcgactctcncaaatctggttgagagcgccacatctttgtttttctctttgatgaggaattgcagtttgcgaaagccggtccaagtaactcttggaacctctcgaggaagagaacccactagtttcgtgcgtgtctgatactttcacaaagcttgcactcactggaaactagtcctttgaacttttgaaaccccccgattttcttataagatttgcccttttgttaaaggtttttgaggggttaacaacctcggcggtcaccaaaaacataagagcccctttaattgaaatatggccaaaatcttttggaaaagaaggatggaattccctttgtcaagtggaacacagccaagcttttacactcacattcaagaacctgggggttttccataaactccattaattgggggcgaccaggaaatacccccc

SEQ ID NO: 126064 - DNA, 624 bp, Arabidopsis thaliana columbia
agaaacagctcctcactaacgcgtactaaaggtggcgctagctcgaggtggcccggcgtggtaggaactatctagatccacggactccctgaactgccggactcgcggacgcatcgtcccttcgtcacattcttctacatatacaagggtgcaaagtggaagaatgccaggactacattttccaatatatctatctcacgacgacgcaatgtgttggccgagccataatccgtccttctggaagagagacctgaacaaagcgattgccggccatgtgtgacaacacctaatccctagctcttgttgataacatatcagagacatcactataatccattgcttttactacgttggcatccatcactcatatgtgataactgagacgctatggtacttggcttggccactatattgggcctgacaaagccgtgacctaactgatgtctgggccataacccacttatgcggtaaccactcattcatgaactaccaatgggtggatgacacacttggtcttatcttgcatctcttggttctagtaccttacttttgctgcaagtataagcatcgtcggcaacattccaacactgcatccctcggaaggagacgaaagtatttggtccc

SEQ ID NO: 126065 - DNA, 1135 bp, Arabidopsis thaliana columbia
gaaattaaccctcactaaagggaacaaaagctggagctccaccgcggtggtagaaccttctagatctcccgagaccgcatttaattcgtctgtccgctaataattgtccataaactgcctgcattttttcgcctatataatcatccataaacaaaacaacaaaaggctttcaatttcaaaaagctttaacaaaagaaatgaactaaatcacttcagagggaatgacctatgaatcaattttactttttggacgatcattaacaaaattggacgcaaacatattgaatcttcctttcttacatctttaacctcgggcccttatccctcttgaaacctcttgttccctttaatctcttgcccattaaagagaaaatttactatggagttccctgatgatacatctcccctcttaacccatttgaacccatcctagggggtaccccttttcctcctcctttccaaacctttttctgggcttttcaaaaaatataattcagcccaacaacaaatgtcctctccatatcttcatccctcttctagtattatgagctcttatgagatcaccacatgtgttgaactctttcttacaaatcctctcagggatatcacaaaggattctcttcttaagacttctgccattatgacctttatgtgaaccgagctcacattgtgactgagtcttgtctaatcatattagggcggtcacttgtcaattattgtcatgatcgactaaaaattataatccccaatatatattctccaattttctctaagctattacattgctattcccgtcccccctttctatcagtgtattaaaagtcctaacacctacgctcacagtagattagtcccctttattccccactcaaaataccccctgggctgattgaaaaaaacaccccctttcccccgttttcgtttgggcaaaaaacccgggccatttacttttgggccttttatatttttaccttccccacatagattacatgtggaaaccaatattttttatccctactatgctcgggtatcttttcttctcctcttagcaaattatatttcacatttttttctcataaaccagaattatatgggcctcttcctttaaagaatatctgcctttaccacctcataa

SEQ ID NO: 126066 - DNA, 761 bp, Arabidopsis thaliana columbia
  unsure (1)..(761): unsure at all n locations
nnnnnnnnnnnnnnnnnnnnnnnnnnnnnnnnnnnnnnnnnnnnnnnnnnnnnnnnnnnnnnnnnnnnnnnnnnnnnnnnnnnncggccgctaaatctgagcgtcgggcagctatctgtactgaaggcatagtgatgctagattctgacatcttagatcctgctgtagcaaaggcattttctatagagcgaacacatgaaatcaacatttgtaataatacgacgaataatacaagatgtacgttaactgaaaattgtactggtaatggtattgtggttgtggaagctaaagctaatggatcagttttgaagaaagaaggaagtgttagtttggcacctgatcattctccagaagaaaagaattcaatagtgcttgatcagaaagttcatcatgggaaaagttcagttattccttctgatgatcatggagaacaatcaaactccagttcttctggagtcatgatggagaatgccttttccttgaggccaaatagttctcagaatcgtggaaatttgaactgtccaaaccccattatcttggatctcttcaatcaggaagcatatcctggtttcaatcctcatcgttatatccacaaagaattgtcagaacttggcaaggaacaaaccctgaaaagcagcacggattctgatgtggctaggatgacaaccaattttgatggctctgaagaaagaaacaaacatctgcagggtgcagagacatttcttcagttatctaaagctaggaaatggggcatactggat

SEQ ID NO: 126067 - DNA, 764 bp, Arabidopsis thaliana columbia
  unsure (1)..(764): unsure at all n locations
nnnnnnnnnnnnnnnnnnnnnnnnnnnnnnnnnnnnnnnnnnnnnnnnnnnnnnnnnnnnnnnnnnnnnnnnnnnnnnnnnnnnnnnnnnnnnnncggccgcaagaggaaggacataacttggctatgtccacaagctgcagatattgttgaattatttatctatctcagtgagccttgccatgtatgtcaacttctactgaccatatcacacggtgcggatgatttgacatgtccatccactgtggacgtgagaactggacgccacatagaggaccttaaattagttgttgagggtgcttcaataccacgctgtgcaaatggtacaaatcttctggtacccttaccagggccaattagttctgaggatatggctgttactggagctggtgcacgtcttcatgaaaaagatacgtcaagtctttcactgctatatgattttgaagaactagaaggacagttggatttcttaacccgtgtagttgctgttacattttatccagctggtgctgttagaattcctatgactcttggtcagatagaagtccttggaatttctcttccatggaaaggaatgtttacttgtgaacgtactggaggaagattagctgaacttgcaaggaaaccagatgaagatggaagtcctttttcatcttgttctgacttgaatccgtttgctgcaacaacatctttacaggctgaaactgtttccacaccagtacaacagaaagatccctttcccagtnatctgcttgaccttttgac

SEQ ID NO: 126068 - DNA, 279 bp, Arabidopsis thaliana columbia
actaaagcttaacataaagtctgagagactaccacgcgacgcgtggcagggccggctcgtagaactcagtgagatcccaccaggactgcatttatattccttttcgcatacagtcaacaggatacacgaaggagcgaattcgggtctatgccttcgcaacaattgatatccatccgacatgccggaaagtttttcgactccagttctccgataaattaaacatctgtggtctacaggcacaaatataacagtaaaccttgtctttgagaacacccttta

SEQ ID NO: 126069 - DNA, 654 bp, Arabidopsis thaliana columbia
  unsure (1)..(654): unsure at all n locations
gcccgtttgnnnnnnnnnnnnnnnnnnnnnnnnnnnnnnnnnnnnnnnnnnnnnnnnnnnnnnnnnnnnnnnnnnccacgcgtccgattagacttttacataaaaatagagatagagacaccgaataaaacaacagctcgagtaggccttgttatgcgcaccagaccactttgagtgacgtatgtcgcacacattgattatccacagatcgcagatatggggataagccacacgccgatattagtcttacatgaagacttaaatgccttgtataatgtacatatggatggcggagatgatgatgaccacaaaaaagatgctgatggagagagaaaccatgccaacaccagatggtcgttcttagccactaggaagctaatgtggatactctttggagaaaagatcagaaaacccccacattcaaaccctccatattgttgatcgcgcttcatatacagatacacttgcaaacaccagaccaataactaatggatgcccagcgcttaccatacatcttagcttcttgcatcgcgaccgagatatcatcattacgggctgtgacacctgataagaatgcggtggtatcttggctgaagaaactaactggtggggaccattactggtcacatgtgacacccttactgctggattgat

SEQ ID NO: 126070 - DNA, 523 bp, Arabidopsis thaliana columbia
  unsure (1)..(523): unsure at all n locations
ccctccactaaaagtgtaacaacaagcctgggaggccttccactcgtcggntggccgggcccgtcttctaagaaacctaagtgggaatgccccgctctgtgcctggctttttaaanttcccggcgggctccggctataaagtcaaaaccccccctttaaattattgggccccatacccttttaaccccatgtattaccctgagaaaaaaatccttacaagatcatttttcgttcgcttttttctactggtcaattatgaaggggccgctccagtgcccgtgcccgcatacaatgctctctgatgcccacagttccttcccttcattaccccggcttgccactctccttgacccgttcttcagggacaccctttttccccatggctttgcattggggaggggataatatccccaccctcttgggcaccgggtgcttttttatagtaacaatatcgccactcccgattgcagctaacattcttatggcgaaccctgctgtcacccccattttttacctcgggggt

SEQ ID NO: 126071 - DNA, 719 bp, Arabidopsis thaliana columbia
ttggagctacccgcctggcggccgctctagaactagtggatcccccgggctgcttgaattctctgtcgcccggacgtttcaaatccatcctccgatatctatattcgtttcgtcagatctagatctgagcgtcggtgagagattatctggatctgtgatacgttccaggaaacatggcgacgatgaaaagtttgataggtctgataaacaaaatccagagggcgtgtactgtcctcggagatcatggcggtgaaggaatgtcgctttgggaagctctcccaaccgtctctgtcgttggtggccagagttccggaaaatcttcatttctagaaagtgttgtgggaagagattttctgcctcgtggatctggtatcgttacaaggaggccattggtgttgcaacttcataagactgaagacgggacaactgagtacgctgagtttcttcttgctcctaagaagagatatgctgattttgctgctgtgcggaaagaaattgaggatgaaactgatcgtattactgggaagtcaaatcaaatctcaaacctttcaattgagctgagcctatattcttctaaagtcgttatctgacgctcatagatcttccgggtttgaccaaggccgttgttaaagaccaccggaaaggttggtcaagacattgaaaatttggtccgggttttttgttgaaaagcccaactgcgctcattttgggtatttcct

SEQ ID NO: 126072 - DNA, 759 bp, Arabidopsis thaliana columbia
ataaacttttaggaaagccgcgccgccgcagtccggccggaattcccgggtcgacccacgcgtcttttgtgtttagacagaagagatgagactctttgatgcaggcttgaaggctagaacgcatcagctacagacggacaattgagacagagaaagactgaagatttgcacccgactacaaagatgtaccaggcgggaactgggcgccactgcggaggatggacaggatgttcctctttgccggaggcaggtcccaaattgagaagcgatataacttctctttactctttactgtaggtttatgtgttgatttcaacattacctggtcgcccctagttttttttctttctttgttgattgactctatttgaggctcgttgttctagagctccttattttttaacctataacaggaatgtttgcctatatgaaaatcctttctttccaggtcaaaccatttagggcggccgttttaaaggaatccaagctttactttccgcgtgtcatgggtaaccgtcttagacttgtttcctattggggggctcacccttgaatttccgaaaattccaactagggcccgtcatgctttttatacacagcggattcgtgtgaacggggggagaaaactcccctgtggttttttttccccacatttttaaatttcgccttgggtgcagaatctattccccccctttttaccccattctggggcgttatttagcctgtaataagagccccgatccggatgggccctttccc

SEQ ID NO: 126073 - DNA, 731 bp, Arabidopsis thaliana columbia
  unsure (1)..(731): unsure at all n locations
nnnnnnnnnnnnnnnnnnnnnnnnnnnnnnnnnnnnnnnnnnnnnnnnnnnnnnnnnnnnnnnnnnnnccacgcgtcctgaagaagaagaagaagaagagaaagagagtcagagacgacgacggacgaaacgacgctattcttacgctttcttcgatcgtcgatttgattttttcccttccttcttatttttctcggttgaagtagaagataaagcatcgatacatgatggctgattgataagagttttctccggagaggttcggagttttttttttagaaaggaaacattaaaaaagatggcagtctcttttcctcgtcttccgaggtggttgtgtggtggtagtaacactaaagatagagagaagaaagagtcaattcctaaaggatcttcttcacttagtccttcactgaagaagactactactagtaagactggttcttcctcttcatcagtgaagaagaccaagagaggatggattggaagaggaggatcaggatcaggaggggaagaggataagattgggaatgtggtgtttcctgaacctgatgatccagagtggtcaattggttgggttgagccacatggaccaggttttaaagctgaggatgatgattgtggtggctttgtgggttttggttcctcctttacaaggaaaaggtatgggatggggttcaagggaaatcaagaattcccggaaatggggttttctttcctctttcccgggcttg

SEQ ID NO: 126074 - DNA, 758 bp, Arabidopsis thaliana columbia
taaacttagctaaagctggacgctcgcccgcggtggcggtcctctataactcaggatcccccgggctgcatttaattctcggccgaccaaacacaccctcccaaacgatttcccacaccgaaatcgtttagtacatacaatttttcttgtggttttcaatgcttcgaatttctaaaacaaaatcagcttttaaaatccgattacgacaaagaaaaagatccttattccggagactcaaattcttcagatagcataaactgacacccaaaggtttatagacaccttttgttcacatcccattttcttagtacagcagctcttggaacacgggatctacgctttgtccccattctccattgtacatatgcaagagcttctccgcaggcgtaactcctgttctgaccacttcatcgactgcgttcaagaaaccggcttacttgtagcctctgagctctaaaccatcctttgcgagtttcaggacatcttcagcgacatgctttaacaaaccatccctaaaaggagtctttaagccagtaactgggactttgttccttagcatctctctctctgctggagtccagtcagctgtcagatccaggatagcttggagactatcatcatcatataataaacccacccataaagctggcagggcacacagccttctccagggacctccatcagcacctctcatcttcaagtatctcttcaaccgaacctctgggaatatagttgtcagatggttttcccaatcatta

SEQ ID NO: 126075 - DNA, 763 bp, Arabidopsis thaliana columbia
ttcactataaccaaagctggttcgcctgcaggtaccggtccggaattcccgggtcgacccactcgtccgtctacttccatattttccgtactttggctcatctacaccgcaacagccgccacattcgaaatcctaaaccaatgtagttacaccgtgtgggctgccgcaagccctggaggtggccgacgtctagatgctggccaatcatggaggctagatgtcgcggcgggcactaaaatggcacggatttggggtaggaccaattgtaactttgactcctcaggtcgtggccgatgccaaactggtgactgcagtggtggactccaatgtactggctggggacagccaccaaacacgttggctgagtacgctttgaaccaattcaacaacttagacttctacgatatctcacttgtcgatggatttaacatacctatggagtttagcccaactagttcgaactgccatcggatactatgtaccgcagacataaacggacaatgtccaaacgtgttgagagccccaggtggatgcaacaacccgtgtactgtatttcagacgaaccaatactgttgtacgaacggtcagggatcatgtagcgatactgagtactcaagattctttaagcagagatgccctgacgcttacagctatccacaagatgacccgactagcactttcacttgcaccaacactaactacagggtcgtgttttgtccaaagtctaggctcggtgctactggatcccaccagctcccgatca

SEQ ID NO: 126076 - DNA, 775 bp, Arabidopsis thaliana columbia
ctatatacgtttcactatagggaaagctggtacgcctgcaggtaccggtccggaattcccgggtcgacccacgcgtccgggcagacaaagaagaagaagaagaagttctcggcgtgcttcaatggcgatatcagtagcagcttcgtcctctatggccgtgatggttccacgtgttcccgccgtatccacccgttgctccgccgtcccttatcttcctcctcgctcctttggccgatcctctttcaccgttccgttgaagcttgtttcagggaatggattgcaaaaagttgaattgttgaagacaagagcttcttcagaagagacctcgtccattgataccaacgaactcatcacagatttgaaggaaaagtgggatggtcttgagaacaaatctactgtacttatatatggaggaggagccattgttgctgtttggttatcttccattgttgttggtgccatcaactctgttcctctgcttccgaaagttatggaacttgtcggtctcgggtacactggatggtttgtctacagataccttctcttcaagtcaagcagaaaggaattggctgaggatattgaatccttgaagaagaagatcgcaggaagcgaatagattcattttcaaataaaaccagctttctctctgtatgttttcctgtaatatcgtgttatattatacaatgtctctgtttcaacattgtatctggtgcatctgaaactattatcttggatccacacttagtttcaggaggcacataaaaaaaaaaaaaac

SEQ ID NO: 126077 - DNA, 779 bp, Arabidopsis thaliana columbia
  unsure (1)..(779): unsure at all n locations
tacgcccgtnnnnnnnnnnnnnnnnnnnnnnnnnnnnnnnnnnnnnnnnnnnnnnnnnnnnnnnnnnnnnnnnnnnnnccacgcgtccggtctcctacctcctttgcctacaagctttcacgcgggagctcaacatcagccatggcggaacagactgagaaagcttttcttaagcagcctaaggtcttccttagctcgaagaaatctggaaagggaaagagaattagaggtcgtatcttagctggtacttgccacagtgcgaaaatgcagaggaccattatcgtgcgaagggattaccttcactttgtgaagaagtatcagaggtatgagaagaggcattcaaacattccggctcatgtctcaccatgcttccgtgttaaggaaggagaccatatcatcattggccaatgcaggccattgtcgaagacagtgaggttcaatgtgttgaaggtgataccagctgggtcttcttcttcatttggaaagaaggcattcactggaatgtaagctgctgctgttgatgatgttagtttatgtttctggatagagctgaactattatgttttatggtgattttcttattgaatttttccagacattaaattttgttttactctgctgaatctttttcatcccaatctgtgcctctgtttaagatctgattnttgctaaaaaaaaaaaaaaaagnnnnnnnnnnnnnnnnnnnnnnnnnnnnnnnnnnnnnnnnnnnnnnnnnnnnnnnnnnnnnnnnnnnnnnnnnnnnnnnnnnnnnnnnnnnn

SEQ ID NO: 126078 - DNA, 767 bp, Arabidopsis thaliana columbia
gggccgaggcggaattaagcttgatatcgaattcgcggccgcctgcaacatggaatctaattattgcaggttatatacatttcggaaaaaaagacgaggccttggaactttttcgaaaaatgcagttttctcgcttcatgccaaattcagttaccattctaagtctcttaccagcgtgtgctaatcttcttggggcaaaaatggtaagagagatacacggttgcgtattgcggagaaatcttgatgctattcatgccgttaaaaacgctttaacagatacttatgctaagtcaggggatatagaatactcaagaaccatcttcctgggtatggaaacgaaagacatcataacttggaactcgctgattggaggttatgttttacatggtagctatggtccagctcttgctctttttaatcaaatgaagacacaggggattacgccgaacaggggaacgctttcgagtattattcttgcgcacggtctaatgggaaatgtagacgaaggaaagaaagttttctacagcattgcgaatgattaccatattattcctgctctggaacattgttctgctatggtatatttgtatggacgagccaacagacttgagaagctctgcagtttatccaggagatgaatattcaatcagagacacccatctgggaaagcttcttaactggctgcaggattcatggtgatattgacatggcaatccatgccgaagagaacttattcttctttgaaacctgaaaatacacccactgaa

SEQ ID NO: 126079 - DNA, 773 bp, Arabidopsis thaliana columbia
  unsure (1)..(773): unsure at all n locations
gcccccccncgtgtcgactgtatcgataagcttgatatcgaattcgcggccgcggcaaaagtcatataatcaagttttatgatttattgttgtacaatgtttgggattctcagtgttcaagagcactccgtatagagactgttgtgtcttgggttgagttgatgtggcctctcgatatgaggtcatggttcaagaacaccactataaccgtgatgtcatcatgaaaatgtcgtctcactttcttgtcaatcttccttagatctgaatatctcatctcacgtttcctcgctgcctcgtgaagagccgcctttatcagtctctttgcgcttccagcacggggatggttatgaacaatctcaactgctttttcgttagtcaaatgctcccaaagaccatcagatgcaaaaatgagaaacgaatcattagggtgcagaggatgagagagtattgttggtgttgcagacatcaagggtcttttcattggctctgcaattctgaacttttgactgattggctccttgttaaattcgggccgtttcatgtacatgtctcctatagacctcgatacctgaatgatgcccttaaactctccaaaactcatgcctggacacaacgatctgcgggtcatcaggatgtaagttcttgagttcccaacgaatatcttcattgttagcattgcgttcagcccacagctgaaatactagaaagtccgccacaattgcctttttttttcaagaacaaccccgggaatcttccaaaacttgccacaaaac

SEQ ID NO: 126080 - DNA, 694 bp, Arabidopsis thaliana columbia
ccgcacttccgggttgacccacgcgtccgcagaccgtttacagagaggaacctgccgaagctcaaactaggcttttatatattccagcatcacaagaggcgctggatggcttgctgcagacgtaaatagcttctttagcaacgactgctagctttcctacgacatcggaggacctctttagcaccgcaggtcaactacgctcaacagattaagtgcgcgcctttcaacctagcccgatcctattttgcatccgttcaaagggggtgagataactctgtctcatcattcagaacaaaatctgtaatccatccgaacctcccttcttaaaggggcctaaataagatcttcaagcctatagacacctcattcaaaaagagcaaatatttagcaacagagggaaccataacttagtgccattcgccagatttggataaaaccacaaccagaagactgccattcttgacgccaaagctcgagtgaaccaagagccaccatgttgccacccctttaaacggcaacattccgaaaccaaaggccagggagctttaaatttttggaggggaaaaatatttccgggcaacggcaccaaagaattcggaaacagcccccacacggactctcgaaaccgcataccgacttaggacaataacgggaaatgtccagccaacccgccaagctcattcgggggaaaaac

SEQ ID NO: 126081 - DNA, 375 bp, Arabidopsis thaliana columbia
  unsure (1)..(375): unsure at all n locations
ccnccattggcgattagagcaacccgcccgctcntgatgatcaacgagcaggctatcaccagaagcaccacggcatatatttttttttcaagacaaccgaaaggcctcgcttaggcggtggggccatcaaagtgatgctaagcgctctgcttgtacatacaagagctaccttgtaaggcatgtataagactaagccgcctaggtgataaagagctttagaccaagctccccgaacaggagcatgaagaaagctgcattatgagtaggacgtcgagatcgactgcgcccgtagacgggcatcgcatcagctagcctcgcctcgtacatggctagtcctcgcgtaacatgcaacgatagccaagcgtaaaacgtccg

SEQ ID NO: 126082 - DNA, 763 bp, Arabidopsis thaliana columbia
cggcccacggtatagttaagctagatatcgaattcgcggccgcaccaaatccctaaaacctacatttccgatttaaaactcttctccggcagagtctcgaagccgctttctgtctcttcccagctagcgactctaccgattctatcattcgaaggagagaaggtcggagagacgtatctagacctcaaagcggcgccggaggataccgcgcgtgccgttgtgcaccgagccatcgtgacggacctgaataacaagcggcgaggtactgcttccacactgactcgcggtgaagttcgtggtggtggaattaaaccttactcacagaagaaaactggccacgcgaggcgtggatctcagagaacaccgttacgtcccggtggaggtgtggtgtttgggccaagacctaaggattggtcaattaaaatcaataggaaggagaagaagctagcgatatctacggcgttatcgagtgcggcatctgccgaaggtggtgcgatagtggtggaggaatttggggagaagtttgagaagcccaagactaaagatttcttagctgcgatgcaaaggtggggattggatcccaaggagaaagctatgttcttgatgattgatgaggatgagaatgtggcgacatcgaataggaacattggaaccttgaagatgttgacgcctaggacactgaatctgcttgtattttgaacgctgatagcttgttctgactcctgcggctgtggagttcctgaatgcgaggtaccggcgtgat

SEQ ID NO: 126083 - DNA, 753 bp, Arabidopsis thaliana columbia
gggtcgacggtatcgataagctagatatcgaattcgcggccgcctgccacatgaaatatgctatcgcggtgtcatacatttcggaaaagaagacgcaggcacttgaaactgttatggaaaatgcgaaccactaggatgctgccgaatgcaatgacaatcataagactataacgatcgtgagctaaaattcttgtagcgaacatggtgagagagatacacggttgcatattgcggagaaatcttgatgctattcatgccgttaaaaacgctttaacagatactaatgctaagtcaggggatatagaatactcaagaaccatcttcctgggtatggaaacgaaagacatcataacttggaactcgctgattggaggttatgttttacatggtagctacggtccagctcttgctctctttaatcaaatgaagacacaggggattacgccgaacaggggaacgctttcgagtattattcttgcgcacggtctaatgggaaatgtagacgaaggaaagaaagttttctacagcattgcgaatgattaccatattattcctgctctggaacattgttctgctatggtatatttgtatggacgagccaacagacttgaagaagctctgcagttatccaggagatgaatattcaatcagagacacccatctgggaaaagcttctaactggcttgcagattcatggagattttgacatggcaatccatgccgcagagaacttaatctcctttgaacctgaaa

SEQ ID NO: 126084 - DNA, 375 bp, Arabidopsis thaliana columbia
gtgaagtgaaaataaggtaagttaaattggaaaattgttttgaaagatataagagggaataaattgaattttattaataaatatgaaaattggataaaaatgtaaagtaatattagaatattataagaataaaattgtggaaaataaagaagttttaaaagaaggaaataaagtttatttgatatggtagttaaaatatttaaaagaggggaaaagttatatgaaataaatttgtggataagtatatgaattataagggattttatgaagaaatgttaatatcgtaaaaatttattataaaataatgtaggattggtttgaatttatattggagaggttgatttagattagtaaatagaaaaatgttttatattg

SEQ ID NO: 126085 - DNA, 677 bp, Arabidopsis thaliana columbia
gccggcgcccagcgcaccacgcagggagccccaccgaattcagatatataagacaaccaagcaagcagagcaaagaggagagggcgaaagccggcgacatgaaaaacacgactgacacggaccgcgaaacatcaaaccgccccgaataaagcgacaacgaacgcgataaacgccaagcaggggacatgagcatctgaaagaaacaaggggaaaccggctctcgagccggcacagccagaaaccacagaagcaacccgaccgaggacccaagaggatgcaacaccgcgcacgaacaccagtgaagcatagcagaccgcaccacaaacaggcaccccccgcgccccaacggccaatcccgcacagacactgacagaccgcagaagcggccccagaggccggacgaccacccacaagaccagaagcccgcacgggagggaagcgcaagagacccggaagagcaccgtcggcggacgacgccacaggccgacgaccagcgacaacccgacccgcagcggccgccaagccgcgaggggcaccggcccgcaagcccaacccaccaaggcagggaaggaaaacggacgccgccaccgcccgacccacccaaggacacccaaccaagcaccgcctcggcgcccagaggacggacacgcaccgaagcccggaacaacccaccgacc

SEQ ID NO: 126086 - DNA, 1083 bp, Arabidopsis thaliana columbia
gaattttttgggggaaagatagttgcccgagaaatatattatatgagtaggtgatgtgaataactgtgataagatagaaggcattttttggttttttttgggagagggtaattaggagaagtagataaaagtggtgttgggggaaaaatgatgaatatgtaattattgtatttattgtatataggaagtgtaaggtatgtggtgaattgtattgttttatgagttatatggatgattagtttttttaataagttgatatagttgttttttttgttataattgagttatgtggtgtatttttgttggtatatgtgatatatagttgtatttaggaatgttatgaggttatggatggtaagttataggataatatttattatattgtaggaagatgggttaaggaaaaataaaatggttggtgaattcggaaataatagtaggtttggtaagtataagatgtgggtgtataagtgtataaacgatttatgtgattatgatgataggtaattgctaatagtgaatgaacttaagtgagttgtattagggatattattatggggggagtagtgatgaaaatgtaatgttagtgataattgtatatagtagcatagtttatatataatggagatagaagatgatttgaaatagatttaagtttgagtttatattatttagtggtcgtgaaatgtatggaagatgactgggtgcaggataagtttgtcaactgtgaagtaaaaatatgtgatcttatattgaaggtgtattgtggtgtgtgtagagttcttcaaaggtgtggactatatagagattatgatggtcaagtatagtaaatgaattgtgataagtgatggagtgtggtaacttgaagttaaatgatctttagaaatgtaggtagatgtgatgttgatgtaatgtggatattattgataaaatttgtgaaatattgtgtgtaatgaattagtaatagttgattgctatgaaaaatagttagttgcttgaactatataatgaaaaatgtatgttgtatgagaatgtatattgtttaattgggattgtgggattttttattgatatgttggtaga

SEQ ID NO: 126087 - DNA, 865 bp, Arabidopsis thaliana columbia
  unsure (1)..(865): unsure at all n locations
cccccccnggtcgactgtatcgataagcttgatatcgaattcgcggccgccctgaatcttccatttagtccgtttggatttttatatgtgttttgactcttatgcatacacatagtgtttgatagaattccccaactcaaccttttaacttttaagcaccattctgggtttcttcaaaatcttttcttttgcttatggaaggtacgaagcttgaatgttgtctttgaattgtgatcagggttgttttggcgccattgactagatcgagatcgtatggtaacattcctcagcctaatgccaaattatattacactcagagaacaacacctggtggtcttcttatttccgaatcctgtgtagtctccgagacatcattgggctatccggatttacctggattatggaacagagaccaagtggaggcatggaagcccatcgtggatgcggtcattcaaaaggcggatcttcttcttccagatttggcatggtggcagagttttttcatcaagaccagccaaatgggggaagcaccccgtcttcctttacatgacaaggccatttgaatgtgcaaagaacattgtattggagggtcaattttaagcccctccacgggcgggttaaatgaagccgaccgagcttttcccgcccatttgtcaaacgacctttttagaaatcgccttgcaaccgaaaaaccccgaatccggaaagccttgtgcctttccgaatagggaagcttgggagtgggtttcaaccggggccggccacacatggggtttaacctcttgaatccgggaatccaagctttccctgtgaaaaagaaccaataggttggaatttgaccaataaaaggtggaaccccaaattt

SEQ ID NO: 126088 - DNA, 682 bp, Arabidopsis thaliana columbia
ccggtctcggaattcccgggtcgacccacgcgtccgaggagagataaaaacacaaatctacacggagatctatggtgattttgaaggctggccgaggaagaggtaaaagaggcgggggagctatggaagaccatcagttggtcaaatagactccccctggaaaagagcccaactccacctttcatggaattggcattcaaggagaagggcctcccgggggctacaaacttagatttcaaaagccctccgcgaattcaccaaagggcgagtatgccccaatcttcaaggagccgtaagggagtggtacaaccctcagccagcgccgcgaaagacatgaatgagagctccctccgagaaatgaaccctttatacgttttccaagacaggtttaagcccttgaatggacccccacgcaggagctggtttcacaaaccaaaaaaaacaaaccccgcctttggaaacatagccaaagtttaggcccttgctggcctcggtcggaaataccgcgtggcataaaaaccatcaaaaaaaccttggaaaccacggggggcttcaaagattcgtggcctgagggacaaccgctgggctttatgtcacctggtggacccatgctcttggagaaaaaagcaccacaggttcctttctccccccccacaaaaaccaatcgcaaaaaaaccttttg

SEQ ID NO: 126089 - DNA, 802 bp, Arabidopsis thaliana columbia
  unsure (1)..(802): unsure at all n locations
cccccccccccccccatggattgcaatggcaatccgcagnaccggttctgaattcccgggtcgacccacgcgtccggaacggttcttgagatggaggattcagcttctcgtttttagtatcaggaatcttgattttgtagctggtggtgtttccacgatatgtcaagttaatgatcttaagaattctccatgacctggttagactgaccttaagttatctactaagcgagctcttcatcttctataagacaattaccctgagtttgtctcttgacagatattcatcaatgttccatggtggtgccttgcggtctatataattattagtccttatatgtcacaaacgtcaacgatcatactacttctcacaagtcctacaagatcagcataaaccctactcaagtacatattacccgaacatgtcctgctaaaagatgggggactaagtgtggataattgctaatgatactcggttatcacacacgatgatcttgatacctaaattactgttaagcccactactaaacaaacccgctatatatttgtatacgagatatgatcactcgtgtgggagataagatgtcggggataggacgttctattggagcggagtttgtgccgatgaacatggaagggtatacagagaccatcataatcctgggatttgactggaagaagacgtactggcggttccttatgatctattaagttgaatacctcggcaagagtatgcttattgcagatagcgacaatttacctcaataacattgactacgggtgtaaagcctcaccttttgcttga

SEQ ID NO: 126090 - DNA, 760 bp, Arabidopsis thaliana columbia
cagtacccgtccggaattcccgggtcgacccacgcgtccggcggtcgattgacaagaggggttcgaagcataccactaatttttttcggcgaatcgaacaactcaacccaatcgacgaggagcggcttcttgtcttcttcacatagatatccattactctactcgtgtaaatctcaccgctccaatctcagattcgctttccctccttcttcagatacgacagcgacagaaactggagaagaaaactctaaatcgaccgggaattacgcgtttctagaggaatcgtttcgtaccgggaggtttttgagtaacgatgagttagagaagcttaaaactcttgaaggatttgcgtattttcaagagcttgaatctggatcgatgtgggttcgagtatatgagacatgaagagatggattcaacggcgcatctattggctgagtcatttggtgaatcgatgttattaccttctggttatcagtctgtgttacggtttttgattaagcagtatttgattgaaagaagagaagtgttgccacacgcagttactttagtgggcttctttaggaaaaaagttgatgagtttagcgattaaggagaggaggaggctgtgatggctggaactgttgaagtttgtttggaaaaacgaggcgctaatgcttcttcttctttttccaactcctctaaagaatcaccttatatctgaaacaagactgtcaaagaggatcttagaaggagagaattggggggcttttgctgaagc

SEQ ID NO: 126091 - DNA, 762 bp, Arabidopsis thaliana columbia
gccccccccccccccccctttgattagcagtgcccattgggcacccccctcttgccgggttgacccacgcgttcggtgatatgttcaaagcgtgtcgttgttgacgcacgtcaccatatgtgattttgtcttgcttcgatcatagctaaagagttgctcagtggacagagtgttgttgttgtccgatgtgaggagatttgtttgtctggtggtttggttcgtcagaagatgaagtacatgacgtttcttaggaaacgcatgaacactaaaccttctcatggtcctattcatttccgagctccgtctaagatcttctggcgtaccgttcgtgggatgattccacacatgaccaatcgtggtgctgctgttcttgcacgtttgaaggtgtttgagggagtaccacctccttatgacaaggtcaagagaatggtcattcctgatgctctcaatgtgttgaggcttcaggctggacacaagtactgcttgatgagacgtttgtattatgaagtcggctggaactcttaccatacgcatcaggagcttgcgggtacagaacgacatgcccaagctatgtctagcgtgaaagacttcattcacctcaaggctaggcctacatgctgtgtaggagaaacttggatccccatctcgatgttacttgcgttggatcaattttcgtgaagaacattttcggcctcttgtgatttggggattacaatccttttttgcacacttggctttgttcacaattcctgactttgcagg

SEQ ID NO: 126092 - DNA, 750 bp, Arabidopsis thaliana columbia
accccccctgggtcgattgtatcgataagcttcatatcgaattcgcggccgcaccacgcccaaccgaaggtacattttataattgctgaaaacgaacacgaactccgagaagtgagcggtaacaacagagggtaacccgaaccacaccatgagacaacgatcatgaaccgagtgcacgagacacgaaccagccactaatgatcggagaacgaaaagcttagaagctcacaccacgacaacgaacaaccaggcgaagagacaccaccttctggacgttaaactgcgtcgcaggactacacacggcatgccgatcaccagtgcagaagaaactccggggggacggcgggaaccaagcccagagctgaatacaagccatgccatgagcgacggagcatgacgcaacgacccaccaagctatggcaattccggagaggaggttgagccaatatcagcacacaacactagcgacgaagcacacgatgaagcgatccctcgtttcggaggggacgctgcgcaagggactgcccatactagaggcgcctactcgacatgaagaaacctctgccgcaagaacgggatggccatacaaactcggatctaccccatggactcggaaaagctgcacgaacggaagaccttatggccgaaggatctaccacaagggggagggggacccaaggtcctgccactcctagccagtggggacctggataccgcatagccaagaccgggggacggaactccctcccg

SEQ ID NO: 126093 - DNA, 984 bp, Arabidopsis thaliana columbia
aggaggagaaaaaaaaggggggaggggggaggaaggaagaaatgaagggggaagggaagagagacagaagagaggggaagaagaagagggggaaaagagggaaaagaagggggggaaggaaggaggggaaagggaggggaggaaaagaaagggggggggggggagggagggggggggggaagaatgggaggaggggggaggaaaggagaggggagggggaagggagagaggaagtggggaaaagggaggaaagaaaaggagagaggaagaaaaaaggagaaaaagaagaaccaaagaacggaggaggaaccgacggagggcgcgacataggcaaacgcaggaggacgaagcaaccggacgagagcaacgagtggcgagaccccgcaacgaacgagggcccccacacggcgcagagagaaagaaggaaggccggcgacgacgcggccgaggagaaacggagcagagggacgccccgagactggggaagaggaacccggggagacaaacgaacgaacgaggccggacgggggacacgaagcgggacccgcgacaccacaggccagcaaaggagcggggagcaaaaagaggcagccgggagcgggagagcacgccggacgcacaccggcaggggcaacgacagagaagacgaccgggacccaaccaccacaagagcgcgcccgagccccacagccaggcaggccccgacccaagcccaagccgggcagcaacggagggagacccgcccgcccgcgccaaaaagagaggcaggggcgcggaccagccaagagagcgcgagcggcgaaaccccgaagcggggggggcgcgccaagagaagcccggagccgacggccccgcggaaaagaacagagagggaggcaggcccgcgcccccgacgaaggcagggcagccgacgccgcaacccgcgcgggcaggggggggagaaccccaggaccaggacggacggcacagggcaagcccgcaaga

SEQ ID NO: 126094 - DNA, 753 bp, Arabidopsis thaliana columbia
ccccccccccccattgaaatgcactggcccttccgcagtaccggtccggaattcccgggtcgacccacgcgtccgtttcacggtttcgcgggcaaccatgttaattccattggagcttacttcgttccaaaatcctccaccactcctgttccttcaacccctttgaagctgaccgcagaaggtggtgagacaggagctgtatgggacgatggttctcacgatgatgttaagaaagtttatgtaggacaaggcaggttatagtattagcgtttgcagtaatcttactgatgcaggtgacgatagtggtgctactgaaaaaaggaggaggggggcaagtggagtatcatgagaggtacgacgagtacagtgtaaaacggggagactttggggtggttagagaagagaatgcatttcctgagggaagagatgatgatggttgaggatcgtttgcagaggatgcgacaagaccatgccgccttgaaggctcagttccaccatttggaacgcctcctccgccgcaacaaacagtaaatttgctacaccctactctctgtttgtgcagaatgcggatggatatatgcatgtatgtatgtaatgtattatcggacgttactttgcaaagttgttgttatacctacctactcatatgaatatgagcagagactctgttaaacgaaatgatgtaatcaattgtattcgtgttgcacctgtatcaaagattaaattcacactggtgactccactttctcgcaa

SEQ ID NO: 126095 - DNA, 436 bp, Arabidopsis thaliana columbia
tcgcgacctcggaattccgggtcgcccacgcgtcaggaataaacaattaacgaatatggacgcgaatcgccgggaggggtgaagagcggacttggatgacatgtgcttgaatccgatgattgaccctacgacttatgattggcttagaaaggcttcgggtctacattgttgaagccttcggattcacagaggtgttgcattttaagacgtgagtattgtaactagccgtccgggagactctatattgtcttcgttgcagcgtgtctttttaaagtcagcctgattatccacagaagcggtccaacgagaaatcagctttgatactgccattcagcactctgctcgggggataggtggagagacataggaagctgggcatggggttcatggtgggtttggaacacctgggtcgtggttctgtgaccttgaataaaag

SEQ ID NO: 126096 - DNA, 934 bp, Arabidopsis thaliana columbia
cggaatttccgggacgacccacccggccgaaaccaataacccaaagcactagaccccagcagcaattttacatttatgctcggcagacagcaacaaaacccaagcgagggagggcacatggaaaacaaggacagggccacaaataccgaccccaagggagacaccgaataatcaggattgcgaagcaccgctgacactctacccttcggcaagaaaacaccgaccgatgagcacgagcccatcgcaacctcacagacacccgcaaagggaagcagcggcggatacaggaaaggagcgacagaggccacacttaaagaggacaacaaaggaacacgcacggaccggaacgaacaccaccgaaacgcggcatggacgcaaggacctcccccctagaaagcatggccaacaacggacccaggcggaagcccaaacaagccccccccacttcactaaaaacaacggagctcctaccctcgcgggaacatcctaccgaaggactggaatgaacaaaaaacccaaatccggaggagagagaacccccggacacaacagcacccgtggatgggggatccgggaacaacacacaacacacatcccaccgcaacacatcggtcacctcgctagaacaccccgggagaaacacccccaacacacgacacgaacctctcccacattagcggacgagcggacaccccaacggcaaaaaccgaaaataacttgcgtcacatcaaaaacggcaaacccgggacatggtcccggcgacaccacaaaaaagggcaccagtggaaaaacacaaaggaaccccgccgcccgaaaaatgggcaaaaaaacacctgcgcccaggccaaaggcaaaacacaaccaacccatcgcgccacgggggccccagagccgaaagcccacacgcccgaggaagaagacctaggaaataacc

SEQ ID NO: 126097 - DNA, 769 bp, Arabidopsis thaliana columbia
  unsure (1)..(769): unsure at all n locations
nnnnnnnnnnnnnnnnnnnnnnnnnnnnnnnnnnnnnnnnnnnnnnnnnnnnnnnnnnnnnnnnnnnnctttttttttttttttagtgaacaaattacttttcatgaaatatatttatgattcaagattacaatatattattaaggaaaaactctagagcctcccaccatgacattaagaaaaaaaaaataagagcttaagaaatttataatgaaaaatcccaaagctcaatccttacccttaatagtcgaaaacagcaaaagaaagaaagcttaaatttggatatctagctttatctagaataaaatctccaaggaacttaatagcatatctagatgatgatgatttggatgatttgtagatagataacgatcatctcaagctttgccatatggatgatttgggtgtgaaaacttcatctcagcatccagaggaggtccaccactacgaccaccacggccattgacggtgctcacaattcctccattaacaccaagaaagtccaaagtcaacctatccgagccacccatgctaagattgtttgcgaaatgaaggtcgaaaaggctaggggaccggccttgttgatctgttgtcgcagctagagagttcatgagtccttgaaggtttccatgatcacaatctccaaagtcattaacgaccacacttgacgaagatgaagaagttagccctctaagcaaagcagatgggccgttgttatcaacaccattggtgaacagagaaggaacacctgtctgatcagaattcttgg

SEQ ID NO: 126098 - DNA, 507 bp, Arabidopsis thaliana columbia
tctgcagtaccggtctcgaattcccgggtcgacccacgcgtccgtatgaaggggacattacaaaatggcacgggtgacacgttgatattaataatccatgaatgatctggtggttgccgcttctggaatgtttgtacccgaattggcagttctcatagaagtgcaagactctagctcttctgaggcctatcggggacatactaccctgtctatgaatggagacagcacagattgcacaagataaatgagggtgacttgtcagaggcaccagcacttcactggaaatgtacgcgttattggccgcacatataggcagtggcattgaatgtcaatcatgatgaccactgtcagctgtggcatactacgccactgtctccaactagggtgtgtcgtgattacatatcacagcacactgcgaatgggtatggcagaattcacgaaccccgcattcatatactaacccgtaataatagcaacctctgaattgcctggtttggcttgcttcgt

SEQ ID NO: 126099 - DNA, 718 bp, Arabidopsis thaliana columbia
  unsure (1)..(718): unsure at all n locations
nnnnnnnnnnnnnnnnnnnnnnnnnnnnnnnnnnnnnnnnnnnnnnnnnnnnnnnnnnnnnnnnnncttttttttttttttttttttttatcccatacattatctcacgggattaagctttcactcaagagatctttcgttctccaaccttaaatatatatacggttggcccatatatatctggatccgtgagccaaatggaccaaagacacccagcaataatctatcctaattcttccatcccattttgaatgccctgtggaaaatggaacatggagcttcttaggagttacttattgagttgccaccttggactgcattttttccttatcttgaaccataaccgagccatttaaatcatggcccgattacaatctaacatccctcctttaacaaacacgtgtatccagaaattgcttaatttcattgactccactgttgggaagacatcaactatctaccagagttgtgttgaacactcactgccctcattatcagcccaatgcatacctaaacacacattgtaacgctttgacctgcagctgaagcacaagcgccatactatgaacggacgacgttgaccccctttttgtgctccagccttttaaaaaacagaatgcacccaacacatgcttggctttgtgggatttccccgggggcacccttaagcccattattcactcaaaaggggtttaatttccaaagacgcatctggcgt

SEQ ID NO: 126100 - DNA, 969 bp, Arabidopsis thaliana columbia
  unsure (1)..(969): unsure at all n locations
nnnnnnnnnnnnnnnnnnnnnnnnnnnnnnnnnnnnnnnnnnnnnnnnnnnnnnnnnnnnnnnnnncttttttttttttttttttttttttttttcggaacaagaaagtttgtaatcaatagaataagaataagctgtttatattacaaaaacaactgattaaaagaaaacaacatcaacaacaaggataacatcaaacgacagtaaaagaataacaaacttagacaaaaaaaagaataaaaaacattacaagtttacaacacataatatgcaaacaatagatagatggtatcgtggtcatgtgttgtgtggcagtagctagctatagagcttaattagcttctcatttggaagggggtggagtgaaaaatgggattgttggaatgctggtgggaagattgaatgggaagttgtttgggataaaaattgggaagttagggatattgatttgtgggaatcttgggttataattagggtttggctggatcatggaaatcgcgtttttttgtgtgaagtcgtattttggcttccacttactcattaacatctgtacgtctggtatgtcatataagtggtcatgagacttggggtgagccttataaatttatagtgttaacttaccttcactcacatttaaaatatagtgatatttgcgcaccttcaaaccgcgacccaacaggttcgtacactccacgtgattcagggtgacgtatgattctctatcgactgcggatcgagtacaagattagtatacatcgttcatataaagttcggaggatcagttgcagatgatatcatcatcttcaacgtctgttgaggtataaatgatagggtatagtactcctaccactactctttccagcgagcatgctaccatgcgtgggtggggactacttgttcacttttatctacacataagatatgtaagatcatcgagtatataatataatcttactattggtctccata

SEQ ID NO: 126101 - DNA, 758 bp, Arabidopsis thaliana columbia
ctttaccggtccgcaattcccgggtcgacccacgcgtccgtgggagcagaaatgtctgaccttgttcagggtggtcttatcgtacttttgcggggaatagagaaatttgattcttccaaaggtttcagaatttcaacttatgtatattggtggattcgacagggtgtctcaagagcactagtggacaactcaagaaccttgaggttacctactcacctacatgaaagactcggtttaatccgaaatgcaaagcttagacttcaagagaaaggaatcacaccctccattgataggattgcagagtctctaaacatgtcgcagaagaaagttagaaatgcaacagaggctgtaagcaaagtattttctctagacagagatgcatttccttctttgaatggtctccctggagaaactcatcacagttacattgcggatactcgtttggagaacaatccgtggcacgggtatgatgatttggcactcaaggaggaagtaagcaagcttataagtgcaacactcggagaacgggaaaaagagatcattcgattatactatggtctagacaaagaatgtctcacatgggaagacattagttaacggattggattatcgagagaaaaggtgagacaggtagggcttgtggcactggagaaactaaaacacgcatcgaggaagaaaaaaatggaggcaatgatccttaagaatggattttggttttgtacattttgattacctcagaaccattgaaagcgggtgtg

SEQ ID NO: 126102 - DNA, 792 bp, Arabidopsis thaliana columbia
cactctagtcgagctatgacgtcgcatgcacgcgtacgtaagcttggatcctctagagcggccgccctttttttttttttttttttttttttttttttttttttttttttttttttttttttttttttttttttttttttttttttttttttttaagggggaaagataaaatttcccggaaacccttttccaaaaccggtttttgttttttaaccccctttcccaaaaaacccgggggaataaaaaaataaaagaggggggtcccccccccccttttttgccccggttttttacccctttccaacccctttttttgggtttgggggaaaaaaaagggccaaaaaccaaatcattttttaaggggcatggccccccttttttttttccccccgggggggtttaatttttccagggccccaaacccttccgggttccccccctttttgaagaaacccaccccgtaactaaaggttcccccagggaaacattttttggctaaacccttttttaacccgaggggctttttttccccgccccccaggggggcccttaaaaaccggcttacctcccccctgggggcccaaaaattatccccccgccccggatggtgttccaaaccaatttccccaaaaaaaccggggaaggagttctcccgggggcccccctttcaaagggggaaaggcctttttttttcttaaagaaaaaaaatcttttgtcttcccacccccttttgttgggccattttaaaaacttatttttttcgcccaaaatttttttaaaaaaacctctttt

SEQ ID NO: 126103 - DNA, 787 bp, Arabidopsis thaliana columbia
  unsure (1)..(787): unsure at all n locations
nnnnnnnnnnnnnnnnnnnnnnnnnnnnnnnnnnnnnnnnnnnnnnnnnnnnnnnnnnnnnnnnnnnctttttttttttttttacagaaatataagtttgttgactgaatattagacattacaaaagcttgagttttgttttatatgcgattaataataaacacaccagaggatataagctaagttactaagagagttaggctgagaaagagatattacagacaaaaacgacgacgtaggaagacaatagacccagagagagagaacaccagagtagtagcagttgtcacagtatcagtgatttgttggttattaccaatcttcttccttgttttggtgtcacactgtcttctaattcagtagtaatgttgctgatggtggaattggtggtgttgatgatggtgtgggtggtaaactggaggagctggagcaggaactggaccattacaataaccgttgtacgctgggtaaccgataggagagccttggtatgagcctgggatgatctccggagagtatggataaggtgggcttctgttgctgtagactgttgtaggtggggatgggtaaactgctggtgaaccgtattgaggagagtgaaagggggaatttgtgaacgggaaagaaaaaaactttgcttttgtgaaaccccccggcttttggctggggggcatttggaaccgtttggaacttgggctcggggttttttttttgtttggggaggggaaacaagattggcttgggcttttttttttttttttttggggtattttggggttattttttt

SEQ ID NO: 126104 - DNA, 769 bp, Arabidopsis thaliana columbia
  unsure (1)..(769): unsure at all n locations
gagcatgacgtcgcatgcacgcgtacgtaagcttggatcctctagagcggccgcccttgnctgtcttttttttttttttttttttttttttgcttttttttttttttttttttttttggaaaacaaagccttgggcttttaaattgtttttaaaggggttttgtttaaactaaagggaataagggggggtttcaacttttttaatttacaaaaagtttttagcttgatttttttaaaccccaaaaaatattcccggagatccccagatttttttcccttgcgcgtaaacgggggtaaaaccccgtttaatgagtccaaatttgggggcccaaaatgtttgacttccccccaaaatgattccaaaaatcccccggtttggaagggtaaaaggggattttttaaattttccggggaatttaaaaaccttgtcaaggaactggggatttgcaaaccggacatgattttctccgccctacccatgggtcaatgcaatccttggggaatttgggccaaccaggaaaaggacctttggggtctccaatttttggggttttcaaaagaaaacacaaggtttttggaaatttttaatttgaactgttacctttggcaagttgtttatgcgattaacaaaaacccccccttgttgaggggtgttttttttaagagcttccccccaatttccaaatcttttttagtaagaggccccgtccctttgaaaaaaattcttcttgggggttgggagtgtcccataagcaattttttttttcct

SEQ ID NO: 126105 - DNA, 589 bp, Arabidopsis thaliana columbia
  unsure (1)..(589): unsure at all n locations
aaaacattttaggatcattttgggagaaaaacttttaaggtgatatggccataaataaaggccaatagaaaaaaatgaaaagaaacctataggggatattaaatgtataagatatcagaagtaagagatagaaggctttagaaaagatagaatatattgttaaacataaacataatagactgagatgggagaacaaatagatataccaatgagggggagaatgaaacctctcaagaaaagagtaatgtcaaactatgggcgacaaagggttaatacaaaggaaatttatggaatgggggttaattataacccaaaatgctttcctttttcttttggggaaaagggggggacaaaaaacggggggtatcataaaaaataaatgaaagggaaaaatgggatggtcacagtaaaagcggggggtaaataaaaggtggggtgaggttttatataaaaaaaaatacgtataattaggaactcaggaataataaaaaaactacgaaagagataaaataatgatgatgacctaaaatgtgaaacatacgggtcaaaaagaatgtatttgatagangaagacgcagcgtatgatcaa

SEQ ID NO: 126106 - DNA, 443 bp, Arabidopsis thaliana columbia
cggggaccagccacccggtgcgagaaacacgatgcaagagaaaacacaatgaccacggcacacccctttgtctgtttttgctacagaaatacacagaacgacaagacccacaacgcgatggggggggaagcatgctgacaatcccaccgaaaggggacaaacagggcatcaagaatcaagcaagtaagaagtaacggtcgaaccaaccccgcctagagcaacaaaaacaggaacatggaactatacaccctacaggagggagaggcgcagcacgcacaccaccgggatagaaacaaacaaagccgaaggatcacacacatcaaaaacccctggcccgcacacaaccgacggaactcacccacagccaccaaaacacacctgcgggcccaaaaaagccaccggggaaccgcagaagaagcccacccacacggcacactgacacg

SEQ ID NO: 126107 - DNA, 445 bp, Arabidopsis thaliana columbia
gagagcgcgggaagacccaaaggacaaggattccattgggaaaaaccagggaggggacagcgaggagactaagacaggacaggaagatagaacccggaaaaggagcaaagtagggaaagggcggagcagatgaaaaccgaccaagagggaggaaagggaaggaaggaaaaaaaaaaagacgaaaacaaaaagaggaaaaagaggcggacaaaggtgaagaggacccgaggagacacaggcgaaaaacgaagaaagcaagagcccgagaaaaccaacacgacaagagagaagaaaaaaacaataacggagacggagagaaacagacaaaggatgacagggggagaagggcgaagaggaagaagccagaaccggaggaaaacaggcagacagccggaccgggaaaaggcgagaactaacagaggacaaaggcgagaaagcaaagaca

SEQ ID NO: 126108 - DNA, 867 bp, Arabidopsis thaliana columbia
cggagcaatagggtagggcaccgcccgaaagcacgagagggacaaagtaaaaacccacggtttaatttgaacagagaaacaaaagggaataacagaaagacgaacaagggcacacacgcacccaagagaggggcgcggcaccagcaggcgcacggacgcccgcgagcaaaaccgggaaaacagaaaggaacacgcggagggacaaaggaaaaagaaggcaagagaagccaaagaaagaatcgggcggcccaagaaaacgggggcggggaacgaaagaggactaaagcgagcacacaaggcagcggcataaagaggcaaggcaacaacaggggacaggacccggaggacagaccagcggcggcggggaaaagaacaaggcggggaacagaaaagagtacacacggaaaccgggggggagcacagaagcaacgaccggggacgacgaaaaaagggacgcaggcacgggggaaggacacccaggggaggagggcgccggacaccccaacggaaggcagcggagcgcaaagggcggaagaaagaaaaacgggcgaagcaccagcaggccctgctaaaccggtggcacgcccatggcaccaggagaaaaacaacagagggacgggggcactaacacagcggcgcacgcaggggggcaccgggagggcacagagcaaataaggggcagcaaaaacccccgggcggaaaaggaacaaagaatgaaaaagaggagagaatccgccaaaaagagaggaacctaagggaacaaggaccgagcaagggagacggccaccgcgcggggaacgaccaaacgggggcgggagagggaccacaaacacagcggcgaggaaaaagcgggcagcgcgggggaca

SEQ ID NO: 126109 - DNA, 467 bp, Arabidopsis thaliana columbia
tgcgcacggaaagcctccggataccaacaagagggggacgagcctgagtctgagctaccacctgtttttaacatatatcttgcaaaagcacgaaaacaaaacaaaaacgctgtagagtgtgtggctgaatccagccagaaatcaatgttgagaacgtaaaccaggacatgaattgtgacagttctgaaaatagcaagtgaagagtatagagagaagcacaagacaagaaaaaacacttaatagacaattgacgggataaacaagtaaaagacaccagttacagatgtcaagaggcgcgaagacgcgccatattgaggtattgcaagacgagcaagattagaccgatttaacagtgaccaaaaacacaagacgttaagacctgagaatgcaatttattcagggacccaaaccgccttgagaattcatggacttaccctagtggagcagtggtgtataacaaaagggtt

SEQ ID NO: 126110 - DNA, 1042 bp, Arabidopsis thaliana columbia
gtacccatttgaatttgggggccaaccacgcgcccgagacaactagaagcagggaaggcaaccactatgcattttcttttttttgtggatacatccccggcacacgccaccatggtcactatattcaccggctataagacatcccctgaattcccggtcccccgcaagaccaacaaggacatcatcatccatctgcaagtcatcgcggggtaagagattagcctgcatcgaaggcagtgggcctaccacattcggcaaagaaagttagacccgagtacatctaaaccatacctaaccctgactctgtaaatgcacccttagacaatctggtattacaaggatagctatgaacttaccacttatactttccgtccaaccacagctggaattactccttgctggtctgaaattccgcaggactaaaagctactggtatttcagtgatactcgatgtaccaacaagatcaccacctgaccaggtattcctaactcacgaggaacgagatactcggtactaaatgtggggaaagacttttacattattgggttccgggaatggccacccgtacctgtcccgcaatctaaggtcgcattgaaaagtggacatgtctggaaaccaatctcgtcaatgtaaaggggaagttacccccggggccggtacttattactccaggggaatccattgacgagatttcaaatcaacacgacctccttggccaaatgtgttccagatagccatcagacaggtatcctatattgagtactaaccaatgcgcaccaccaaaagtcctccccacgtcaaatagacagtgaaatcatagttctgatcctaaaaaaaccacttccctaactgaaaaatcataccttcttgctcccatctttcaatttttacctaattagtacctggggtcctattttatagcatcctttatcggagacacagaatttcctaatagggaaacagtataaaatggtgcttgttatttaccgacaaaatatctgcattttgccccataacaaacgccgcgtccgccatacaatc

SEQ ID NO: 126111 - DNA, 630 bp, Arabidopsis thaliana columbia
taccggtccggaattcccgggtcgacccacgcgtccggagtaatatgaaacggaggactcaatgaggtcactgggcgcttttatttatctatccccgttcaggccactgtgtgtcctccattgagtgggtttataacgtacacttctgttccagactctattgcaaggcataaacgactttaatatctttactataattcgggccagagttggctggtagaaggcgaagacaccactccacaaaagtaatctctggagactatgtgacctccttggccttagctacaacctgctgggaattgaactagagtacactgatgtgaaccaggaaagatccccgtgctcatgaaacgcgcagcatgaaactacgggatgaggattcctggtaaaaaccgaggacattgtcctggattcattcataagagactggtactgcgtcagtggcgcgtgcattatcactggattaggtagcatccggactttatgtctattcttgatacgataggtctataatgcgcgtaatgagatcctggagcgctgtttactgggatcacccggggttctataacctcctctatgggcaatgaacatgtgcggttgtctttcaagaacccaagttggtctattgga

SEQ ID NO: 126112 - DNA, 346 bp, Arabidopsis thaliana columbia
catgacgtggcatgcacgcgtacgtaagcttggatcctctagagcggccgccccggacgtaccactattttttttgggttttctaacgaaacccacatatcgggagggggtgtttgcctactcaagagctgttgcactacgcgaaacgcaggaaatggcgccaccatccacagacagagacttggctcagaaatcgaaccaagactatgtggaaaagggatgcgcttatgcacgaggcttggtggcttgtcacgcgaaaaatgttacgccgtggactggacatggggtgcttaaccccataatggcaactgaaggagaccagcttcttgggggtatagggctcaag

SEQ ID NO: 126113 - DNA, 404 bp, Arabidopsis thaliana columbia
tctgaactatttgcaaccccaaaaaaacccaactgtttagcccccgggacccggccaaggccaacgaacacttccggcaccagcacccttcacagcccgaaaacgtagggccaccacgccaaagttggacccttccctccaaaaccatccaggacacaccctctcatggactggagaacccggcccaaccgtcccccaaacaaccccgtcttcggacaccaacagcccccccatccggaacaaggccccacgcaccccctcaaccacggaccccccccatcacatgcctaaaccccacgcatgcagcccgcgcccaccccacttcacagatcccgggcaacatctcatcggcccctccatggccgcatgactttcccccctacggggaaggtaaaaaaaccccc

SEQ ID NO: 126114 - DNA, 748 bp, Arabidopsis thaliana columbia
  unsure (1)..(748): unsure at all n locations
gtaccggtccggaattcccgggtcgacccacgcgtccgtctgaatgtccctttaccgaatggcacgggtgaccggtgatatgaatatgccatgaatgagctggtggttcctgcagttagaaggtttggacccgatatggttgttctcgttgttggtcaagactctagcgcttttgatccaaacgggagacaaagcctgacaatgaatggatacagaaggattgggcagataatgaggggagttgcagaggagcacagccatggaaggttgcttatggtgcaagaaggcgggtatcatgtaacatatgcagcttactgcctccacgccatgctcgaaggggtgctgaagattccagaaccgcatctatctgatccgatcgcttattatcccgaagaagaagctaatgctgttgctgctgtggagtcaatcaaaacatatcacaccgaatttgttccatttctcagaggaacttgaaaatgggacgtatgaatgagtttatgttattcctcgttgtcttgtgaccttttggaacacagatccaaatcaatcaggtcaaaccgtatatatcaaaatacttgttgatcaaactatcttttgtatgaaaacttattcacccganaaaaaaaaattttattttaaattccccttttccggnnnnnnnnnnnnnnnnnnnnnnnnnnnnnnnnnnnnnnnnnnnnnnnnnnnnnnnnnnnnnnnnnnnnnnnnnnnnnnnnnnnnnnnnnngcgg

SEQ ID NO: 126115 - DNA, 723 bp, Arabidopsis thaliana columbia
agtaccggtccggaattcccgggtcgacccacgcgtccggaagacgaaggaagggcgtgcgctatactctactctttcgatgtggttacctccccggatcaagccaccatggccggtccattcactgatttgaagaactacctcttctttcccggccaccctgccggccagcagcgacatgacttgcatcacaagccttgggggacgagtttgctgcctgaatgggtgctcaccaatcgactacagaaaggttgagactctatgttaccttcatgaccttactgacgaaaaattggctatggaagatgactaccttttacctaacaagagaaaccctcgtggtgaatgcgaacacaaacacggattggtgctccgtgggcacgaaaacactccaggctactaccatggacggtactgggcactgtgggaactcacattggccggatgcaccgactttacataggttttgaacgaagatatacaacgctcttaggagaacccaggcgcctgacttaggaacagaatatccgaagacgcctcgtgagtacactgcatcattcccattgactacaaagacgcccacccatctgatgctcaaacacgtacgtggagataacaatggtgactatacggaacccagttactttagacaacgaaatttaaatgatctgtagcccatgctgaaaaacgaacggtggggtgcctatcgtgccgctataaaag

SEQ ID NO: 126116 - DNA, 757 bp, Arabidopsis thaliana columbia
  unsure (1)..(757): unsure at all n locations
ttcnnnnnnnnnnnnnnnnnnnnnnnnnnnnnnnnnnnnnnnnnnnnnnnnnnnnnnnnnnnnnnnnnnctttttttttttttttttttgaagtgatatgaatagggatttttatagaggatatgattgttgaacaaaccttcagtttttttactttggcaaaggtacttacttaaatttactttgaccatacaaaagtgggcttcggatagacaacattgaatattccaaaaaaggatttaagtcatcactgacgcttgggggcttgtaagcaagtgaaactgatgcactggacttgaagggtgttgacaaatcctatgatcctaatgaaggcgcccggggtctccttcttggtgggtcaacttggatccatacttgggcagaatctgggcattcgatcaatggaagcttacaatggcccagaaccgtgcattgaacaatcctggggtgtttacatgctcacagttcacaaattcgagctgcaacaacaatttaacacaaggaattttcttgttgcggacaaggcagtcaactcccttagccaacaccactttagtaaggggagggaggtaatatataatctgaaccttcttctgtacgattggtggccacaccttaatgctggtagctcttacacattgtttgtgatggaagtaatgtctttgtaggccatgcgggtgaccggtaaagataccgatgacttcaaagcagtgaatggagccaccatggtggcttgagcctgggaggtaaccacacc

SEQ ID NO: 126117 - DNA, 809 bp, Arabidopsis thaliana columbia
  unsure (1)..(809): unsure at all n locations
cnnnnnnnnnnnnnnnnnnnnnnnnnnnnnnnnnnnnnnnnnnnnnnnnnnnnnnnnnnnnnnnnnnnctttttttttttttttttttttttttttaccttcttctcagacccggcttcctcttctttctcctcttccttatccttcttcttcttcttcttagaagacttcaccttctcttcagcctcttctccttcaacttctttggttttagatttcttggttgttacaggagcagggctatcactgctatcatcatgcttacgcttacgcgcttcccctgcttttccattctcagcgtcagttatccttgcattactcttcaaagcacgccaagcagtcaaagctgcaaaaggaatggcacttgcttccacatgtgaaattgatgatggcttttccgtgagttcgtcttccgaaagaattccatagtcagtataagtacctcttaacgccgtcggatgcaacgcaccaaaaacttcttgtcctactttaagggactttactgaagtcccaattgccgcaacttcaccactgacatcacgtccaactataataggtagatgcggttggaatacagaacgtccatatccagctcgtattctgcattcaagaggattaacggagaccgctttttgccttgacaagaacctcatttgggattcaagattcgggcacccggaaacatttttccccgggagcttcaaaaaacccttcccgggaccacccaaaaggcggggggccaaaaaatcaccaggccacgggggcaaccccgggttaaaagaaccgccttcccgaaaggaggaaatttt

SEQ ID NO: 126118 - DNA, 958 bp, Arabidopsis thaliana columbia
  unsure (1)..(958): unsure at all n locations
ttttgggttcgacccacgcgtccgcctggagatctgctcttacttcaaatgacaccccactcggctcttgattttcttcgttctggggtcaatctcaatccctggaatgtgtcttcaccctcctcagatctttctacatctacttcctgcgaccattcaaaaaccttcgccgatacggttcatgggcatatcatcacctggaccatcagacggaaccggtaaagctttcgcctttcagttagcccagaaaggtcttaacccttatactcagatgctcgtcaacccagaacacgcctccaaagaatgtctcctgaatctccatccaggtatcttaaggcaattaggtcactaacttcacgaatccttcgcaccgtttgcggatgggcttctttcctgggagaatactgcatgaatggtggtgcaacacgggatttatagggaagaagttttttcgaaaaggcatttaagcactggtcttgggcgattttttggatatcatattataatggcctgggcagactgatcctttaatcccctcttagtggcctcacacgctattttttctcaatcgcgaagggcctggcattggaaaagaaggtttggattcccatattaaaacctttggaatttgaaaggaaaccaaaatgtgttggataagggagaccttatctatacaggtgtacccttcatacgccttgtgggttgggcactttaattattgtccttctatagaaagggaaagcacaacgggctgccttctctaatttaaacctctcgggggctctcttcggggtggcctgggctgggcctcaattcatctcctctcntaccggacatccctttccttaccccttcctgcgactaagggccctggggggccccaaaaacaccctcaccggatgggatgtcaggtgtcaaccatacggacggtcctccccactgcttccgagtgtataca

SEQ ID NO: 126119 - DNA, 871 bp, Arabidopsis thaliana columbia
  unsure (1)..(871): unsure at all n locations
agagaaaattgaattgcactggcctctctgcagtaccggtccggaattcccgggtcgacccacgcgtccgggtgaatgtgaatttaccggatgaacccgactacctttgtttgattctgcgatgcaagacctgttgggcgatgatccggcaatgatggctctccaacacaggagggtgctcaaaggaggatattactctttggccatagacccagacggttgaccattgcggacgaagaatagaatccccctgagagaacggatcgtgtaggaatccctgcaacgacacacggatattggataggcaatgcacggcgcaccaatggaagcgaatgatgttattatatatgnggcttgatgtctacactgccatcgactatattggagagcaggtatatgccacatgagccggattgaatactgatgtcgtattcgtctatgtatcccaatactcaaggagcacttgatgacatgggagtgtctgtgaagctggtcttattcagcaaccatagttctatcgaaactcttgttcctcgtattcttatgcaacaacgtagtgagatgtgtggcagccatgagaggaagaaagaacctatctatcacttaggtgtctcatggcgtggctgtcagggcaactgcgaagtcctcctttaattgatcgatgtcacaacgggtactcacaaatattaccacatgctggaccttaccatattattgcggatatgattaacccgattcacagtgcgataaaacaaagaaaaatggagcagaagaggctttccatgttaaccctgggtgggccccatgctggaaaatcccaaggggtagttgcctaggtcccggcaactctgggctaccattgaaacagggt

SEQ ID NO: 126120 - DNA, 739 bp, Arabidopsis thaliana columbia
  unsure (1)..(739): unsure at all n locations
nnnnnnnnnnnnnnnnnnnnnnnnnnnnnnnnnnnnnnnnnnnnnnnnnnnnnnnnnnnnnnnnnnnnnncttttttttttttttttttttttttttttttttttttttcgtgcgagggaaatgtgatacaaaacaggtgtttatggatcaatctttttaacaaggggggaatacccaactcattcgcctcttttttccttaacgtttcaactcaacaaaaaataacatcccactcatatcttcatacgcctttgggttgcctatggaataagagcccaaacttagaaacatattttttgtttccttccacagctttaactaattaggcttattattcaggatgatcatcgcttaactatgcaaggtgcagattttttcccctatttttcctttacnagcatgctggggaatcgaaagagccgcaacgtctcttgagtcccatccacaaggccccatacgcgacattctttggatgagatcctcttgaactgccctgattatttgcccaatgcttctgaatccacccttccaacgcctgtggatgcctttagttgcaaacacaatataaagttccccaacctcttcaccgaccctataagggccgaacctaataactgccggtaccatcccctcttttatcgttgatgtatcttggcagccttctgtgcctttctggaaagggcccttcaaccggactcaagggtttactttggaaaactggagcggatcctgcgggcc

SEQ ID NO: 126121 - DNA, 695 bp, Arabidopsis thaliana columbia
attgggaaaggcccccaccggcgagaacaagcacacccacaccgaatttactacgcacaaacaaaccgcggggggagccaaaacacccagaccgcccccccccgaaaagagaaccgcgcgacaaccagcaagacaacacaacccgagccgccgacccacaacagcccaaccccaaggagagaggaaagagcccacacaagggcgcgccccacaaccaccgcaagaacaccgcacggacgaacgaaacaagcaacccagcaaccggcccgggcacaccccaccccccacccacacacccccaacccggaggcggcccaccaccggcccaaccgacgcccaccggacaccccccgaggaagcgcccgccaacggcacacaacagggcccacccccgcaaccaaaagggcgcccgcccgacccaccccagaggcccgacggcccgcccccgaacccgcaacccccaaaggcacaaccccagcgcaggggcaccggccccaacaggacaacggccaccaacaacccgggcaacgcgggccccacgacaaagcccgaaaccgccccaccacaaggacaacccaaagccacccaaacccaagaggccccaaaggcccacaccccccaaacccggcggggcccgccccacgaccaggacaaaccaccccccgaaggacccgcgcacgccgaacaccggccca

SEQ ID NO: 126122 - DNA, 126 bp, Arabidopsis thaliana columbia
agcggaggggattaggttggttttcacaagggggtgtgagggatgatgatcaactttgtgttttatagggggatgaggtgcggaggtttttgggtttggaagaaggtgtggagtaaggggaattgg

SEQ ID NO: 126123 - DNA, 595 bp, Arabidopsis thaliana columbia
  unsure (1)..(595): unsure at all n locations
gtacccgttttgggaatttaatggggacccacaccaccacgtctcgctactaccactacaaccgagcctcccacatagacaggaaaccacacgttttattgtttatttgagagagacccgaagacagcagcacccatacggtggctcgcggggaggcaagtcaacacacacggagggcatatgcacggacacgaagcacaatggaggcactggaacacccgacctcaaaaacggggggacgagtcgtacgtatgtccacagcactcaaagtccacccatcccggcgcaggacccggctaagcacccaaaacgtcaacatgcgggaaatacgatccaacacccaaaacgggcgagcgcagaacaaagctcgactggacagcggatggacatcagctggaaatgacgtaaaggctaaaccagggtccacacgcgacccctcagatacgggcccccggctagagcaatccaaacagtggcataaaacccacatgggctatcaaaanacccaactgaaacgaaacacggccgggacagggacagagcctgcccaacggcaccacacccgcccaagaggaggcgggcaggagaagcccta

SEQ ID NO: 126124 - DNA, 802 bp, Arabidopsis thaliana columbia
atcgcgtacgcacagctcggatcctctggagcggacggcccggacgacacttcaccaatttctaatgttttaaaaacggattacccaccataattgatatacgggcacatagcaaaccacacatatgtatagctcaaatgtatatgaaaatggggattacacggtggctgcagctctccctttgccgggtttcgctctcgcgggagctgtcaccgacggttctttcgccggtgccgtcgatttacctttgtgtttactctcatcttgggccatttgcttttgcctgcactctgagctacaaaaagccttatctcccctatacatatagatgtcgcggccaggaacaagaaggcgttcacaaagtccccaaaatctcaagaaatgaccaacgacggagaaatcgcctgaatgtctcctcaagttacctctcctagtgaccatggataagagccgttgatctaagaacccacggttttgatcaacggctgttgttacagcttgaccgttggaaccggacgggctcgcaacggttggcttctgttgatttgatggccctgactccctggggaagtttagaccgaactttattccccaatagaacctgtggttttgttgcatcgggggggggtaaatactatttttccaaagcaaacaatttgcatttaaagtgggttttgttgtggctaggaggctttaaaggcgtccttcgcaaaaatgtagggaaaccttttttgggaccagtaaacccaaaaatttctcgggatccgcccgctggggggccaatacctccgggggagaattt

SEQ ID NO: 126125 - DNA, 738 bp, Arabidopsis thaliana columbia
aattcccggttcgacccacgcgtccgctgttctcttgcggaccgcttttgaaaaacggcgacgcattgttttcatttaatcgccggaaaattagaagagaatatgggggcgccggaaactccggctaagtacgtcggaatatgtaaggattccgacgctttcaatcttatgaaatcgatgggtagggaagaaggagaaggacttggtaaagataagcaaggtatcaaaggatttgtgagaggtccgaacaaacaggatccatctggggttggtcttgatcagcctaaaccatgggcatttggagacatctcagttcgattacattctcaagaaattggaagtgcatgctgctcctaccaagactagcgggaatgatgatgattcagatgaggaagatgaatgtgaatatgatgctgtcaaattatgagcctgccaagttgacgaccggtgctaaagtcactcgtccacatggaaggggtaaacctatagagaaagggaagcttggcaattccatactcctgtaaaagatctcgaaggaatactggttaagcgaacctggagatccttctacgcagtctgtgaaactatccaattctagggatttgacaatatatctggggaccaggatgctctttttaaagacccaaacattgagaaggcttctcccactggtggggtttaaaatcggcatgtcctggggtatccctggggcctatttcgccatagaaatcaaaacct

SEQ ID NO: 126126 - DNA, 729 bp, Arabidopsis thaliana columbia
atgcacgcgccagaagctcggatcctttagagcggccgcccccgcccaccacctaattattgttaatttttatgccaaccccaaacgcaatgtttgtatcgtttgcagtcaaaataaaattccccaaactgcccctctgaactgctgttacatatcgcatagtgatgatacattaacacaacttgtactaacccccactttcctatgcaggtagcatgataaccccaaccaaaacgtgtcccacacatcctgctagatacccgaataatctctgttgcctccacaacaaccttgccacttcgctccaagttaagtttcaagtaagcaatggcatcatttcttgaaaaaaactctgaaagaaactgatggcgcacgctcatcgaacaaaaattatacctgcctcaggttcaggaacacgcctttaccagcacccccataaccatcggctcgcacatgacctctacctcgattttgggttcaaacaccccatcgtgctcccttctttcgggaagacaacattcaatttcagagtccttgtaatcatcacctggttccactctcccccatcacaaccccctgtgcatccctaccacaagcacaagtattcattccttctacacttctaaacagggtttccccaaacaacgaagggggtttttcattgaaacctccttctaggtagggctgacaaactcacaccagaaaataaggttccttacctttattagc

SEQ ID NO: 126127 - DNA, 1201 bp, Arabidopsis thaliana columbia
  unsure (1)..(1201): unsure at all n locations
gaaacagcgccccgggaaaacgaggaaggaccaaaagaaagcggcacgcacccaaacaagaaaatttttagggatttaaagacaggaggacccgagccaacgaaacaggggggaggaacagggggcgacgcaacaaacaagagggccaccaaggggaaacaccccaccgcgaacaaaaagggggggggcaacacaaccaacaaggacacgcccaaaccagagccaccaaaacaggggccccacccagagaaaaagaaacaaaagacaacgcaaggcgagcacccccagccggagagagaaacccggaaaggagacaccagaaaaaaggctgggcaacacaccaaaagacgagaaaaaaggcaccacgaaaacagaagaggagcaaaacaaaacagaacgcgatgaaacaaagaacaaacaggggcgcagaaggacgccacccgagggaaacaagcacaacacaaccgtgaccgcaagcacgaaaagcaaaagggagaagggaggcaaacccaggagagaacaacaaagacgacacaccaccaccgaaaccacaagaaaaaccaaaaaaaaaacaaacccacaanatacaaatcccccccaaaagaggggcgaacgagagggggtaaaacaaagccccaaccacacancacacacacaaacaaanccacacacacacccacgagggcgaaaagggaagaacccgaaacctcgaggagagagcaaaacgataacgacaaaagacccgggaagacaaaaaaaacggcacagacgcagaggagacgaccccacccacaaaacaagaaaccacacgccacctccanggaagaaagaggcccgacccagaggcaggcaggagaaaacagcggcaaacacaaaggggaaacgccccatcacgcaaaagaacaccgccgggcaaaaaacacgcggacaccccccaccggggaggccggccgacggaaaaccaacacaataacacagaagcgaagcagaagacaacacacgacaaaacgccgcagaaacgagaaaaagagaggggcgaacaacagagaagagtgccccacccacgggcgaaagccccgcgataagaggggcgcacacaacaccgagaaaacccaagaggggccccaccaccagaaaaaaacagggaagagggaaaaccaggaaagacacaccacaaaaacacggaacacaacagaggagg

SEQ ID NO: 126128 - DNA, 719 bp, Arabidopsis thaliana columbia
accgaattcggaattccaggctcgccccacgcgtccgtctaaagctataaagcgggctggtttggatgcatcttttgtggattattatgaaataaacgaagcattttctgtggtagctctagccaatcagaaactactgggattagatcctgaacggctcaatgcgcatggaggggctgtttcactgggacatccattgggctgtagcggtgctcgtatcttggtcacattattgggggtgttgagagcaaagaagggaaagtatggagtggcatcaatatgcaacggaggaggaggagcatcatcacttgtccttgagttcatgtcggagaagacaatcggatattcggcactctgaagctaagagctgttgttttataacgcaaagcttatgtatatggttcatgtgtgtgtcacaagactgtaactttgtccttgagagagatgcaataaaagtgtgtttgaacaattaaaaatggcacgtactccttggggcggccgcttgcgatctaaaacttgtcaaaattcaacaaggatttcctataaacccaactaaatcgccttttttcctccaaacccggtgtgccaactttcctttgttttaacaccttttttacttggggggggcccgcttcaagggacccaaattttcttcccgggggggggaggccaatgtttttttaatgggccccctaatttcatttcggggccagttttta

SEQ ID NO: 126129 - DNA, 717 bp, Arabidopsis thaliana columbia
tgccactatagacagagctatgacggcgcacgcacgcgtacgtaagcttggatcctctagagcggccgcccttttttatttttttctttttttttcctatttttttttgccagtgggggaggttgtatccaaatgagttttctcacaattggcaagttctcatttttgctgggcccaggcgaaaagggcggggggcccccccgatttgagacaactgggtatatgggtaccaacaccctttgggggggcccctttaaaaaccaaaaatggggcccgggggccccgcaaaggccccaaggcccagggggggggggaaaaaaaacaacctttttcgtcaaaggggccgaaaaccccaagggtttttgcacaaaaaacggaagggccaaggggggcacccccccccggcggggggctaggggggcccccccaccccaccccggtgggggctaccacccccccagagggggggccaaaaaacgagcccccgtagggacaaagggggggccccaaaaaaaaacccccccatggccaggggggccgggaggagaaaaacccccatggtcctggggggccacccccccccccggaaaggggcccgaaactttaaaaaaggcccccccgggggggcgcctccccccgcccccccccccttatataacctttatccccgccccgccccggggcgccccccacccgggggaaaaaaaggacgggcgg

SEQ ID NO: 126130 - DNA, 669 bp, Arabidopsis thaliana columbia
  unsure (1)..(669): unsure at all n locations
gcnnnnnnnnnnnnnnnnnnnnnnnnnnnnnnnnnnnnnnnnnnnnnnnnnnnnnnnnnnnnnnnnnnctttttttttttttttttttttttttttttttttttttttttttttgtttgtttttttctttttgttttttttcacaaaacgcttggaaacttaaaagggggggcccgcccaaaacatggtaaggcggggaacattttgttcccttttgtgaaaaactttgggacccacacaaaaccacccggggttaacttcctggtcccttttcggggggcctagtaaccctttcagggcccaaaaactggacaacttttttgaaaaaaagctcccaaaaaatgcggacatttttgagggtttttttacaaaacgacccctctttttctttgtttacggggcgccaaaaaggggcctaatagagaaaaaaaaagaggcgcgtcggggggtttttttcgggggggggggcttcatgggaaaaacctaagagtgacctgtcttggttccacgagggggggttgggcccccagttgccttggggggggggttaccttacccccaggctttggtggggggggggtaaagaatgctttttcccctggaacccattttgcactacccccggggcgggtttttaacgtttccctggcgggggggggctcccccccc

SEQ ID NO: 126131 - DNA, 1137 bp, Arabidopsis thaliana columbia
gggcccaatttgggatttacagggtccacaaccaccccggcgcggataaaaacacgcacacgaaagagccacacacccagaaaaatttttgatttttcctcccagaaaaacaaaatgaacgacagaggggggcgcgggaccgaacacaaaaacacaacctggaagcatctaactaaaacaggacagacaatcacaacacgcaggccaccagggacaccacggcaaggggccaggcaaagaacagacaagtctacgacccaccagccccacggagaacaaaaacgaccacgaacgcacaaagagatgccgtggcgcacccaaactctaggaagaagaaagaacaaacctggagaaccattaatccctgacgcagcccggaacccccctaaacgggaaagcctccaaagtgggggccacaaaccgagaaaacgcaggcagccaaactcccgtctcctcccgcgcgcaaacaaaaaggggaggacacacacccatgcgggcggcgggaagaccacacccataccgcaaggcgaaccacggaacagcgccggggcaccgcatcgggacgacccggcggaaccaacacaaagcgcccgcgaggagagacaaagaagcggccaccgacagacagggcggaccgcacgaaccatgcaagacgctcggagaccagacgtgaagcacgagacaaagacaccagcacgcccgactaaagaacggagggacacaggcgcgcgacaagaatcaccacaggccaacagcagaagcgacactacccccactgggagaacaccacctcgacataagggcaacaaaacgcgcggggcaagggaacagacaccacccccgagggaagaggaacaaaaggacggcgcaggtaatgcaaatctgcgcggaacgaaaccggcccccagagcaggcacacaccaggaggagtgcgggataccactaggtcgcgagaaagtgagacccaccacgcacgcaccactgcccaggcgaaacaccacggggcgaccgacgaggagacataggcgggcaggacaaaacaaacagacccataggccacacccttcaacaagcgctcagacaacacacccgctggagtgggcaacggacacacaacatgcggcgccctcccccaac

SEQ ID NO: 126132 - DNA, 1111 bp, Arabidopsis thaliana columbia
aggggggacaccagccccagccggaaccggagacacggcggagggcacacaagacccaccactgcccaacaccacgcgccctctttcttttttattaccaaacaaacgcaaccaacaaggcggaaccccgacggaagggggcggacactaccaccaagccggaagcagcaaaacaccgaaaacggatagcgcacgaaaaccccacaagcgtaccacgcggcagatagagcccgcgagagcaaacacccggagccgccagaacccagaacgaccggcaacaacaaaagccagaggaaccggaaacccccagaaccaacaaagcgcacggaagaaccaaacctcctgtggaccgcctgaaaggccacacagacaggggaccgaccggcgcggccaacccagggcgagccaaccccacccacagcaaacggaaaacggcggggaccgcaaccgaaggggagacccccaaccccggggaagggggcaaggacaccgaacaccgaggggagagaggccctaggcacggccggcacaacaggaaggagagggcccggacaccactcggggcaccgacacccaaggccggcccacccctcggaggggcaaggaagcaaaacgggaaaaaccccaaccgacggaaagggggcgggggcccccccaactaacaccctgcgggaacacaaagggggggaccccccggccccaaaaaagaggaggccacgggggcacaatcgccgcaccacggaccgaccggggcccgcagaaaccccagctcgcccgaagaacaaaaaaaaggcgcggctcagcagaccccaaacaacccacccaccggaaaaagaaaaacaaaagagggccacggaacggaaaaaagcccggcggatcgaacagaggccaaaggccccactcagcggcggcgaagggaaaacaacaaaaaggagacccctcacctggggcgccggcagagaaatccagagcgagggacagcaataaccgcaagagggggaacaatttcccagaaccagaaccaacgaagcagcacaagaaagggagaggccaccctgaagcacccggcacggggaagactcggacaaaaaggaagaagaagggaaaaaac

SEQ ID NO: 126133 - DNA, 943 bp, Arabidopsis thaliana columbia
agactttggcccgacacacgcccccatagctaggacacctctaagagcggccgccccccacgaacttttttcccttttctgcaaaccgctaaatcttgcacaaacctcacaaagaggggcgactctttttatcaacgcacaacaccccaccactggggccaatatgggtacaccctctgaacaaatcctgcatggggtcgcgcaataacatctcaccccggggaaggaaaatcaccacctcccaacctgaatgcttttcgccaataaccatttagcataacacattttaccagcactccccaaccataaaggagtgagacgctcctcctcgatgctaccccgatatataaaaaagaaccccacctatatataactccactactgaacataaacaagggccaccatcgagctatctcgtttgtccctcacaacacagaagctccagcactgaaaaacaccggtaacctccatcaacacccattcattatttctccgaggagattgaggccctaaacccacctctcttattgtggcatccggaaccccggccaaacaaagccaaaaggaaaacaccccttcaacattttaaccaggaacaccccgggtcccaaaagaaaaggggaaccaaccccaacacacatgggggtttgcaacaatctctccttccttaccagagagaatccggccgcccctggcaaccaaacaaaaaaaagcctttccacaccaatcccttctctgtcgccaagaaacccaggagcccacaatccccggcaaaggaacctctggcccccttctcacgtcacgcggagaatctcccgcagaaattcaacgaacacccaacatctccgactcaattgtgggggggcccacctagaaccctgtaaaacaacaccccgcaccggcccccagccggaggaagcccttatagccgaaccaaggaaac

SEQ ID NO: 126134 - DNA, 1051 bp, Arabidopsis thaliana columbia
gggccccgatgggggattaaagggtaaccaggccccgcacaaggagaacccaagaaacaaaaagcacctccaaagaccacacacttttcttttttcaaaggaacaaaaaccgaccgacacgggcaagggatgggggcgcgaatccaccagaaaaggggaaacacccaacgcggacagacacagagcacaaaaaagcgagcacgaaccacgacaaacacgcgaagaccgacggccaaccaacagacaaagaacaccggaaaccaccgaacggcaagcaaaagggagacacggcaaaaaacacgcagacgcacgaccacaaggcgaatagcagaaaaaacgccgcgcaggcagaaccaacggacacgacagaaagggaccgccaggacacgcaaccgagcggccggaagaccacgcggcgcgggggccgaaaaacaaggcacagggccacgtagagaccccccgaagggggacaggactcaagtagggcggaaagaccaaacgagggacgacggcgaagacaccatgaggcacccgtacggcccgacacacgcggggggacacgacggcaaccgcgagacgccgggcgggactaaaagcacacggggacgcacacacaggacgcgacaagagaggagaccggaacaagacgtccacgtcgcggacactgcacgccaacgcccggagggccgatgagagaaagcagaaagctccacgacacaacacagcagggaggacgagcgagcactaaggaagacccgggggagcatcgactacggacgcagcacaccaacgcagcaagcgaacagctaagacaaccaggcacgacaacaaatcgacaggcagcgacaacacgaatgacaaacgacaagcacgacggcgcgacgagaatgagaccacagaacaagaggcggcaccccgcgtgagacagagcactacgagacactggcacagaggacgaaccaggcgaggaggacgggacgcgcaacaagacggcagaggcgaccgagaagaacgacaccacagagagagcgacgccaggcgacacaacacc

SEQ ID NO: 126135 - DNA, 1193 bp, Arabidopsis thaliana columbia
ggaccaacacccccccggaacaggaacacagcacagccgcagacacagcgcgcgcaaccacgccaactttttctgatttgttaacaacacgcgcgagctcaacaaacaacggcacagggaaacgagggtgcacaaaataccggacacggcagggtaccacacgccccccatcacaaaacgaaaaaaaacgccacgtcctgaacacgcagaaacaataaaggcgcggaacgaacccgtcggggaccggcacgaaaggaggggacgacccagccgggagggacgcagcacgccccagagggggaccaccacaggcgccgcaaccaaaacagggacgcgaggaggcccacgacgccccgcaagtccacccaccaaaaaactagcacgaccaacccgggagtgggaccaaagtacacgcgaatctgtcaccagcacgcacaagaggaggaactcacagcacgcgcgagcggagacacacgagacgcccaggcagcgcacccagaacaacacataccaactcgagggtgagccacgacgacaaggcggcggcgcggaggcgaacaagaggcacagacccacacacaggctaccccaggccaactgactggcgggcggcaacgtcgcaaggacgccggacgcacgcaagaaagaactagccgagagccccgcgacggcagggggctcgacggaaactgggcaaagaacaagacaccgacagcacccagacccagccaaagacgagacccaccacggggcgcggggacacagaccaggcccagcccatacgacgggaacacgctgggagaggcgggaccacagcccgcaaccgcacgggcgaacgcgacgagtcatggcgccggcggcccgtatccacagaaacggcacaggtgccacggcaccaccgccccacccggctcgagcatccactgcgaaacccgcgtcgacaaaaacctcgcacgcggacgcgccccagagactacgccggagccctgacggggaggacacacacacctgaggcgcgcgtgacaaaacacatagcacggccccgcgcggaaaacacaccaaggaccggccgccagcccggccaaacgcagaagagcaggcaccacagacggagccgagcgccgggccgcagaaaacgcggaccgacgcaaaaaacgccggaacgccccgctgggagaaacaacacaacaacg

SEQ ID NO: 126136 - DNA, 673 bp, Arabidopsis thaliana columbia
cggggggagggggggggggacaaacacaaacaccgacgccaagcaccaccacccacacacaagaccgagaagcgagcggcccaggcgaacaagaaccccgaacacaacgcagaaacaacaagcgaacaagaccaccacgcaggcgcagcaaaacacacccggcaacgcggccacacacaacgcaaaacaacacgagaagacccacgcaaagagcgcaggaaccgagccaaccaagcacaacgggcggaaggacaccaaccgcgaacagccaccgacccacacaccacaaacagaagcccacacaccggcacccacagaacagggtaacacacaacgccacaaacgcccgccggcacgcaaggcaacgcccacacaaaggagggcacacaaccgtcccacggagagacacgaacaccacgcaaacccaccaccacgaaatagcagcaaaccacccaccacgaccacgcagctcggaacgactgcaacgacaacgacgcacacggccgagggacaacgcgcaacacagagacgccgacacacaacaacgcggcgaccacacacgcaaccaacaccagacccccgacccaccaacacggcgacgcccggcaccgaacaaccaccgaggcagagacgcccggaaccccaagcaggcccgacaacgacgacccagacg

SEQ ID NO: 126137 - DNA, 739 bp, Arabidopsis thaliana columbia
tctgccgtacccgtctcgaattcccgggtcgacccacgcgtccgcctaaagctataaagcgggctggtttggatgcatctcttttggattattatgaaataaacgaagcattttctgtggtagctctagccaatcagaaactactgggattagatcctgaacggctcaatgcgcatggaggggctgtttcactgggacatccattgggctgtagcggtgctcgtatcttggtcacattattgggggtgttgagagcaaagaagggaaagtatggagtggcatcaatatgcaacggaggaggaggagcatcagcacttgtccttgagttcatgtcggagaagacaatcggatattcggcactctgaagctaagagctgttgttttataacgcaaagcttatgtatatggttcatgtgtgtggcacaagactgtaactttgtacttgagagagatgcaataaaagtgtgtttgaaaaaaaaaaccctgaaacccaaaacgggggcggccgctcgcgatctagaacttagtccatccaacataatctctcgatggtaattcacatacgcatcaatagtctttgacaccctggcttttaaatcactccatcctgttttcgtacttccgggggggggccgttaaagggatcaagtttctttccggggctgtggaagaaaaaagttttttttgggggccactaaaagtacattaccgggcccgcggttaacacccgtcgggaagg

SEQ ID NO: 126138 - DNA, 804 bp, Arabidopsis thaliana columbia
  unsure (1)..(804): unsure at all n locations
nnnnnnnnnnnnnnnnnnnnnnnnnnnnnnnnnnnnnnnnnnnnnnnnnnnnnnnnnnnnnnnnnnnctttnttttttttttttttttttttggtatttattgatttctatattgtttaagtggatttttttttttttttttttattgctttttttttatgttttttaggacaaagtaaaaaaggggggggggcccccctataattttatttttttatattttgaaaaaaaacactttaatgggggttttttaaaaaaaaaaaaaaaaggttgggggccccccacgaaacccttaacaaagggttgggggaaaaaaaaaaaaagtttttagttaaaaggggcaaaaatcctaaggttttttccgaaaaaaaaacaaggaagagggggggggccccccccccccgggggcaaaagggggccccccaaagaatagcctttgggggggaaaaccccccccaaaaggggacaaaaaaaccacccccccatccccccaaggggggcccaaagaaaaaaccccccccttgccctagggggccgtggggaaataaaccccgttatttttgtgggggaaaggccccccaaagaaaaggccggtttgttggaaaaaaaccccccggggagaggccccaccccccccccttaaaataattaaggaggcccctgggggcctccccccgaaaaaaaccgggcggggcccccgggggggggaacccaaactttttctccttataggggaggggcgggaaaaaaaagaccgggggggagagaaaaaaaaggggcaaaaaaggtggtttcctcccgggg

SEQ ID NO: 126139 - DNA, 146 bp, Arabidopsis thaliana columbia
cgtaccggtttggaattaacgggtcccacccacgcgtccggttgaagaagaagagaaacatcaagaaagtcgcgatggttttattcttatgctaataacttcgaacgatgagggtttacatcgccgcgggattaatgaccattcat

SEQ ID NO: 126140 - DNA, 911 bp, Arabidopsis thaliana columbia
ctatagacacagctatgacgtcgcatgcacgcgtacgtaagcttggatcctctagagcggccgccccccacataattttttttttttttcccccacccccaaatcaaacatttgacaagtggcgataaaaatagtcccatctccctagaaacaatcactcgcagtaccaatcctcgaacaggcaaacatgaagccatttaaaatcaaatttccaatactagcaaaccgccctctctaaaaataaaaagcacaaattttacagtgctatatcttgtttggtaaaaacactttgggcgcggggccctcaagctttaatatgccaatacaattaaactactctttgccaactccctcactactgcgaaagacattttgcgcacctccgcgcttattctctgtgggattcactaacatatctcccctgactagtgaaatcccccatgaatattccctaaaagcggcccgccccctcccggggggctgaactttcccctttatcatttgccaaattatttcttccaaacctttacacttttcaaaccacctttgtatcccccgaaaatactcgccgctcactctcccaaacaaaccccgcacagccctaccccccatttggggccacacaaccccggaccccattcgctaaaacaataaccccggaaaagtggccttcctccgtgggcttcaaccaggtttccccaaaaaattctcgaaggccccctacacccttccggaaatttcaagccacccatgaagcatcccccccccctccctcttttctccagccccacaggggccgatccaccccatccggcaaagagaaaaaaaccccctatcactcccccacctagaggtccccgccggagtggaaaaaacatacaaaaaaccccacataaatattttctctgctt

SEQ ID NO: 126141 - DNA, 715 bp, Arabidopsis thaliana columbia
actatagcatactatgacgtcgcatgcacgcgtacgtaagcttggatcctctagagcggccgcccttttttttttttttttttttttttttttttttttttttttttttttttttttttttttttttttttttttttcccgggccaccttttaaaaaacccattattccaggtccacctttttgtcccaaaaaaaaaccccccccaaaccaaaaacccccttaaacttttttttccttttaaaaaggcttaacccggattttttctttgaaacccggttccaaatccccccaaaaaatttttttttggcttaaaaaaaacggaaagcccttcccttggctaaacctttaaacccaacccttttaaaagggattattggaaaaccttttttccaaaaaagaattcacctttttaccggccgaaaaatcttcccagggggttacttcttcattaaggggaccaccctggggggggaaaattttttttggaccgaacggtcgggaattccccccctagtcccccccattggccctggcccgttccccaaaactaatttgaagtaggggcccctttcacaaagggattttcttttttatcagggggtaacccccacccctaaaacttcacaaatggttacttgggaaacccccttttttcccgataaaaaggggggaaagggggaaaattttattcccccttcccccaccctgtttttt

SEQ ID NO: 126142 - DNA, 534 bp, Arabidopsis thaliana columbia
ggtccacccccccccgtacggaaatctcttatagacaccacagaaaacacctgtggcccaaagtttcattttttcgtgtaaggtcagtaagaaacaaaccctttactgggggggggaggacaatacttgggaggataaccaaagggctatcccaatgggcaggaagacaccgcgcgaagccacagaggtacaatgaaagattggtttacataacacaaacacttctaccagacactcttcctctgagaccaacttcgcgcggggaagaaaaacctccacacaaatcaactaggcggcaacattgttaggcaaaatcgggcctcgttcgaaagcgaacccaaccatctatactacccactcggcagacggccaaaaacaattttcattcttgaacatcatacaaaacccacgcgggacaataagacatgcaatgataggaggccgacccataactgactatgaaagtgaacacactcatgaacaaaaccgccggcattagatcgatataacgggacgccctccaaaaaacccccc

SEQ ID NO: 126143 - DNA, 802 bp, Arabidopsis thaliana columbia
ggaataaagggtccacccagcgtacggtggaggaagaagagagaccgcggaaggaaggatggctttaattaagcagaaaagaagcaggaaaatggggggagaacaaagggagtaagcaccggtgagcggaagagaacggggggaagacaaaggagacgtcgcacagcgcagacaataaaaagaaagacaaccagggaagggagaggaaccagaaaaggggggcaaacaggaaagaccacaaccgacgaccaacggccagaagaacgcgtacagggacaaggaagtaagagcaaaagcaaacacaaaaccgccaaacaacacgaacaaagcaacgaggaaacgaaaaaaaacaaagaccggacaacgagaaggcaacacgggaaaacccattaaaagaggaaagtagcagaagaaaaccacactacacccacacgcagggcgaaaacgcaaacggcggacccacaaagcaaggagacagacgaaacacggcggaccaaggcatcgccggaacgcgaaagaccgaaaatagcacaaagcaacgaaccggtgcaacaagcaacgaccacaaacacaactaagaggacagcacaaaataagagaagaggaccaccaaaagcaaccacgggaatacccccaacgagaggcgcgcattggaaaaagcaacccgcacacaaaccccaccaagcggacacgagacgggccgaggacaatgggacagagcccggcccgaaaccctcactcccgcagaccacacacccagccaggagcgctccaaaacaaaaacaaaaacaatccaggagag

SEQ ID NO: 126144 - DNA, 257 bp, Arabidopsis thaliana columbia
aatagactagctatgacgtcgcatgcacgcgcacgtaagcttggatcctctagagcggccgcccccgacaactatatttactttttttacaacaccccacccaacccacaataggaatagtgggtgaccaatatttcttattaccccccacaccaaccctacctagcacaaaaaagtcctgtgaggacagcaaacctctgaattcattaataaacatagacacgagacgggggtgacgccgaccaacacacagaata

SEQ ID NO: 126145 - DNA, 1001 bp, Arabidopsis thaliana columbia
aaacagacaccaacagggaacaaagggcgcaaagggggggggcggtccctaaacaagggggaacaaaggaccacccgcaccacacaggacaaaggaaaaaacagcaccagcaaaaaaccaaacgcaaaggggccaaaaaaaaaaaaacaagcccccggggaaaacacgggggggcccggcaagccacagaaaaacagcgagcacgacagcgaacttcagaaaagggagggcagacgcccaaaaacccccctaggaaactgccaacaacagaaaaggggcgcgctcaccggagagaacccccagccagagccatagagaaacaagtcccaaaaggaaaacagacgccgcgcaaagcacaacaccaggcaacactgaggaagagaccaccggagaccaccaccccacaaaaacacaaaaggggggaaagacgctgatccaaaaaagtaacggcgagcccagcgagaacaccgacgcgaacaatgacaataaataaggacaccaggagaggagggacatatcaccggggggcaccaaacccggggagaaaccaaaagaagcaccggcgggcagcttagaccccccaaagaaaaccacaacagccaaagggagaacagacacacacggtgggcgcaagcaacaaagggggaaatcaaagacacgggggacggagaatcccaatgcaggaaaggacaacgccaaaaacggagccgaagggaggggggaagcacaaaggaagaacaaccaaacaacgctacgcagcgactaacccagaagggggggggggggcaaccaacacagtacaggaagaaacgatcgaatcagcaaactacaccacccagggaacatgactgagaagagcagaacaacagaagagaacccaccgcgcacgggcacaaagaccggcggcgagaaaccaggcaaacaacggacagcgcaggggggagaactgccagcaggctcggcgagaaaagcgaggggccccaacccaaagagcgcggcac

SEQ ID NO: 126146 - DNA, 792 bp, Arabidopsis thaliana columbia
tgaggaaggaatttgggcctgaacacgcgggcccggtagaggacggggaagccatattgaaggcgggcacggccccgccagaggaaagttttttacaactttttcgcacgaaaacgacagagcaatatcaccaataggaagcgggggggtaaaagagcaaccctgacagggaacccgtggcgaaaaaacaaaagacatgggtacaaacggcagcccgaacgggaaaaacaaaggtataccgaaacaagaggaggcgaaggaaagagcggacccacgagagccgccgggaccaaagaggcgccgggacccagtcgaataaaaaaccccaaacggacaagcaggcacgacaaggaagcgaacattgacagacgaaacgggagcggaagcacacggacaagaaccagcgcggggcaacgaaaatggacacacgaaggcaaccgcgcagaaaaggaagccaaaagccctaaggccaaataccgaagtaaaaaaaagtccaggggaagggaaagaaaaagagcactaaagacgtcatgtactaccccaaaagggagggggctacagagcgaaacggagaggctaaacctccggagcaaagaaaagaataactgggggaaaggccaccacgattaccgcaggactaggagcgtgggcccccattcgagggggggggaaccgggaggcaaacagaacccaccgcccaagggaaccattaaaaagacaggggtgtacatggacgcgccgtgacccatcgcggtggcgaacacgaaagaactaccggagaagggaggaacg

SEQ ID NO: 126147 - DNA, 1251 bp, Arabidopsis thaliana columbia
  unsure (1)..(1251): unsure at all n locations
gtaacccgattttggaagtaaaggggaaccacagacccccgggacgcgaagaaaaaacagaaaggggagaaactcacaaagacccacacaccttttcttctttttggaccaaccaacccacaggagcagaagacccacacacggggggcgggggggaacccaaacagcgaaaaaaaaaagccaccaccaacaccacataccacccggacaaccacagcaggagagcaaaaaaaccgcacaacgaaccaacgcagccagaagagcgaacagagaggggacagagacccaagacagacacagagaaagaccagacaacacaccaaaaacacagagaaggaaaacacacacatcaaccgacagcngaagaaaagcacaccccaccaagaacacacgcaacctgaaaacatatcaaaaatcgggacaaaacagagcagaggcgaaacttaaccaccctacaaacaagcaaagacaacgaacgcgcaacaagcaccccaaccggacagaaaaaacaacaagaacagagcgagcacaaccaagagccctcgagcgccccccaccagctgcagaaccaacagggaaacaacaacactacacccggaggaaacaccacaaccccaaggacgacccacgtcaacaacaggccaacacacatagaacgagacaacacgcacgaccacaaaatcaatcaaccacggaccgagaccacacagacacaatacgaacccccgccaaacgaatgcaacggacacaggcacaacgacatgccaacgataaagcggcaaatggaaaagggaaagccacccaccaggcgacccgaccaataaaccaaataagacagaaccccaacaccgcggacaaagaccgaccaagaacagaccacactcccaaaaaggcacacagagacgcagaaaccagcaaagtgcaccccggggcacaacaaacaggcgccaccagcaaaaacaatacaaccgagccaacgcgcatcaacacagccccgcacatagcagagaaacaaacgacgcaaaatcaataagaaacactacacaccacgagacccaccaacacatcacgggcagtgaggaaacaaatagacaacaagctccacaagacccacaacaacgggcctgctccaacaaaaccgaaaagaaaccctagaacgggcgaaaagatactaaccagaccaagacacacacatctgaaagcgcgaacgccaaacccagactagagcacaacgaacccaaaccaacaaac

SEQ ID NO: 126148 - DNA, 919 bp, Arabidopsis thaliana columbia
aattaaaacaataacccttagcatggttttctactacaccttgatgagaaaaaaataagagacctttaaaattctatcatatggacgatagccaaaagaatggggtgttcggaattgttcaaacatgtgaaatattcccagaaaaggattatatgcatcaatgaagcttggggggcttggatggaaatgataactgatagcactgggaattgacaggagtggttgggtgaaataccgatggaatccttaagtgagaggccgctccgcgggacctctctattttgtgattttttacaaactattcattcaataatcttgggagccaggagggtcgggaggcaagtcccgatacaaaatggtaaaggttgttccacacatatgggtccaaaatagtcagcgaacaattgtgaaagtatttatctaggaaagttgggtattcccggtgagttagactgggggacaccccaaaaatatgcgaggggcctctccaaaaaaagctgagagatagcgataataacacaaaaagggaagaattactaccactttgtcgttaggggcgggaagaaaaatagggagggtgattcgaaaaagactgttcgcttagaaggcccaaaaatttgtgcgacaaacttttgagttgaaggggtcaagggggggggggggaagaaaataaaaaaatggtttcataaactttcttattttctttggcgagaaggaggggggaaaacaaacatttatgggaggacttaaaatttttattccaacaatagttacgggaaaggaagagaaattgtccatgatgggcactgtcgggggggacccggagaaagaaaacgggttgacttttaaacacagggaaatgggacaccaccatggggggtatgaagccgcggaagggaacataacaacggtgtaaagg

SEQ ID NO: 126149 - DNA, 769 bp, Arabidopsis thaliana columbia
  unsure (1)..(769): unsure at all n locations
cactctttacnactatgacgtcgcatgcacgcgtacgtaagcttggatcctctagagcggccgccctttttttttttttttatgttatacagataagttagtattattttatgaaaatttgagtgaataatacgaattgaacaaacacaaactcgacaagtacactctcatacatctaacaagttcataatcacacaatacgaataattctttgtcacacctgattctatatgcacccattgactataacaaaccgattctaatataccttttagtttctccatatgcattggatctttaacaaggtccatgaataatccgacggctaagaaacacaatcacataagatgctggtgatgatgatcgttagatgaagaaccggggagaccttgaccggtccaatattgattggattgattccctggagatgtcaacccggaaaccgggcggcttatattacccaaatggttgtcctccattttcacctgagcagtttgagaaaccctagtagcaccaatagaagataatcccatatttacctcgttagggaaattatataatcccatggttcgatcgaacaaagcaaagtggctggatgatccaagagaagtcattaggttattctcgttgttggtacccatgaccggacctgaagtgttaccaccatgaaaaaaccctaagtcattcaagaaacttgagctagtgttaccatttccaccattatttccattaatggcggctaagtttaaaccaataccacccaattgag

SEQ ID NO: 126150 - DNA, 401 bp, Arabidopsis thaliana columbia
atctctgccatttttcacccgtgtaaaaagcgttgttttttaaaagtcgatggggttaccaaattcgcattgattctatagagatttcagaacgatgattcggcagtattatgaggataagcaacgataggttgagactgcgaagatcatgccttaaagattcgtgaaagaagcgcaaagaccgaccctaactaccaacaccggggctaaccgatatgcaccccacaacacaaaacgatcgtagttccgaagtcccatagtttacacaacgttttcgcaaatggatcaacttaactctttctaattattatctgtccccaggatttcgaaggttaccaggtccttctccttcttcttgtaaaaggagggaagacggaggctccttggttattgagctttac

SEQ ID NO: 126151 - DNA, 366 bp, Arabidopsis thaliana columbia
aacgggacacacccaccccgggcgactggaaagagacccctgaaccaaaaggcaacggggcgcaacgtttttatatttacacaccccccagggacacaagaccggaaggcaccgcggcacggggggcaaactctacactcacccgcatgcgggggcaccacccccacccaggaaccaaaaacgctcacacggccacacgcacccccacaccggggagcagcaaacgaactgacaacagacgccggggaacacacccccaaggacgtggacacacacaccagagaacgcgcgggcaccccccaccaaacagacaagaaagggaaacggaactcgtaatggaagcctacctcgaaaacacacgggcgg

SEQ ID NO: 126152 - DNA, 737 bp, Arabidopsis thaliana columbia
ctatgacgtgcgcacgcacgcgcaccgtaagcttgggatcctctagagcggcgcgccccacggaagatttctttctttttttccaaacccacccccacacgcggggagataagaggggatacaacaaaataggtctggccacaccgaattttcgaaatatccgggctgacccgattgaattggatctgggttccaaaaggtcacaagacaaccaggaaaaacaaaaactcattcatacgccccattttcaagtacccttgaaaaagggaacaaatccggggggaaatgttttgattgactccccaccagcaacaggattagctctttcttcgggaaaataagcgaccggatcaaatagatgcgggtctggaattttcagcaccccttccagcatgggggggaggccagaagctgcatatgtaacaagatacccgcctttttgcaccaaaagcaaccttccaggggtgggctcctctgcaacccccctaattatctgcccaaaccttctggaaccattcattgccaggctttgactcccgagggggacaaaaagcgccggaagacttgaccaacaaccagggaaccaaccattattggggggccaacaccccttcttaactggcagggaaacccaacgcaggcttaaatttcaatggcggaataattcccaataaagtccccccgggcgcccaacccccggggcccccaattatccggggaaaagaggggcggaccat

SEQ ID NO: 126153 - DNA, 623 bp, Arabidopsis thaliana columbia
cggggagaggaacgaaaggagacctagcaaccacaaacaaaaccacgagacaactttttcactttataacaaaacagaacaaagggacgcccaccccaacaaagcggggagggaggggaacaacaccagaaaacgacagccccaaccagaccaacacagccgacgggacacaacgaccaaacaacacgcccgcacagcaacagggcagacacaccagcacaacgaaacaacaggcaaacagacgacgcaaaaccacagcacgccagcggacacacacagacacaaacaccaaaaacgacgagccaaaaggcacacaatgggcgcgagcgaaccgaaaaacgccggcgccccaaacaataaccagaagccacaccaaaaacagccaccacgcacgccgacacaacagacagagcagacgcaacacaagaccaccaacgccggacgataacagacacaaccagccagaccgaaaagaaaccgccgcgcgcgcagagaaacaaaagacccgacaacgcaaacacaaaacctaacacggcacgcgacacacaagaccacacaccgagagacgccaccagaaaagacagccgccaagcaccagacacaaccggaacccacacaaaaga

SEQ ID NO: 126154 - DNA, 743 bp, Arabidopsis thaliana columbia
acactatatagaggttgatgcacgcgtacgtaagcttggatcctctagagcggccgcccttcgtttttttttttagtttttcgattttaataggcacaccggacacaaaacatgctatcaaacgtaccggatcaaatgaaatgtccaatcaggaccctccgttattggagtacacacacatatatacaaacactcgtgataagtcgttaccgaacaatgaacacgcaaaggcaactcccacaaaaacaagatcaccaacccgatcattgttttgagctatgccaccagacatgaccagtcctttcttaccataaatggtacctggcgtggacgcataccaacctctgaaactaggagtctcttcctcatgacctaacttatgcagtctggcccccttgaacgtacttgtgtacgcacgcgaaagatcacaacttgattgacccggaccttcgtgagcatttgagtgcatcgctatgttaccttccgagaccaaaaagagtatccgaacaaccgttcttgcaaacacactccttgcggaagggttatagccgaacgtgtacaattggggacgccaggccttgagcttggatcgccaccaatgaaacattctatttcgttcacaattgcgtggaaacccagaaacagaaaacccatccctgttacctttggaaccaaatttttaagacccggggttaccaatctttttaacggcctacccttaagacccttcaccgggaggttct

SEQ ID NO: 126155 - DNA, 726 bp, Arabidopsis thaliana columbia
ctatgacgtcgcatgcacgcgtacgtaagcttggatcctctagagcggccgcccttccttttttttttttgttttactacttttatatcctctcgtccaacaaaattgggtctaattggtggtttgtccaaggaaattgtctacctttccgagctgtcaaaggaatttacgaagctgattctgtatcaacgccaattttctttacaaaaataaaaacccaaaaacatctgtccacatgaacacaagtgagaacctacaactgctttttcaaaatgcttattgcattctccacttataccttatttaaaccatcactctgcaatacaactttgctccttgcatgaaccaatctttccgttcctaaactctcctctatagctcttgcccctcttttttttctactgaattgcttctacagaatcataacctggcaatggggcacccctggtagaaaaatcatggccccccactggtggcattttatctttcctcaatgcttcccgtgaaataattaagagcaatgggggtctattacctggccctcgctatgttccatgaaaacaacggtcagagaaaaggccatagtttctttcaccttttggaattcaccccttttgatgagccttcttggtttatcagagggtcacctccttctctcggcctgtggtcgacccccttgtaaggtgcttatttaacatcccactcgcgccctctttatatattttt

SEQ ID NO: 126156 - DNA, 725 bp, Arabidopsis thaliana columbia
actatagacgagttatgacgtcgcatgcacgcgtacgtaagcttggatcctctagagcggccgcccctcactttcttctctgtttaaaaagaaacgccccgcgcaagcacctatgactatccaaacaccccttccacggactccgactacgtgccatacccataaggacaagcatcttgtaggttcactttttcacgattatgttaaaaatctatacatgatacggtggggcacaggagaattgattaccagaaagaacttaacaatctcagccattgatgggcggttcataagtatctgaacactccctacctaatccagtcaagggacgggcaaaagcccatcaccagagtactgcccccaaaatcacctgcatcagaagagctccaacgcattccccttggagtaacatcaacgcctacatggtaacctaagtaccgctaacgtgcctttaccatactccagcggaatcccaccaagacccagttctagaccaaggaccaccacccagtccacaccgttgtcactcgtctgccatgaaagatcttacactctagaataggcgctacgtagacaaaagcgtcctgaaacctgcttgtggtcaatgaggtgccacttaagaggagcaaaagacaccgaaattgcccggtgcctcacaaaattttcggggttgggtggtctccaaattccaaggcaggggaccgtgggggttcggaccccccggg

SEQ ID NO: 126157 - DNA, 677 bp, Arabidopsis thaliana columbia
gacatatacgattatgatgtagcatgcacgcgtacgtaagcttggatcctctagagcggccgccctaatctattttctcttttttaaacaaaaaagaagccgacaccgcactgggctaggttacaaacttacaacaatacagatgacttaaaaaacaaacaaaaggaacaatgtttgagcatccttgggatcagtttcaacatttctttcatacaccggatttcaaaaacaataaccaaactgcactgtaaatagtgacaacccccatggccaccgtctcggcttctacaagaggagattgaatgtatgcaaagaagggagtcggatccaaagggggggaggtttgtcacccagccaaacacatggttcacgctgcggctcctaatcgctagggcgaagaaaaacccacgtttcccataacacaaaactgaacccactatctgaaacaatcccgaagagggcattaccaccccaaattacattctaaaatgtctgcacgagacattatgctggacgaagaaacctgtgattagcaaaacgtttcaaatcaccaaggaggggacaaaataaattcttcgggtccggagtattatagaaaccacacctcctaactggctagatacattgggaacaaaagaatttcctcattacaattatacaagagaccacagaattat

SEQ ID NO: 126158 - DNA, 1053 bp, Arabidopsis thaliana columbia
tgacttcgcatgcacgcgtacgtaagcttggatcctctagagccggccgccctaaattttctttttttttttttcaaaacttactgggaccccgttcacggagcgggcattcaatcctacaggatcatattgctttacgattcacgaccctcccttattgcattacacacacatatgcacaaacactcattatcagcgttaccggactgcggttatgcccaggcaacttcatatgagaagacctccccttgctccaatatatggtttgagctttcccaccatacatcaccagtcctttcttaccatcaatggtacctgtcgtggtcgcataccaacctttgatactcagagtcccttgttttgtatctaactttttcagcttcttcccacctacaacgtgttttgtttttcaaccgcaaaaggtttcccacgcagtttaaatttgttcccccccacccctttctttttagcttctttccggggggtgtcaatctcccctattaatacaacccctcccgactaggaacacttataacacggtaggtggtggttctcaagacccaatcaacatttatcttggtggccgcacaactaaacaaccttcctctttaagtcgtgacatataggggccattttctatcagacccgcggatacacgttatttcccccaccctatagtgtgtttgtcacaacctatcgacccttttatgaaccctcggggaattcgacacaccgccatatccggagaaccatttccatctcttatcgttttccacccattccacggctgtagggaaatctcccgtttgccaagcattacgacgcaaatacctcttttcggctcttttggaaacaccacattttctaaagaccccgggggactgtactatgccttcttttaccgggctttcgaccagaagacccttatcccgggggtgtcggaacacaccttgtgtcaccccaaccttttgtgggaaaccaaccgcattgttttaataaaacgctttttaattggttataaaaaaccctcataccgttgttaattaacccctt

SEQ ID NO: 126159 - DNA, 903 bp, Arabidopsis thaliana columbia
  unsure (1)..(903): unsure at all n locations
nnnnnnnnnnnnnnnnnnnnnnnnnnnnnnnnnnnnnnnnnnnnnnnnnnnnnnnnnnnnnnnnnncttcttttttttttttattttatcaaaatcgagtggcccaccgtgcaggaaatatgcaaacaaacatacgtgatcatttagacatacgagatttagacccttccttaaaggttacaaactccatttttcaaaacaattatatgactgtggctcaaactgcacaaatgaatatcgaaatgatgggaacatgattttacccaacctgacattggcttgagcttttccaaaaaacatcagcggtggtttctaaccctcaatggcacccggggtggacacagatcaacctccgattcttggattttagggattgttacctaccctatccgttttgtcacacttggaacgattttattaccaacccctttatttacacagtgtttttgaatccggacccctccggagtccttggggggacccccttatgggcttttaggattgaaaggtggtttacgccgttttttggtttgtaccactgttgttctctggagaaaagtgttttaggccccgcacaggggctccccatttggtgttccctgacttgagtttaaacccactgtgaatgcctttggttttggagaggatttccttttttcgggacaagggaacccggaaaaattgtgggccttttttggaagaacacccccccccatttgggagttttccccccggaaagaaatatgggttttaacccctctctatgtggggtttgggagggttgaaaaaaaaaaactggttttttttttttttggggggtgcccctttttgcgggattaaatggaggtgttttggggttgaatttaaaacccccttgcgggggttaataaaattatagcccgg

SEQ ID NO: 126160 - DNA, 382 bp, Arabidopsis thaliana columbia
ttatgacgtcgcatgcacgcgtgcgtaagcttggatcctatagagcggccgacccatacgtactatttttttttttcgaaagacataggcacaccggacaggaaattatggctaaccatcatgccacataatataactttcatccattcaccacatttatcttgaagcttgtacgcgtcacataatttccaaagcttagtatgataagccggatacacgagacatattgtataaatgcccagagggcatacctttcttttaataaagaaattaaagatgtcaccctatggtccggtgaacaccaagtgcagtctgaaggcctttatatagaatctcctattatcaatttggaacacagggatcctcctatttcctctttaat

SEQ ID NO: 126161 - DNA, 615 bp, Arabidopsis thaliana columbia
ttatgacgtcgcatgcacgcgtacgtaagcttggatcctctagagcggtcgcccttctcttttttttttttttttaaaagagcaaatgcgaacactgacaatgactatgcttccaagttttaaagctcaagttgacctacttaaggacgacaaattcccttgttaaatcactatcccaggaatacaaatgcctctgatctccaaaacactgctttgattatccaaaggcatcttgtactgatattatattcagaacctcatcgcattgatacttggatccctgtgatgatcaccattagattctttccaattatgttgcatgatcatgatttttggcccccccactgatcttctggtattactctgtggtttacgcacccttggaaaacaatgaacccttgctagaatgtgaatctccagcctagagaaaccttcccttagggtgtcccttacattcatttgttatttgcttgccctttgcatagttatcccccttctaaacaattaatccaatgcgtatttaatagtcctttgggggcacaattcttacttggaagggctcctgggttcactcaaaaacttgcttttttttataataacccctttgctcctcaa

SEQ ID NO: 126162 - DNA, 1016 bp, Arabidopsis thaliana columbia
gtcgcatgcacgcgtacggaagcttggatcctctagagcggccgccctttacttttttttttattttttcgaaaggtattgggccaccgtacacggaacgtgtttacgacgttcaggatcatattgttttacgattcacgaccttcccttattgcattacacacacatgtttcaaacactcatgatcaccgctacctaacagtggtcattgcaaagtccaccttcatctctagacgagagtgacccatcccgcttcatttggttatgttgctttttccacacaaaactatcaacgcagtgtcttttctgtagccatacaaataggtaacccttgtatgttggagcgacattacccaatcctgcttgagtacctcagggagttttcctttggctcgtgtcacacttaaccttagtcctagacattgcttctcctacctgtacaaacagatgttgctgggggtttcaaaccgcgaaatggattttcccccagcttcaatgtgaaccccggtaccctctggatgagcctcttggggggtcccacttggtgaggtaacctttcaatagaccaaaaatggtgtggtcccaaaaataccggacacagcgggaacagcacttcctaggcctgagggggtttctttaaaccgaaacagtgtttcccgccattgggggaccccaatattttggctattttgtgaagagctcgtggggatctccgcttcaggccctatattggtgagaaccaatatgtgaggcgtgtttatacctctctatacgtaatacgccatcatcggaaagaggggataacaccccaagcccccattaatcatttgtccccttatgaaacccaaaaattttgagagcacgagaacttacctcccctctataccccttagaggaaaaaaaacctgggggggtttttgtccctgtaactccccttttttttaggggaacccccttggttttttatttttaacacgcccaaacccccaggtctagtgtttagccaaatattttcc

SEQ ID NO: 126163 - DNA, 607 bp, Arabidopsis thaliana columbia
cgacgtagcatgcacgcgtacgtaagcttggatcctctagagcggccgcccttcgctttcttttatattttttcgtttttaaaggggaccccgggcactaaacatgcaaacgagcatacgagctcatgtagacctactattgacgaccctcccttgttgcatgacactcacatgtatacaaacactaatcatcaccgaaaccgaagagcgtttatgcagaggcaactccatcatggaagagatcccctacccgatcattggtttgaggtatcccaccaaacatcaccagaccgttcttaccatcaatggtccctgccgcggacgcgtgaccaacctcctgttccacgggtagatctgctttcacctaagttaagcagctctgaccacttgaacgtgtgggaggtcaaggcaaaagattaaccacccacagtgacccgaaccctcctgtgctttttggttgcagttcccattggtacctcccattggaccaaaaaggggtttgggggattcaacccggagctagtggggatacgacatccctaattgccaagggccctatgggacctctagaacacgaataacgagttctgtaggaataaaatttttg

SEQ ID NO: 126164 - DNA, 298 bp, Arabidopsis thaliana columbia
ttatgacttcgcatgcacgcgtacgtaagcttggatcctctagagcggccgcccttatatttagtttttttttttttaccaggaaatccggaccctggatttgtacaaatttcacgatgtttgcaagtaaagccaacctattaaggatgaaaatgagtttattaatgactattccgaggaaaacgattcgtacggtgctgtaataacttgatttgaacagcttagtgctttgtggacccgcctttatacagtacttaccttgaactatttctatggatacctttgttattgatctaac

SEQ ID NO: 126165 - DNA, 818 bp, Arabidopsis thaliana columbia
  unsure (1)..(818): unsure at all n locations
cactcatctatagcgagctgttacaattagaagctcgnatgaaacagcatctattgccgctgagacatacctgatagtgaatatcgtgctgtcttgcaataaccactcgtgtgtaagacacaacaacaatgcagtttttgtgccgtcgaacattatataccgaaagcatctcgaacaaatcgcgaatactttgtagggccaatattatataattgtttttaggaccgcatatatttactttttacgcaggaacagagatacccgatacaagggttatctcttcttccgggggaccccccccattcatcatttatgggttgagccaatcataacctgggaagtttgcgcccttgcttagaaaaaccatggtatttcatggccgccaaccttggtttagaaaaaaggcggtgagatggtatggaaagcaaattgcccccacctgtcgggggtggagtccacacaaattttaatttgcttcgaggccaagggtccaccctcttttggggtgtcgcccgtttttacacattaataaataccccccttgcggaaatttgggggggggcacacccttggtngggtggtgtgggattatcgccccccattaaatttattcccccccttttttgcaaatacacgtgggtgttccacacaaaaaaaaggggggagattctttttggccccccaaaaaaaaattgttttgggttttctccgccaaccaaaaaggatttcgaaaaaaggggtccaaccccttcctggggggggctccggggaaaaaaccctggtgatttcggggccccggttttttccagggctatacc

SEQ ID NO: 126166 - DNA, 619 bp, Arabidopsis thaliana columbia
cctatagaagagcatgacgtcgcatgcacgcgtacgtaagcttggatcctctagagcggccgcccttttttttttttttttgttttacatgtttaacacacaaaaccttttcagatttgatttaacagggcgcacaccccaaggaaaggtgcgtacattgcaaaccgccttgttaccataccaatccaattgtgatttctcagaaaccctcttcgcgaacattacagaacgcaaaagtaccatttagatgaccaccatgcacaaccctcatcgttttatataaaaagccaataaattttgtgcttacacatttcatatgttgttagtaccgcatatatttacttttgacgtaggaacagagatatccgatacaaggacgtaatcttcctccgggggccccctccatttattcatttatggttttagccaatcatatcctgggaatttcgcgcccttgcttgaaaaatcatggaattccgtgccctccaacctgggtttgaaaaaaggctgtgaaaaggtatggcacgcaattgcccatctgtcgggatgggaccacgcaatttagtgcacgaggcatgtcaccctctagggtgcgccattgacataagagcccctacgg

SEQ ID NO: 126167 - DNA, 785 bp, Arabidopsis thaliana columbia
  unsure (1)..(785): unsure at all n locations
tccgttacactatatcgacgtngcatgcacgcgtacgtaagcttggatcctctagagcggccgcccttctctttttttttttgtgtgacatttttaaaaaacacccgaccaagaaaattgtttctaattggaggttcgcccaaggaaatgtactacctttctgaactgtccaaggaatttacaaatctgattctgtctaaacgccaattacattaccgaataaaaaaggcaaaaaaactctgtccccctgaacaccagtgagaaccagcatcgggttcttcaaaatgcttattgcaatctccacttatacgttatataaaccatcactctgaaattcatctttgttccttgcaggaaccaatctttgcgttcctagactcttccttagagtctttgcccctctttctctcttcctgtatgcttcaccagaatcacaacctggcaatgttgcgccactggtacaataatcatggtctatactggtggcgtttgatcttccacaaagcatccggtgaaggaataaggctatggggccaattactggcctgagaagtccaagatataatagtcaaaagcctaagtctcagtcggatctcccttggcctctgcttctgggcttctttgtagatacctgacgtattacccgcccatatttgttccaaatcttatagggggaagatatgctgcccaatctagtgtgaaaaaccttgaggctattgacaaaattaacataatcgcgggcaacccccttgcttttatctttaacagccatatcttcctgccca

SEQ ID NO: 126168 - DNA, 526 bp, Arabidopsis thaliana columbia
acaatatccaatttatattatcgcatgcgttagccgggatcctgtatagcgtccagcctccacacctttttttagtttttcattttttaaacacactcgaccaaaaaaattggacctggttggtggttaaaccaatataatgtagctcctttctgaactaatctaggtttcttccaatttccctctgcataaaggtccaatttttttttcccaaaaaaaaatctaaccccaaactgcccccttgaacacattttaaaacccgcaacagtttcttaaaaatgcttattgcaatgtccacttatgcgccaccccacccatggcttggcggccatcaattccttttgggggaaccaatttttccgtttctaggtctttcatctaaagcactttgccccactatttttatacttaccgctatgcgttttaaacagaaactcacaaaccaccgcataacttgggtttccaccccgcaatggttcccaaacggagggttgggtctcccctcttataacccttttgttttttg

SEQ ID NO: 126169 - DNA, 833 bp, Arabidopsis thaliana columbia
tatgagtttgatgtacgctgcacgcgtgcgtgagcttggatcctctagagcggccgcccttatcatgtgtgtctgattttaaagcgaagcattgtgaaataatcttggtcttctgtaagaccacatctaaggacacatacaatgtaacatttgcaaaaagaaaagcttatgaaaaattaactctaacacaaagatgtctataaactatccatgatcaggtggggaacaggaaaattgatgacctgcaagatctgaacaatcttggccatggttggccgattcgaatgtatatgagaaggccagaccagagcaagtttcgagacttgcaaaaccttatcttcagagtattgttcctccatcactggatcaatacactcctacacattcccttgttctaacataactcgaacatggtcactaagtattacaaaaaatgttttcaccatacttcaccgggttccgaccagtcaccatttcgagtttcaaaaccccaaacccgtacacatcggattaatcgttgacccttaagtttcgacactttagttctggcgctacgtttcccacaaggttttgaaaccagttgttgtttcattgtgttcccgtattgtgttgctaggagaagaagatagcccgaaattagaagattttccggtttgtttttttttgttaaaggaaggatgttttgttcggaattcagggttgaaagtgggttgggtttgtatgaacccaaatgtggtttgggtgtaaataaaacacatttcccttttggcgtgttccctgagggaagggatacttgtggaccctcaccccaccaataaaaaaaaggccgggac

SEQ ID NO: 126170 - DNA, 606 bp, Arabidopsis thaliana columbia
aagatgaggcgccctcgagcgaccttaggcgcctgctttttcttacaccaaaccagcgacgaccgtccggggaaaaacaggtgctcaaaagacagttccaacggccttacaaagggatccttcccttcaaaaaatgcctgcaagaaaggcgccggtggcaactcgagccttccaggtccgcccttgttggtgtggcctaaaaccatgcaaaccgcgaaatcccctggccccccacatgtctccctcaaaaaaagttccgtgaatggtcctaccaagggtgccttccccctggctctccagggggccatgtattcactcgcgccctagaaacatacccgggatcttgtggatctcacacctaaacacctgaactccgtgtgtaaaaacaatactaaattcgggcccttgtcagttaagaaaaggacccccatccgcccctgggggagggtggtgtaacccagagcacacggcttgtgttagttatttcccaccccccccccacctcttggtgctcattgcccccccccctgttttttatcctccccggggcatatgtgtatggtaaaataactggggaccacaacttatgtttggggaaggtataat

SEQ ID NO: 126171 - DNA, 760 bp, Arabidopsis thaliana columbia
  unsure (1)..(760): unsure at all n locations
aggtgcatttccnnnnnnnnnnnnnnnnnnnnnnnnnnnnnnnnnnnnnnnnnnnnnnnnnnnnnnnnnnnnnnnnnnnnnnctttttttttttttttttttttttttttttttttttttttttttttttttttgaagggaacaatatagattcaaatactagtcatcccatacttattggttatgccctgattaccgagttcaccggggaaaaatcaaaacccggaatgggtttgtttccgtaacaactgtttcttgtttttattgggtggggaaaaaaaaaaaagaaaaaccaatgggatttgatttcaaaagacaagaggaagaggggtttatttgtccccatagagccccttctcaaagttactagtggaaaaaacaagttcttgagggttaaaccacaaactgatctcatcctttggagtctttgggccatcacttccatggattatgttcctgccaacagaaactggaagatctcctcggattgtgccaggctcaaatttttgaggatcaggggctccaatcagtttacgtccgtatttgatcacaccattttttttccagaccttgggttttaccgggcccgagctttggaagttcccccaaccattgaagaaagggcttttcttaagaacacggggaaaggttttggggcgaaaatttttttgaagggaacaatggacttttgtataacccaacctaggctttgagaatcccccttggggttttcgaaattcgaagaaaaaaggaacccctt

SEQ ID NO: 126172 - DNA, 817 bp, Arabidopsis thaliana columbia
actattttcgagttatgatgcacgcgtccctcagctgggaccctatatagcggccgcccctcgccctaaatctattttttttttttaacaaaaacaatctgattgaaatttgatgtctcgaaaagctttatttctaagcaaacaacaatatgtataaagcaaatgacaaaattgaaagggaagagaatctggccctgttattatattgttcaccaggagggtccctatttatttgacaattggtggcattcatcacaagcatgttttcttgggggaaaatcctctcaagattttcagaggttgttgaacccaacaggttcacggaggagcctctccatctgttgtgcccttgtcctgattgacatgaccaacaccttttgttggaactctacgattagtccaccgtacatacttggatcaatcttttgttccacagtgattttcttccctgctccaatgatctcctgaagcggctaagtcaggtcttttctcctcaacagggggaagcggaatgactgtggtaaccaaaactttgacatttcccctttgtgcagtttgtagctgcctaaatttcttcacaatggcttttaggttctccagctttccattctcagcttaccataaagaggaagtttttagtggggttcggcccaacctttggttgaaacacaagcattcctttataggcagcccaatctttgtcccctttaaagaacataagggtttccttttgtaaactgaagcaaaaaatagggaggtgggctttcattggcctcaattccttttaaaaaaagaaccggtccttaatctttttcca

SEQ ID NO: 126173 - DNA, 514 bp, Arabidopsis thaliana columbia
caattatgatttcggatgccgtcatccggaaccctttaaaccgcacaaccgtcgcacccaccaacaatttttatattttcacaaaaaatcgacatcaactattgtgtatttggagacgaccccctaataagaaactcacgtataccccactctaatcaagtcgaaatgaaaataccaatcacatatgaaaataaataattttgaatcaatatgaccatctaaaacatacacgttacatcacaattcggcaaatcccgatacgtttaataagacagagacacaccttgttccctaaaaactacttggaactcaggttacaacctcatttaattacacttggcgggcccacgtcaactatattaccatcccctacatcagactggtacttcctagatcattacatcctgctgtgtcaagtaaaccctgatcagagtctagattaatacccaaatatcttatagagcggtctgccatggtcggatcgcacttcagcctcaaatagcaaacttatcat

SEQ ID NO: 126174 - DNA, 717 bp, Arabidopsis thaliana columbia
ttcgattttgcatgcacgcgtacgtaagcttggatcctctagagcggccgcccttctatttctttatttccttcttattaaaacgattcaagaacgtaacttataagtctatttggacaatgcgactttaattagcagacaggatattacaatttcggttgaagaaagatattaaagttacagtaagtgtaagtaccgttacaacaactagtcaaccactgattcatctacttcccgcctgaccgtcaagatataagttgttgttgatagaatgtgttccatctctttgttgtgttctctgacctgttcttgggatgatcagaggtctgaagaaaactaaggcgaaaagtaattccataatgaacaaactcatgctgatccagacaaacaaagttttcctccagttccatatgatccttttcaagaaaggaagtttggattcaaggaacagagatgcatcgtaaatctcaggaatacctgctccaggacgaaactctgcacgttgttcgatcatgatcttcaagcaagcagtaggaataatgtccttttcgaccaagccctttaagcttcaaagttcaaggtttgggattttaagaaaccatagccccgtgacaaagcgggagcaaattcctttaagcaaaagttcctggggaccaagtacagtttatagggccttcgggctctccttaaaaaatttttatacccaattaaccaccg

SEQ ID NO: 126175 - DNA, 643 bp, Arabidopsis thaliana columbia
ttttttaaagcgcaccaaccgagcaaaaactcgtttgtgtgcagaggagaaccacatacaaaggacatcatacatagaatacatcttggccgaaagtaaaagctatccggcaaacataaacacactcccacatgtgactgttaattaaacctataccgacgattccggtgggagacacaggaacaatctgatgaccctgcaagcagctaaacaacactcagccctatcgctggcgcgatatcgaaaggtatctagagtaagcacaaacccagacccaagctacaatacacacggccactacctccaacttacagagatactgactccttccatccacatgagatcataaaacactacccacagcatgtgcctttgtgtcataacataatctccgaaaaatggatcacctaaagtaatcaacaaaacctggtcatgcacacaaatactccacccggatcctccgacccatgtcgaccaatggctcgagtactcaaaaatacccctaacacccattcacacaatcggaattcgctctgattgacactcttcaaacaatctcgacaccgtctatgatcaatgcagcctacgacacccaacaagccgttatccaaacccctgttggtacgcgccttcgtagttcccc

SEQ ID NO: 126176 - DNA, 610 bp, Arabidopsis thaliana columbia
ttcgattatgatttgcatgccgcgtacgtaagcttggaacctatacacggacgacctaaaaaattttttttttttgcataacaccacaaaatgttaatcgcatgagatcccgacatacacttagaaccaccccgtctaactgaaccaacagagagtactaacaatcaactcagagttttaactaatagctcctacattaattaatccctcccatacccctatgtttttacaggaattcagagatacagccagagatacagctccagaaaggtcttctcgggaatctaaatactcagtctctgggacacggataatctaatactcgatccgcctatcaaaatcacgtgccttgcatcccaaagcttacgtaggttccttcccagtctcaaactgtaccatagattgctcttcccactcaactcaaacaacttttgtgttccactacctgcacccttgttcctgggaccagggaccaacaccttcccctccccaagaaacgtctctttgggggtaaacaatacctcatcccattggagctccacaccttttcgctttggcgcgaagagcacatctacttcacagcgagacataaaacaacctttctgactaa

SEQ ID NO: 126177 - DNA, 219 bp, Arabidopsis thaliana columbia
tttgatgtaggattcccgcatacgtgagcttgtatcatctacagcggccgacctaagaatacttttttttttttttaaagggatttaattaaacataaagggggggagacactcagacataaaacacttcttaactccatgctgggacctcaaattaacatatgtctctcttaacatcctttgacctcattggctttgccaacctcgccgggcctttga

SEQ ID NO: 126178 - DNA, 812 bp, Arabidopsis thaliana columbia
  unsure (1)..(812): unsure at all n locations
gaggtgcatttccgttnnnnnnnnnnnnnnnnnnnnnnnnnnnnnnnnnnnnnnnnnnnnnnnnnnnnnnnnnnnnnnnnnnncttttttttttttttttgtttaactagagaacaatcctttattacataaaatttgcgaactacagatgcaccccccaaggaaatgtactgacttaaggggctgttaaacgattacacaacacaattcacgaatctgcgctcaatggtgattacctaatgacgaaccacaatcattctcttcaaggatccctggttggacccaatgcctacttattcaaaaagcccttggtagagagcatctaacggaactctttcctgagcttggaagcatacatttggtcgttgcttgaagcaaccacaacgaccctagcttgctcctttaaggtgaagcccgcccatttgaattcatggatgctgtagactatgacatccttaagatctgcacgagggtcaccacacctggggttgtgaatgtccagattccttttatgcactatttttcccatctaaaaggaaagcggtgataactcttccagcacagacatgctgatggggaagttcactacttggctagacctgaatagcatgacgactaagcttggcggttggtctactatgcgaggacatggggtttctcccccctcatgttgatccgtagttatacttctttagaaatgccgctaccattggtgtggttaaccttgtagaaatagcccaaagaagtcgggtgtgagggcctccttgtagcctatatctgaaacttccagatgctcggggcaagatttaaat

SEQ ID NO: 126179 - DNA, 790 bp, Arabidopsis thaliana columbia
  unsure (1)..(790): unsure at all n locations
gttnnnnnnnnnnnnnnnnnnnnnnnnnnnnnnnnnnnnnnnnnnnnnnnnnnnnnnnnnnnnnnnnnnnctttttttttttttttttttttacaccaaagtcaaaaatcttcttaccccacagtctttaaaattgcacacgcttcggagatgtattagctctgaacgccaacccgcggtcccaaatccaatcgaagggcttccacattctttttttggagaataaaaatggcatgcgcaatggtcttcacacattccatatgttaacacagagtcttgtatctcgaaatgaaatccggcttgattgcaaacaaatatatagatgacgcaccactctcaatgcgcaaccgatggccctataagaccaaatcctctaccaaatactacggccatcatgacgccctcccactcgccctttcctttcttatttgatgcatcgatacaatccatgccttggcccatcgcctctaccacaatggctcctgacattcgcgttcctggtctggggctaatggtatatttctaccgggttacccaatgcatggcggccttggcttgaaacataagccctattacgagtaagtgtggcttgctcgaaccggacgtactgcttataagcaccctagacatctgttacttggaagggaggatcaacaacatatgcgtcctgctagatccccggacgccccattggcatgaacggcagcctccacgtggcagagctttcgcctaatgcatgactcttgattcggatgctgtgcttgatcccttaaaaagtttgacctttctg

SEQ ID NO: 126180 - DNA, 318 bp, Arabidopsis thaliana columbia
ggagtatctcttcaacagatacaaaacgcccaagggctattacaagttatttaaccccaaaaagaaaaagacacaaaacattaacaaaaaaaaaaaacaaaaaagaacaaactaaacacaaaaaaaaacaaaacacaaatccataatagtaaacaacaattcaatggaataggtaaatatcataaatccagaaacctaataaaaaaggttaaaatgccgaaaaaaagaaaaacaaaataaattaacaacataaaaaaaaaaacaatcataaaaacatataaaaagataaaatagacattaaatcaaaacaccaaaaca

SEQ ID NO: 126181 - DNA, 835 bp, Arabidopsis thaliana columbia
actatatccgagtctatgacttcgcatgcacgcgcccgtaagcttggatcctctagagcggccgccctttttttttttttttgcttcacacacatgatgcgcggagattgagcaagtcaaggctaccatcttccaacagtgctaatgtgtatggttaccaagccgaaggatcaatcttgaatcattccttggatcactttgtttttccctttaatacactttgttccataaaccttaaccaaccttcactgtataaatgtgaacttatttgtccccttcttggcctctcttccaggatttgaatgaggcctacaagtggttgcatccagtggatgcggcggttgtgacagagtaaatctttggctcaggtgcatgctataaccctctggctctccatggtcatttccatcccacagagtctaccgtgactttacttccccatatgcatacaccaaacacatccaatgttggctcaagaaccgccaaacctggttgcttctttaccacatattaagatgtgtgctcgaacagaaccaccagccctaactggacagacgcgtgaggacaaccaaatcttatcatgtccagtggtggttgcggacatgggatgcaagatttaccaaaaaatacacacatatcggctgccgaaataccctatttggcccttgaacccattttccaccaaccaggaatcccggtttttcgcaatcttaaattaaaaccgagctatgctgtaagttttccctacaccaccggtttcctccccggggcacaccccctgttatcccgataagcatccttatgacgtttcccggaatttcccccctaaattttt

SEQ ID NO: 126182 - DNA, 987 bp, Arabidopsis thaliana columbia
tatccgatttatgatgtaccatgcacgcgtacgtaagcttggatcctctagagcggccgcccttaccatgcttttttgtttttcaaacatcatctaccaaaaattaacttggattaggttaccccactccacatatccacaatgccaaccctatcttcaacacactacagatccatcttttccagaatccggataggccccaaatagactccaacccctctcttcatcacccacatcatatctactcgaaaacattacagccccaacaactacctcctctttaagataaggataccaagccctcgcccctgacaaccgactccacatctgggagtgtttcgtcataaatccgccactattatgaacagaaaatactacgacccataggccccactcggggtatgaccaaaatagcctatagccagtaaaagccctccttaaactatgcaaccccaaataactcattgggatctccaacgacaacatggatactcttctacacaaatcccagggagggcatgccccatgtccttaagtcttttccaacgtaataaaacaagacacctccaaatctccacccactttggcgtcctatccgcacgcaacgaaccagcaaaaacccacccgtgcgcactcatcaaactcacaattgtggaggaccctgacactgtctcgctgggagcagtccaccccatgcggtctgtcccaaactattgcactctaacgtatttctgaaaaaggcataaactaccctgtgttccgaacaaaagcaacctgtccccttgacccccccaaaactggatttactacgattgcccagcacagattggcaaccaccggggtatctccccccgtccactactcttatcagaaaaggaactccgtccacacctatagagaacgcccggaaccccaccccttctaaaaaatacaacactagaaatccggtcaaggggcatacccacacatatgtcgtgtctcccccaa

SEQ ID NO: 126183 - DNA, 742 bp, Arabidopsis thaliana columbia
ctttagacgagctctgacgtcgcatgcacgcgtacgtaagcttggatcctctagagcggccgccctttttttttttttttgatattaatacggcattgagataatgaactgggtaaatgattgttacacaccaaagaaatatggacaaaaaccatgacctggagagaagtaccagacacattcacacaccatacatccatgttcttcgacccctaagaagctactcttgctcttatcgtcttcatcaaagaactccacctttatgcttcgacttaacggtcgatttgggcgctggctctgatgaatgaatcccgccgatgaccccctgacaaatgcttgtttgagtctagagataggccccattaatgttcctagtttctcgtttacaatgcttgattcccactttttctgtaaaaattgtcacctatactgttgcccatgttgggcaagaatcacgattcccattacaggtgctgctatgcagatggaccaaactgcattaagttctctcggtaggacaatcgaagaggggacgcttcttttccaccaagcttcttggataggaggcgagattgctacctcatcatttgtaataggattgagatcaagtgttacatcacaatgagaaacccgctcggatggcccttcaacaggttcatacacgtgtgagccaccgatagctcttttatagtccagagaactcatagctgaggcgtaagagatatcttctttcttgctggat

SEQ ID NO: 126184 - DNA, 698 bp, Arabidopsis thaliana columbia
  unsure (1)..(698): unsure at all n locations
tccgttnnnnnnnnnnnnnnnnnnnnnnnnnnnnnnnnnnnnnnnnnnnnnnnnnnnnnnnnnnnnnnnnnnncttttttttttttttttgtttaactacttttatatcctctcgtccaagaaaagggcaactaaaaggcggtttgtccaaagaaatgtactccctttctgagcggcaaaggaatttacgaatactgattgctgataaacgccaatttcattaacaactaaaaaaaacatagaaaaactgtccccatgaacgcttttaaaaaccagcaacagcttcttgaaaaagcttattgcggtctccacttatacgttatttaaaccatcactctgtaatccatttttgttccttgcaagaaccaatctttccggccctaggctctcctttagagctatggcccctctttctatcctcctggatgcttcaccccaatcagaacctggcaatggcgcgccactgttagaataaacacggtcttcactggtggcattaaatcttccacaaagcctacggtgatacattaaggccccggggtcaattcctggcctgaaacgttcttgaaagaacctagagaaggccaaggcctcacttggatcacctctgaactttgtttatggactcctatgcaggtacctgtggtatgacccgccccatatatgaaccaaattttagagtgggaagatattgccgc

SEQ ID NO: 126185 - DNA, 706 bp, Arabidopsis thaliana columbia
ctatagacgagcatgacgtcgcatgcacgcgtacgtaagcttggatcctctagagcggccgccctctattgatcttttttgcctaaaaacttacatccgcttccggcaagcaaacttgtttgtactttgaggattccccattgaaatgtgcgtcctcatcgggccgacaatggactatgcgaaaatgccattggctctaagatcaatccctcttactaaccggcatgctaaagattgatgcccgcttggcctcaagtcatgaaccccccccaacctctttaaaatgaggtttgcaccctcttcttatgcgatagataagccatgcctctgcgattattgataatcccttcgtgccacacaagacattgcgttgcaaacacatcccctaggaatgcagaccttgttcctctcctactggctgcttctgtatactcggaacctgccgatggtgcacaagtggcagaataatgatgccccccgctggacgcacttgaccctccacaaagctgtcgtggatagatatagggactggggtcaaactctctccggagtagttgacgtgacaccgtaagaaatgcacagcattaaccaggatgaactccgtactgagccactgggcccccatgtgcgtacctgtggtgtataccaaccttttcattttccagaactcttattgggaccgatctgcggtgtagaacttccgggc

SEQ ID NO: 126186 - DNA, 543 bp, Arabidopsis thaliana columbia
cctatagacagagctctgacgtcgcatgcacgcgtacgtaagcttggatcctctagagcggccgccctttttttttttttttagtttaactagtgaaatctccgatcgcggaagaaccaaggctatatacgggggacatgtccacgaagttgtcatacaatcagaaatggcaatggcatatcccaaactgaatcgctgtacactcccgtttcctgaacccaaaaaaaaaacccaaataaagtgtgcccctgcacacagattagatcagtcaaccacctcttccaaatgcttatcgtattcgcctcgtcgacattgtttatggactacctgtgaaaaccttctttgagcccctcgcgaagcatggctcacgtgcctaggatgtcccatagagccttagcgccagagtgtatacccatgttagccgcgatctaagctgaacccgtagcattcgcgacatcctgctaatgatcatagacgagccgggcggcatgggtccttccgcactccttccacattaaggagcgaaggcatatggtgggccct

SEQ ID NO: 126187 - DNA, 436 bp, Arabidopsis thaliana columbia
caacacggggcgggcaccgcgcggacaaatagcaaccgagagcgggtagcaccacgcaccacccataacgaccagacacccccgccccaaaggagcgccgtgcccacaagacacacccactccgcgaaagagcacaacggcccgaaaggcccagggcctccaaccaccccaaagcgcgcccggcccaaatgggcacgcacacacacacaagcagccccatccctccgatagacggaacggacaacgccaccacccccaaggcaaccaacagtcggggcagcagaggggccccgcaaaacccaagaccaaaaaggggacgccgcacccgccgacagtgcagaaaacaccccaagacaacacctgagaggccatccccacggcacccacaggaggcgcggagacccccggaaaaaaaacaacaacatcccaagagcgg

SEQ ID NO: 126188 - DNA, 695 bp, Arabidopsis thaliana columbia
accatatacgagtttgacttcgcatgcacgcgtacgtaagcttggatcctctagagcggccgccctatgcttttttttttgttttaaccaaaccaattggcacacctgacccaaaccatgtctaccaaccttccacgatactattgtgtttctaaaaccgactcctggcttattgtttacacatacattgtaacaatatctctttatctttgtccccgtacatcgtttatacttagccaacttcctataggaaaaaatcaccaaactctgtccagttttgggctctctcaccagacattacctgacccttattagcatcagtgagccctggctgggacgcgtaccaccctctgaaactcatgagtctattgctgttcatataccttaggcaagttatcccactttacattttctgtattcaaccctaaattatctcccctatatgcatcccacaccttcctgagcatgttgacccatcaactgtctaacctgaatgaccattaagcgcttaccaaaatctgtggtagagaagaccctcctagcccaagggtacatatgcaaacatttccaacttgagtcccactatgacccgtaggctggacgcggaaccttgggaagccatatatagtaaccttttaaaatccccgttaaaaaatcccgctttacgcaatacttccaattaactgtttttcccc

SEQ ID NO: 126189 - DNA, 723 bp, Arabidopsis thaliana columbia
  unsure (1)..(723): unsure at all n locations
aatagccgagttatgacttngcatgcacgcgtccgtaagcttggatcctctagagcggccgccctataacatgtcttttttttttaaaggagcagatcgggacactggatattgctatgcatccgagtttcagaactaaagcaaacctattaaggatgaaaatcatctgagaaatgactatccgaggaaaacgaacgccacggtgcatcaaaacactgctttaaacagctatgtgcattttgggctcgcactatatacagtactgatcgaaacgatgcttggatacttgagatgagcaacatcagattctttcgaatcattttggatcatcaggtttttggccaccagctacgctactggaagaactgtggcctcgtacgcttggagaagatgaacacttgctaaaaagagagcttcctcatattgagttgttgttgatgattctattacatctctttgacttctctggcctttgcaatggatccctatcagaagaagtacccgggggttttaattcgagttggggtgcagcctaattggagtcctctggtttctcagaactgctgttttttgagaccctatgctctaggttccccgagaacgggttccccggggggtcctggaggaaatgttgccccgggtatgggttgcctcacaccgcacctgtatttttaagggagagcacttgttcatgcggccatttgttatttttttttgtgaaca

SEQ ID NO: 126190 - DNA, 723 bp, Arabidopsis thaliana columbia
tttgacgtcgcatgcacgcgtacgtaagcttggatcctctagagcggccgacctacacgtactctttttttttttctcgttatacaatctaaaggaaaatccatgagtttgtgattaaccctcctcagattaccttgtatccatcgagggaaacccccatcttttattcaagggggccaaaaaaatcccacaaaaacccctcgtgaaccaacacgaatgaaatacctcaaacccccgacacttaaaaaaccccaaaaaaacaagacaaaacccaccttttcaaagaggggatacccctccgaaaaaaaccataaaaccgccctcatatttttggtttaagggccaccatcacccctcaaattttgaagaacatataaccccttctctcctaggaaccaacacattttcggcccgcccctttgaaactaaagggggggccccctctttctccaaaaggaaaaggccccccccttttttgctggtgacccctacctaatacacaaagggtccccatccccaacaatgaatattaaggggccaccaaacagccgcggggaaggtctcccccgggagtttagtagatttcacaaaaagtacttaataaaatcccaaaaaacaagggggggggaagggaccacccaggggtaattttataaactcttaaaaaaaaacctcaaaacccctggtttttttggtccgatccccccccataaatacattaat

SEQ ID NO: 126191 - DNA, 633 bp, Arabidopsis thaliana columbia
cctatagacgagctctgacgtcgcatgcacgcgtacgtaagcttggatcctctagagcggccgcccttctctttttttttttgttttacttctttaatacacaatcgttcatgaaaatggcatttaattggaggaacgaacaaggagccgtaatctcgttgacaaatgacattggatggttacgaaacccaatttatcagagcgcctatttcattgggcgagagcggctccaattggtactgaccgcttgaccacatggccgaggcaaaaaccgttatttaaccggctcttctcgttgtggcctaacccatcttacaaaccgtctctggaaactggacccttattccgtgcttgaacgaaaataaccgttactgaacaatcctcttgatgtgtttgaacctctacttctactcctggatgacttggaagaataaaaccctgccaatggagcccccttgctaaaacagttgtggcattaacagctggcctaggaccttacacaaaacatgaggtgggcccttattgtccactgttctattcccgttgttgggagtcaaggtttcatagaaccgctgcattgccactaccggaaaaacagtatgcacatgactgtggacttcttggaaggtccct

SEQ ID NO: 126192 - DNA, 426 bp, Arabidopsis thaliana columbia
gtagcatgcacgcgtccgtgagcttggatcctatagagcggccgccctacgcgtgcgtttttgttttatccaaagcaaccgcagacactgagacggacgatgtacgcaacccaccacagaacaaaagacattcccaaccaagacaaccaagaggcaaccctataaaccatcctcggaacacagtcccaatttctgctcgctaccaaaaattccataaaaaaaagcccaacctacaccgcgcaggatgaacccaccccgcctcaacccaaaggggcgtatataatagcaaaaaaaaaactgcctgtaaactccaaaccggctaccgaaaacgaatttgattcaaatcgccccggctggccaagaggacccaaaattctggtgcgccccctcgaacggaattagacctcccccacctaaagtccctgt

SEQ ID NO: 126193 - DNA, 820 bp, Arabidopsis thaliana columbia
acgcgtacgtaagcttggatcctgtagagcggacgccctccgccctctttaatagttttacttttttaatatcctctcgaacaagaaaattgtttctttttgggggtttgaccaaggaaaggccccccctttctgaaatgtcaaaggaattcacgatgttgatgcagaataaaccccaagggcctccacaaaaaaatttttcacaaaaaaactgaccacttgaacacaaataagaaccatcaacagcttcttcaaaatgcttattgcattctccacttatacgttatctaaaccatcactctgcaattcatctttgttccttgcaggaaccaatctttccggtcctagactctcctctagagctcttgcccctctttctctcctcctggatgcttcagcagaatcagaacctggcaatggtgcaccactggtagaattatcatggtcttcactggtggcatttgatctttcacaaagcatccggtgaaagattaaggcactggggtcaattcctggcctgagaagttcaggaacgaaaagtatagaaggccacactcatcacttggatcgccctctgaccctttgtatccgggcctcctttgtaaggtaccctgaggtataaaccagccccatatatgtccccaaaatttcaatagtggggaaagaatatgctggctggaatctttagtggggaaagaaaaccttggaagggccactttgaccacataatttaagccctcatttttgaggggcgcaaaacccacctttgcggctttttgatatccttttacacaacgcaaatatattctctcctgggttc

SEQ ID NO: 126194 - DNA, 584 bp, Arabidopsis thaliana columbia
actatagacgagttatgacgtcgcatgcacgcgtccgtaagcttggatcctctagagcggccgccctatacttatttttttattttaacgaataaaacagaaaccccgtacacgaatcgtgctctctaccatccaggagtctatcgcttatcaaaccacgaccctaggttcaaggttcactcacacatattgacaaagaccttatcactatcctcaacatacaatgttcaagcctagtcaacgtcctctaagaagagatccacaacccacacactggtatgagccttcccacccaacattaccctgacgatttttaccatcaacgagacctgtgcgggacccataccaacctacgacacgaatgaggctcttgcttggtcacataaaattatccgagattcgtaacccactcgaatcgccatggatagcatttccaaaccgctaaaaatgtgtacccctcctcttacaagtgtcgaacacctccgcaccctattctgatggaaggccaatttttgtggggctgcgccaattaccgaaccttgggatttttgaacccttctcaccaatagagggcgaaccccata

SEQ ID NO: 126195 - DNA, 699 bp, Arabidopsis thaliana columbia
  unsure (1)..(699): unsure at all n locations
gaaagagaaagctgaggtgcatttcagtnnnnnnnnnnnnnnnnnnnnnnnnnnnnnnnnnnnnnnnnnnnnnnnnnnnnnnnnnnnnnnnnnnnnncttttttttttttttttttttaaaaaaaggaaattcggacactgggaattacatatcttccgagttttataactaaagcgaacctattaaggatgaaaatcatctgagaaatgactcttcgaggaaaacgaatgccacggtgcatcaaaacactgctttaaacagctaagtgcattttgtacttgcactatatacagaactcatggaaacgattcttggatgcttgatatgatcaacactaaattctttcgagtcattttgcatcataaagattttggtcaccagctacactactggaagaactgtggtctcatacgctctgagaagatgaacacttgctataatgagagcttgcttatattgagtcgaaggtgttgattctctcacacctctttgaattctctgggccctgccatgtgtccttatcagaatttgaaccaggggctcataattctaggcgagtcgcaacttcatcggaggggcgtggtttatgagatctgctctgtcttgaaacctttgctctaggttcccgagaacggttaccggtgttttgtggaacgcgcaccgattgatgcttaaccacctgtattaagaagcattgt

SEQ ID NO: 126196 - DNA, 857 bp, Arabidopsis thaliana columbia
actatagacagagtctatgacgtcgcatgcacgcgtacgtaagcttggatcctctagagcggccgccctactctttcttttttttttttactacttttattacctctcgatctttagatttgtttttatttggggacaaaaccttgatgagatctaaagcacccagccgacaaatgacttttttgaacagacccaaaacaaactcaaatttggttaacaattcttcaaaacgaatgagaaccccccacttcatcactgattagaccccccaccaatttattggttggggggctgcgaaccaaaccaaccccccctaaaaaccatccctccccttttcccttaagaaccaagccggaaccaaacttgccccccccattttccccaaaaaaacgggggcccccattagaagcctcctgcgtgctcttttcccatcagaacccgaccgttgtgccccctcctttccatgttcacggaaaaacctccctttctttgctaaacccaaaaagcccccccttttttattaatggccacaaggggaacccccccccggaaaaccccccgatttccttccacattttgtctggttcccaaaaacaaaaacccttcttgcccttttgggaacccccccccgggggcttaaaaaaaaatattgattttttccccccgggatcttcgttggtgccccacacccccggaaaaattccgggaacacaggctccccctgggggagggtggttcccaaaaaaacaccaccctttttttgggggcgcccctaaataaaaaaaacacccgggccgtaatcgtaagagggccaccctccctttggtttctcctggtcgggaaaaacatggtctttt

SEQ ID NO: 126197 - DNA, 670 bp, Arabidopsis thaliana columbia
attcgacgtcgatgcacgcgtacgtaagctggatccttagagcggcgccttacttttttttttgttttacttttttataccctccaaaacaacaaaattgtttatatttttggaacgaccccgaaatgagatcttccttagctaccaaagaacttataagctgatctgatcaacgcctagtttattttcaaaaattaggaaccttattttactgtcgatgcacaggaggagaaccagtacatcttctttattttgcccatgggggacgctacttattagactattaaaccactaatgggcaaataatgtttattcctcgcagggactattctttgagccggtagttttttctttaaaggtcgtgcggcggtaacaataatggtggatgcctcaaacttaccagaaccggggaaaggggcacaactggttgaataatcttggaaaaccgtggtggcatatgatctttcacagaacactttgaggaagaggttgggattggtggcaatttctgatgtgtttaagataatgactaccgggaaaagggcaatgactaaagttggatcacccctgccctttgtaaatgggcggataccaagggccctgaggggtaaccacccgatataaggggccaattttttacagcggggaatatgtgccccattaaaaccca

SEQ ID NO: 126198 - DNA, 755 bp, Arabidopsis thaliana columbia
actatatacgagttatgacgtcgcatgcacgcgtacgtaagcttggatcctctagagcggccgccctttactttttttttttgttttaccacgacgacacccactcggccatgagaatggtattctaaatggaggactggtcaaggaaatgttcttactctctgagctgtcgaaggactttacgaagctgattctgtataaacgccattgtcatttactataaaagacatcaacacatttctgctcacattaacacaagtcagaaccgactaccggctattttcaaatgcttattgcctactccacttatacgtaacctaaaccctcgctctggcattaatatttggtccttgaaagaaccaatatttccgagcctaggacctcctctagagctgtggcccctctttctctcctcctggatgcttcagacgaatcaaaaccgtgaacaggagccccactggtaaaataatgatggaacccactggtggcatgtgatccttccacatagcatcccctgaagcatttaggcaacggggttccttactggcctggggagttcaagaaattatgttcacaaggcgaggtcctcagttggagcacccccgaactttggtcccggtcacctttgtcggggtccttgatgggtaaacccgccccttattatgttcccaaatttttcaaaaatggggaaacgaatatggcatgggtttaattttttagagggggaaccaaaaaaccctttcggatgggcttcc

SEQ ID NO: 126199 - DNA, 642 bp, Arabidopsis thaliana columbia
ctatgacgtcgcatgcacgcgtacgtaagcttggatcctctagagcggtcgccctttttttttttttttagtttaacctctcaaatgtcctaacgtcccatagaatacgatatatttggctgaaagtccaacgaatgacgctccctcattaactctgtacatggatacatacaaatctgggcatgtgtcagacgccaatctcgttaaactattcaaagcgaccaagaagaactgtacgcataaacacgactaagaacctccaacgtgttttaccatatgctgtttgaaacctagacttatacttaaagcctaccgtcactaagctgttgatgaatcacacgtgcaaggaccaatttttccccatctagaacctcctattgagctaatggacccttctacgctttcctgaagagctttgggtacaccattaaccctggaaacgggcaccaccgggttaaaaatctgggccgtgactgggggggtgttcactatcgcaaccgctttagggcagacctgagggtatgaggtacagtactggcctgtagacgtaaaggcttgatggggagagaggcaagtcgtgactaggaaaacccctagacgttggttgtggagatctctagcggtaccgtgacgctgaccatc

SEQ ID NO: 126200 - DNA, 949 bp, Arabidopsis thaliana columbia
  unsure (1)..(949): unsure at all n locations
tatccgactttgcatgcacgcgtacgtaagcttggatcctctatagcggccgccccacgcnctncgtttgttattttacatttttcacggaaatgacaacaagccaacatgtgataatgcagaggaaaaaagtaacaatttaaagcggatgatacatatagattacataattggaaatgtaaggaaaggattgctaatttagggttgatggtgactagaaaaggaaggtgaaagaggagggattcccgggatgagaggggccggagggattccagggataagagggaccggagggatgccagggagtccagggaccggagggagcggaacatggaaagaaggtggtggtggcggttgcgaaggcggattctccatagggacaggtggaagaaccggaagaggtggaagagtcggaattgttggaatccgtggcagagtaggagtcgggggagtaggaagtaacggaattgttgggagagttgggggagtaaggattattgggatttcactatccctaatttgcgtatagcttctcccctttttaatgctaaactcctaccaacttgttacgggctatggcatttttaccttagttgcgtccctcttggacctcagttcgtttctttctcaccaactttattaatagaataaacctctccggacgttgtgctattcaccatctacacattatgtaatgttctgccgcattggctctttccaccctcagttacgagatactatattattgcccctggccgtacttatttttgtactctccaaatatttaaatattctttatgtcggtgcctatattgaatccccttaaatttgctccggaacatcatgttattcgtctcaacttccctttagacgccggttgtaaattctcatatgccaaatgtccgaaagtacccgtgcgtttattgccttcttcaatactccggttata

SEQ ID NO: 126201 - DNA, 759 bp, Arabidopsis thaliana columbia
ctatgacgtcgcatgcacgcgtacgtaagcttggatcctctagagcggccgcccttctttttttttttttgttttacttctgaaaaaacccctcacccaaaaaaattgttcctacttggtggcctggcccacgaaatgttctacctttccgagctgccagaggaacttacaaacctgattctgtatgaacgccaatttcattatcccaaaaacatatcaatataaaactgtccccgtgaacacaagtcaaaacctacaacagcttcctcaaaatggttattgcactctcctcttttacgttatctaaaccatcactctggctttaatctttattccttgcatgaaccaatatttccgttcctagactttgctatagagctgttgcccctccttctttccttctggatgctatagcatgaataaaacctggcattggtgctccactggcttactcttcatggacttcactgaaggcatttgttccttcccaaaggatgcggtgaaagattacgcaatggggtcgattaccgtcctgccacgatcagagagaaagtgggaatgcagactcatcactagcatcacctgtaagctttcatgatggtctcctctgtgggcacctgcaggattaccagcccatctatgtcccaaatgtcacagtgggaaaatttgctggtgaatctatcgagcatacgcctggtggctctcgacaatatcaccttaattgaaggccacccctttgcttttatcttttacagcaat

SEQ ID NO: 126202 - DNA, 825 bp, Arabidopsis thaliana columbia
actatagacgagttatgacttcgcatgcacgcgtacgtaagcttggatcctctagagcggccgcccctcactttctttttttgttttaccactttaatatcctctcgtccaaaaaaattggttctaatcggtggtccgtccaaggaaatgtactacctttctgagctgtcaaaggaatttactaagctgattctgtttaaacgccaatttcattaccaatataaaaaatccaattaccactgtccacttgatcacttgttagaaccaacaacagcttcttcaaaatgcttattgcattctccacttatacgttatctaaaccatcactctgcaatacatctttgttccttgcaggaaccaatctttccgtgcctagtctctcctctagagctcttgcccctctttctttcctcctggatgcctcagcagaatcagaacctggcaatggtgcaccactggtagaataatcatggtcttcactggtggcatttgatcttccacaaagcatccggtgaaagattaaggcaatggggtcaattactggcctgagaagttcaggaaataaagctaataaggccaagccctcacttggatcacctctgaactttgtttctggtctcctctgtgggtaccctgagggataacccgccccttttcttgtaccaaaatattaaaagtgggaaaaatatgctcgcttaatttaatggtgaaaaaactttggtggcttttttaccaaaactttgcataatattgtggggcccccccctttttccgttttatttttttaacagggaatattcttcccggtgtcagggtattttttct

SEQ ID NO: 126203 - DNA, 712 bp, Arabidopsis thaliana columbia
attcgattagttgtagcgtccaagctgaccgtcagggcgcccagcccagttttttttattcgaaggaaggggacacaagctaaatctgcttacattcgagagattgcttgaaacaatatcaagagctgggtcgttccatgtgaagaccaaattgtagcaccgaggctcataaaccccacagacaaaacatgcgatccattggacgtcgatcaaagactgacgtctcttacacatattccagttgaatgggtttccgccgctcggaagccctgttgctcgtttctctaggagtgaaagaccaaacaccgggaagaggagagacctggtgaacttagacaggaagggtatccatcttccacagggagcgatcctcccgtggtgatagtttgggagggggagagagcccactaacggggggcaaagccctggaagaaaggctacggtttgggggagaacgcctggaaaagtggtggtgagaacaaacctgatgcgccttggggccttttggccttttcctgcttctaccctaaaaaaccgaccccctgggtgttgaccccgggaaaattcacggccccggtatccccttgcaaggctgttacccacgcatttttcggcttatacgcggcaagtcctttatttttatagaccctttgggtcgttttaattgcagtggggctcccatatactcggatctgtacccccgtggactgta

SEQ ID NO: 126204 - DNA, 630 bp, Arabidopsis thaliana columbia
ccccaagaaggctccgtatgcgccccctcccatttacctcttacgcctcccctggagaatggcgctcccagacccatgaaaatcaaaaaacccctctgggctactgggaggttcatccacactcgaggtagtcaaataatattcaactggggcgcttcacccacctgagagagcgccaaatttatagcaccgtcttcatccccacacaaaagaacgacctcctccggggtggagaaagtactttacatgggtcaaacgggggggctgtcataccaacccgcgacccctggtgcgaagagttcgacgggatcaaaacatgggtacctctaaggggcacctgattcaacagcactcttgggatcctccagcttcttggtcacctaattatcttctattagactcgtgccctttgctgagaggaatccctgcgtccggcgattaaacctccttacccccatcaatccgtgttgtcccctatttcatatagcaaccggtggggtgaacggaactttgtgcctcgcccgggaacacctctcatgtcgtcgtcaaagaacacactgtcgtaggggtgcttcctcgccgcaacatctctgacaactaactgctgaaaggggcaggagcccccctctc

SEQ ID NO: 126205 - DNA, 715 bp, Arabidopsis thaliana columbia
tacactatatacgagctatgacgtcgcatgcacgcgtccgtaatcttgtatcctctagagcggccgccctttttttttttttttggtttaaacacttcaatagccgacactgaacaaaacaaggttacaaactttcgacagtacaaaggaagtgtgtctaacatactgagcggtcaatgtattatcctaccttgaatcactttctccgcctctttcattcccatgattacataaccattaaccactctccactttatcaatgttaagaaccctcgacaccttcttggctatgcttgaggcaatcgacagatagcacatagctaaaccatccatctgttgtgatgtttgtgacctactcaaaccatggttcacctgcttattcattcctctggagcgccagctcccttttcatttctcatggatgcccctgactaatcttaaccatatgcatgcgccccactcgtcaaatgttgacggactaccctgctgacctgtgtgcctcctcaccacatagtgaaatatatggacgaaaaggacgaccatccccgacctgacagattcatgaaaacagaaaagactgccatgcccttggttgatgcccccatgagcgctagaagagctctattccaagagaaccggtagggataacccgaccgttttcctttaccccatttttctaaaaccgggaaaacatctttcctagcggaaaccccta

SEQ ID NO: 126206 - DNA, 896 bp, Arabidopsis thaliana columbia
atgcacgcgtccgtaaccttggatcctatagagcggccgccccacgcacatcaataccgttttacttctttaataaccccccgcccaagaaaattggacctaaatggcggtccgtccaaggaaatgtaccaccattctgagccgtcaaaggaatgtaccaagccgaacctgtataaacgccaatttcattaacaaaaaaagaaaacccaaaaaaactgtccacatgaacacacggtagaaccaacaacagcttcttcaaaatgctcaccgcaagctccacctacacgttttgtaaaccatcactccgcaatacatctttggtccttgcaggaaccaaacatcccggtcctaagccctcccccagagctcgggcccctctttgtctcctcctggatgcctcagcagaatcagaacctggcaacggggcccccctggtagaaaaatcatggtctccactggaggcatttgatcctccacaaagcacccggtgaaagaacaaggcaccggggtcaaacacccgcccgggaagtccaggacagacagcacccacaagggccaaggccctccacttgggatccaccctctctgaccccactggcataccggagacccccctccagtaggggaaaaccctggtaggggaaaataaccccaagtccccccataaataatggttccacccaataattcatctaaacaacctcggcgggaaagcaaatttctgccctgcgcccgacaacttccacagggggccgcacaacaaaaagccttggagaaagtcgtacctttcggacccaaacaaatccaaggccctctcactatgtggggagggccaaacccccacctttctgggcacggtgcgtaccccctctataacacaccccaatttaacactg

SEQ ID NO: 126207 - DNA, 706 bp, Arabidopsis thaliana columbia
  unsure (1)..(706): unsure at all n locations
annnnnnnnnnnnnnnnnnnnnnnnnnnnnnnnnnnnnnnnnnnnnnnnnnnnnnnnnnnnnnnnnnctttnctttttttttttgttttaccacacttttaaccaaccccacaccaaaatgggttttaaaccgtcccccctcctacgatgtaatctaaccgtccgagcaaggaacggatgattctaaattgcattctgattccctgtatatttcctttgaccaaaaaaacaaccaaattacagtattcactttcccagtagccagaccctgttccccgttttgatattgctaaccgccttccggccttgcacatcttctaatacgtcactgtcctataaacaaatgtaccgtgctataaccaagaaacccccggctataccaaccccttgagtggcgagaccctttaaaccactcctgaatgctcttaacaaagcagaaccttatacttgcgccaccttgggtaaactttcatgggatcttccggcggcctgcgtgcctctctatgctggctgtaacatagtttggaatcggatcccacccccctccggcggagatcgcgttttactgttcagcagtcgggttccccagtttgtatgacccatgttacttatacaacaactttccactgttatgggatacccttgaagatgtaaggccctccccatataaccttgtgccccttttttttataaaaaccccgggacc

SEQ ID NO: 126208 - DNA, 611 bp, Arabidopsis thaliana columbia
gactatagtcgagttatgacttcgcatgcacgcgtacgtaagcttggatcctctagagcggccgccctattcttttttttttgtttttaaatgaaaatttacattccactagccatattggggttcaaattgtacacccgaataagagggaattgttatgtccagtacccaatggttgaatagaaaattccatcatatatccaagatctattttgttgaatcaaaaagacaaaccaggtgtcccacttacattccaacttgagagatcggaatccgtttaattagatcgagagcctccttgttgcccaaactaatttaggatggtgtccatacccaattatattattgtcggtatttgaagaaaaagaccccacgcaattactactgctttctgggggagacccattagttgaatcatctaggccctggacattccataaatctgaatctccccccacttgcttaaaccttcatggaagctgaaaatttccatgcttggctctgtgaaagggatgtaaacaggcatgaaacacaatttctttatccgtaatcgtaagaggaaggattctgatgcacctgtcatgtcttgaaagtgggaggccccctggtcc

SEQ ID NO: 126209 - DNA, 986 bp, Arabidopsis thaliana columbia
atgacttcgcatgcacgcgtacgtaagcttggatcctctagagcggccgccccacactttcgtttcttttttttcaacagccacaaactcccacccagtagaatggtttttaaacggtccactcgccaaagaaacaatcttcacctccaaacacccaatggaatacacaattcaccacaatataaccacaccaagtatgttaacataataaaacaaccactcatttctggtcccctgcccacacgaaaaaaccaactcccgctaatccaatatgcttttcgccatgcgcccaaacactttttggagaccatcaatcccgaataattccatggtcgatgctagccccaaaataccccttgcaataacactacactcctgtgcgggacctttttgcaacctacctttagggttcgaacaacccagaacccgcgaattgcctcccccactggtgaaaaacaacccattgggtctcccctaaattgttccattgcgatgacctacccccagaatccggctttgacataattctgagtctaaagggacacaaccggtgtttttctatatccatcctcgaccctaacgaccggtatatgtaatccaaaggataacagttactataagtatgcgaggccatggccccagggggctctaatacaaaggtgtgggcactgccccaccccctattaccacctattgtgcttcaaccgcggtttcacatttcttgagtgggaaacccaccctggggagggggtgaacccgaaacgcctcctaatcattgcccacccaaatatttctggaaaccactaggggtaaacaatccgtgcctgaggtgcacattcctcttgggcgccccaaaaaaaggttatttcgggcttcttggagcgcaatcatttccctgttcctataaaggggggcccccccccctgtgggtcggtgttgcccccatataaacaagccatttatggttgcggtaccccccgcttttt

SEQ ID NO: 126210 - DNA, 1015 bp, Arabidopsis thaliana columbia
  unsure (1)..(1015): unsure at all n locations
caaccaataggccccccccaaacatcgaaactggggtgggccagaccccccgcccaaggacaaaagatacttatacttttcccgatctccacaatggacatattcaaaacccaatctgtatcaacatcaattttattttcttaaaaaaacaaccaaaaaaaactgcccacatgcccacaaataaaaaccaacacccgcttaatttaaaaatatgctatattgccaatgttgccacctatacaacattttttccgaataaccaatccaccttcctccaaattaaaattcatattttcctgtgccaccgaaacaaaaaaacttacccctttccccaatggaccttccccccttaccatcttgggagaccccccccttccccctttttaaactcctttgttattgggtttctgggcacccacaaaccccataaaacccctttacacccattttgtgtttatcgcacccccacctcccccctttagagaactcctatttacaattgttggttccgtcttccaacatataatntcgtgcccaatttttcgatattctctttccctcccaaataaaccagcccccgggttgaaaaccttaacttcttgggaaacctcggaggtgtttcaaaattaacctgcttccctgggggaaaagttacaccaaaggaaacctcacaaatattaccacccaaatgtccaaaggtctcccctcaacttgtggaactgcgccccccttgaaccccttaataatataaccggttcccccactcttaatagggaatacccctgaaaagggggtaaaccccagcccccacaaataatgcttcccaaatatttttcaaaaactacgggaaaaaatttgcccaaacttacattcctatgggggcacaaaaaagcttttatggctccttggcccaaaattagcccttccctttgaggggcacacccccccttgggttgtaaccctaaaaaaaaaaaaaatttctcccgtccagggtttttacccagatcttaaaccc

SEQ ID NO: 126211 - DNA, 221 bp, Arabidopsis thaliana columbia
atctctgctcatatctgccccactaagcccccttgtttctacgccaagttgtggggcgaaccttgcgagtcacactacatttcaaacaacgcctacaaaccccgctaagctgtcctacaaccctttattttgcgcactgtactctattgcttttccgacaaacaagtgccccgaaaagcatggcattccatcgaaaggggacccgagagaataagacttgc

SEQ ID NO: 126212 - DNA, 744 bp, Arabidopsis thaliana columbia
  unsure (1)..(744): unsure at all n locations
atgcacgcgtacgtaagcttggatcctctagagcggccgcccttctcttccgataaaagtctattatttctttcagnacccaactggaccaaaaaaattgtttctaattggtggcttgtccaaggaaatgtactacctttctgagctgacaaaggaatttacgaagctgattctgtataaacgccaacttcattaacaaaataaaaaaacccaaataaaactggccacatgaacacaagtaaaaaccaacaaccgcttctttaaaatgcttattgcaatctccacttatacattatctaaaccatcactctgcaattcatctttgtaccttgcgggaaccaatctttccgttcctagtctctcctctagagctcttgcccccttttcttttttcctggatgccttagcaaaatcaaaacccggcaatggcgcaccactggtaaaataataatggccttcactggtggcatttgatctttcacaaagcattccgtgaaagattaaggcactggggttaattactggccctggaaagtcaggcaagaatagtcaataagggaaaagccttcagtttgggatcaccctctggagcccttggtttactggacccccctcctgaagggtaaccttggggggatttaacccaagccccatttatattgttcccatatttgatccccaagtggggggaaagtattttggcctgactttaaattccctaagtgtttgaataaaaaccccttt

SEQ ID NO: 126213 - DNA, 943 bp, Arabidopsis thaliana columbia
tgacttccatgcccgcgtccggaatcctgtatactgtacaccgccgccccaattaaaagttttactttttttaaaaccctcacggccaagaaaattggatctagtgggggagccgaccaaggaaatgcactaccttactgagctgtcaaaggaatttaccaagctcaatctgtataaacgcccatttctttaccctagaacgaaaaccaaattccactgcccccattaacacacacaaaaaccaacaccggcttccttcaaaatgcttatcgcaatctccacttatacgatacctaaaccatcactccgcaattcatttatgttccttgcgggaaccaaactttccgttcctagggttatctttaaagctatagcgccactttcttttcatccgggattgtttagacaaaaacagaacccacccaatggtgcccccactcgggtagaaaaaacccatgggacggaaacctggaaggcgattgtgattcttttccacaaaatacaattccggggggaaatgaaaccaagagcccattggggggtgacaaaataacctgggcccctctaagagaagttcccaaggtaaataggcaaaaggtctctgagttaaggggccccaggccgccactccccccttctggaaatcacaccctcttcgcacaccttttgagtttcactgggcacctcccctccttggttggggtaccccctggcacggtaattatacccaggcccccactaataatgttctccccaaacactatccacatgctgggggaaagaaaaatgccccgcccttaaatccaatacgctgaaaaaaaaccctgggggggtttttgcacccacaacagccctatatttggaggggcaaccccccctcgctctttgttcctataaccagcaaaaaggtccccgctcaaggttttaaaccagcccttaaccc

SEQ ID NO: 126214 - DNA, 819 bp, Arabidopsis thaliana columbia
tcgacttggcatgtcacgcgtacgtaagcttggatcctctagagcggccgcccttctctttctttttctgttttacttcttaaagaaccactcgcacaagaaaattgtttccaattggtggttcgtccaaagaaatgttctacctttctgagctgccaaaggaatttacgaatctgattctgtataaacgccaatttcattatcaacagataataacccaatactactgtccacatgaacacaagtaaaaaccaacaacagcttcttcaaaatgctcattgcaatcttcacttatacgctatctaaaccatccctctggaattcatctttgttccttgcaggaaccaagcttcccgttcctagtctctcctgtagagctcttgcccctctttctctcctcctggatgcttcaacagaatcataacctggcaatggtgcacccctggtagaataatcatggacttcactggtggcattcgatcctccccaacgcatccggtgaaagaatcaggcaatggggtcaattactggcccgccaagtgcaagaacaaaagtacagaaggcaaaaccatcactcgaatcacctttgagctttgttaatggtctcctccgttggaacccgaagtataaccagcccatatatgtaccaaaaattaaaatgggaaagatttgcgggctgaatcctaatgtagacacaacccttgggggcctatttgacaaaaatttcatcatcccttttgggggggccaaaccccccttttggctcttgaatactttttaaccaacccaagtatctttcccgggatgcgagaggttttt

SEQ ID NO: 126215 - DNA, 692 bp, Arabidopsis thaliana columbia
cgacttcgcatgcacgcgtacgtaagcttggatcctctagagcggccgcccttttcttttttttttagtttaacttcttttataacctctcgtccaagaaaattggtcctaattggtggttcgtccaaggaaatgtactacctttctgagctgacaaaggaatttaccaagctgattctgtataaacgccaatttcatttacaaaataaaacaccacctaaaatctgtccacatgaacacaagttataaccaacaacagcttcttcaaaatgcttattgcaatctccacttatacgttttctaaaccatcactctgcaattcatttttgttccttgcaggaaccaatctttccgttcctagtctctcctctagagctgttgcccctctctctttcctcctggatgcttcagcagaatcataacctggcaatggtgcaccactggtcgaataatcatgggcttcactggtggcatttgatcttccacaaaacactctcgtgaaagattcatgccctggggtcaattactggcctgttaagttcaggaactacattttagaaggcacagtcttcacttgggtcccccctgagccttgttttttggcccccctctgtggggacccctgagggtataaacccaccccccctatctttgttcccaatattttttattaattggggggaaaacatttt

SEQ ID NO: 126216 - DNA, 707 bp, Arabidopsis thaliana columbia
cttagaagagcatgacgtcgcatgcacgcgtacgtaagcttggatcctctagagcggccgccctttttttttttttttggtttgaaccttgaaggttcgatataggggctaacgcagactaccttctttctacaacactgggaaacagccaaaccttgcaaaaaggtcaagagataaaactttcctgggacaaagaacatagttgtttaattccaaaaagtgatgttccactggctagatttcgcttcaatatctttaagaacaccaactacttgctgcatacttggtccggtttgaaggaagatcaactgtgcataggtaacccatctggagagcttcttgcatctgatcttatgcacctgtctcttggatttttggaccaatagctctcgatgctcgattcctcctaactaaacttctaacccatcacaccaagcttgtatctttctcataaagagaaaaatcttcaatcggatttttccctgctatgagcttcaacacaacaactccaatcaattgacgtaagatttccgagttcggcacttgcgattgggttagaagaacccaagatggagataacccggtgagcgctgaatatatctcatcgtacaacccggacgcgtgggtccccccgggaattccggaccgatacctgtccgcttaccaaatttgcatatagtgagtcgaattatagcttggcgaaatcc

SEQ ID NO: 126217 - DNA, 787 bp, Arabidopsis thaliana columbia
  unsure (1)..(787): unsure at all n locations
gttacnnnnnnnnnnnnnnnnnnnnnnnnnnnnnnnnnnnnnnnnnnnnnnnnnnnnnnnnnnnnnnnncttttttttttttttttgattatcattctttatttctttttcaatatatattttaagatgataacaaattatgttcctatttttattatggggggcaacagtgaacatttcggacaggctactttttaaaaatattgtacccgagctacggaaacataaaaacccccaattttttgttccatcacaaccccttttacaaaaatttccccaaaaaaaacatgggcatataaaaaatgtggggggggcggcctaaatttcctaccacagaaggtggcctccccggtttccttttccccatatggcccaaccccaaaaattgaaaaacctgacattcttcccgatcttttacaccaaaacccctcataaaggggaaaaaaaaaacccccctcttttcctacaaaagggggttgccggggacccgcaaattgaaaggggatcttcccccggttctgtttaatccacaaaacaagaccctgaagaaagcgccctccaaaaccggggtttatttttaagagaaaacaccttgaccaaataacctgttcgtttgaagccattctttgcgggttatttcccaccaaaaaagatcctcttgatgctttattaaaaaagctcattaagaaaaacgccccccgatatgtggacccccccccgggtcccgaagaaaaaccatttttttttttaaccccgcacaatattcaaagccttaccccccccccaa

SEQ ID NO: 126218 - DNA, 524 bp, Arabidopsis thaliana columbia
ccccaaaaaattatgggaaagactgagacccgcctacctggtccccacgaagcggaaaacagcgggaacgaccaaacgacaggcgcgtgttttttttaagaaaaaaggaggccgccaacgacacaggaaggggacaagggaaccaacggagaaggaacaggggccgcaaaacaaaacagcaggagaacaagcgggcggcacggcagccaacgcggataaagagcgcccagcgaccacgcggccaagaaccgcaacgcgaaacggaccggcaaggacaccccggagaagagcagagaggggccgaccaaacaaccgcacgacgcgagggaggcaggcaagcggccgagggcacgcgacgcagaagacgcgacaaggcaacccccaaaaaaacgagacgccgcaccaaacaggcggaccaagggcagcccgaggcagacgcaaaaagaacaagaccccgccgcccacggccagacggggaagcaagggccgagggatgaacgggaagacaccccaacgcccccgca

SEQ ID NO: 126219 - DNA, 534 bp, Arabidopsis thaliana columbia
ggtaaatacaccaccacccgcgggctgacagccaaaacaaaagctgtatggtccgaaccaacgaagacctaaagccatctcttttttgtgcagcaaccggagtactatcgcccgcgccgaccaagcgcgaggaacaccatctgataaaatattgcagcccataacacatgtgctatgtagcatatctcgcctatagcaatctaggcatgcacacattagatggagacatgggctcccgggtgtgtccagacacaccacgccacctcacactgcagtagcgacaccagactacgccaataccgcctcgtgtcatctcacagtaacacctcaaccacgggctgcgtactgctcctctacgcaattttccgcctgggatcactcggccagtcgccaatggcactacaaacagccaactctcctgtcaaagcgattactggaccctacattacctacaagcaagggcgttctgcatagtatcccctagcacctacatagctgtgaaacacgcaacttcaatacatgaaccaacggtgt

SEQ ID NO: 126220 - DNA, 276 bp, Arabidopsis thaliana columbia
  unsure (1)..(276): unsure at all n locations
gaccccaacccagtataggggaaagnacanaaccgacgccgcagggccgagacaccaacgggaggacacgcaacacaaagaccagagacaacggcttttatctttataaccggaacaagacgccacagagaccacccaggggcaagcacacacagagccacaagagcagcccgcgccccaccaaaggccaaacgcgacacctgcagccgcgaagaagaaccgacacaccaggaccccggccggaacacaaccagcgaacgaggacagcgcgaacca

SEQ ID NO: 126221 - DNA, 853 bp, Arabidopsis thaliana columbia
  unsure (1)..(853): unsure at all n locations
atcnnnnnnnnnnnnnnnnnnnnnnnnnnnnnnnnnnnnnnnnnnnnnnnnnnnnnnnnnnnnnccacgcgtccgagatttttcatgagcaaaccagtgagaatcttggtgaaacgtgatgagctcacacttgaaggtatcaagcaattctacgtgaacgtggagaaagaagactggaagcttgagactctctgcgatctctacgagactctagccatcactcagagtgtcatctttgtcaacactcgtcgcaaggtcgactggctcacagacaaaatgagaagccgtgaccacacagtctcagcaactcatggagacatggaccaaaacaccagagacatcatcatgagagagttcaggtctggctcgtctcgtgttctaatcacaaccgatctcttggctcgtggtatcgatgtgcagcaagtctctctagtcataaactttgacctcccaactcagccagagaattaccttcaccgtatcggaagaagtggaaggttcgggagaaagggtgtggcgattaactttgtgactcttgatgatcagagaatgctggttgatattcaaaaattctacaatggggttgttgaggagcttccctcaaacgtggctgatttgctgtgaagaagaagaagaagaagaagaagaaaggttgcttggttcgcaaatttcttatttgatttttgacccgtctttctctctctgaataatcgatacatctttttcatttcttaggaattcttcatcaaaccctattcgaacattatatattgtcttcttttggacccctattttctttttttattcaaatggccaatatttttatttttttcttaaaaaaaaaaaaaaaaaa

SEQ ID NO: 126222 - DNA, 848 bp, Arabidopsis thaliana columbia
  unsure (1)..(848): unsure at all n locations
ggtaaagctggtgcgcctgcaggtaccggtccggaattccagggtcgacccacgcgtccgagaacaattcagaagaaaggtagctctcacaaaaccgacgctagggttggccccaagaaaaggcgcaatctcttcgatgtccggtatgtggttgattcctcagctagtgctaatgggtatcgcggacgccctcgctggagttggacaaatggagttttactacaaacagtttccagagaacatgcgaagttttgctggttctctgtattattgtggaatcggattggcgagttacctcagcacctttttgttatcggcggtacacgataccacagagggattttcaggaggaagttggcttccggaagatttaaacaagggaagattggagcatctctacttcttggttgctggtatgatgactctaaacttggcctatttcttgttggtctcacattggtaccgttacaaagatgttgtggccaaggacaaggacatggacaagacttctgctgagtttgataaggtgtcagtgtaataaagatctttcctttgactctttggtttangggctttgagacaataaaaatacaacccttgaacaaaacattacatacaaaataccatgtaaaaatgtttatatatgtaaaagacccatagctttccgtaaaaaaaaaaattatttaatactaaaaaggcgggccgcttctaaaaggatccaaagctttacgttccccgtgccattgcgacgtcattaactctttctatagtggcaccctaaaattcaatttcactgggcccggcgtttttacaaccgtccggaactgggaaaaacccctggcgtttcc

SEQ ID NO: 126223 - DNA, 1068 bp, Arabidopsis thaliana columbia
gacccactatttggttaagctggaaccgctgcaggtaccggatccgcatttctgggtcgacccacgcgtccgctctttttttttagcaaagaaccccacacacacaccaatggatccatagctaacccatctttgtgattgccttctactttttgcttacactactctgtcaaagcgacatacgcaaacctttatcaaccacctaaacccctaacagaaagccatgaatcttgattcgtccccatgtatgcaacggtgacagcgttaacaaccctgtctcgctgaaaaaagcccttgccgctatacacagaacaaactccttatgctcgaaaatccatctgcctcaaaacgaatttctacttcgaccaccctgaaacacgcgtagatttgagtgtcccaaaggacaatatcctaatttatttggggggattcttcgatcactaaacttctctggagaaggcagaatcgtaattcagtgcatctatttgggtcccttatatacccccccttgggaaaaacgttgaggtctgggtttaattcccttataaccctggttctactatctgtgggtgggtatatcctcgccctatgtaatttgggaagttaacctgggtgaccccactataaaggcacaacaaacaggggggacatctacaaggaaccccaccataacttgtgtgttaaccggataaaacaattctcttatgccaaccccctcaaatggtcttaggcccattacacaatcgctccacgtcccaaattagtcctgtgaccctatgtagggcctgccctttcctaaaactctcataggatggtggcctttctagccacataacctgggcaaaaatccgcacgttccccgcccctttgcccccctttctgcttgtggaaaatcgaccaccgaatttctcacggtctcttcaacttgcacgaattgggctttcattttctcacaccggttccccaagtgataaaacatttcccacactttttcgggttctatataagtaacataacactttatgtttcccccatatcagtgtgttgtctatagaccattctatgtat

SEQ ID NO: 126224 - DNA, 823 bp, Arabidopsis thaliana columbia
  unsure (1)..(823): unsure at all n locations
cagtatagggaaagctgggacgcctgcaggtaccggtccggaattcccgggtcgacccacgcgtccggtcttttgttcccaaatcagtacatcatactgatgtccttttgtgatcagctcgttgttaatgctctgcattaacgttgtcttcccaaccccaccaggtccataaacaccaatgattcctctttcttcttcttcactgagaaattccaaaacctgttccatcatcgtggtatttccgacaacggacttgatgggtatctctctacaagttacttgaattgacccgccatctgttttgatagcttcagagcgttctctcagctcaccaatgctcttcaatatggcagaaaccttcttgcacagtttgtagtcggcacaaccgaaacaactgaggtatctnctcctcattcgcgttctctgttcccgacgcctaaacctcactaaaagtaaggctgttttagtcttcgttacttgcaccgcactaagccactctctggcacgatttgagcagcttagtccctctagaccgtctttgtggatccgtaaagtcaggtcatcacgtatggcctttaaatcaccgatggctgtttcaagatccgtgatggcttgtctaaaatcagtcttatgtcctcttctttccgccatattcattgattcacacaacacctgaacaccgccaacgataagagatgagatgaaatncatctccatgatctctcgctctttctttacttgtctgagctactaaccaataaaaataaggggtgactcctaaagaatcaagaaaagccacttttatttaaaaaaaaaaaaaaag

SEQ ID NO: 126225 - DNA, 649 bp, Arabidopsis thaliana columbia
  unsure (1)..(649): unsure at all n locations
cttccgggcccgttccgaatttccggggtggacccacgcttccgagaacctgtcttttttggccgaaatctcgccggaaatgaaattccggctgattgcaagaaaacgaaggtcttttagctgaaagattgttgccggtaacgcacccatgattctgccggggacaatggagagctcagtgagtgcagagagtttgcctattgctgggtcgatccgacccgataaaccgggtgaaccggctctaggatcgccgagattgagagagattactttatctccgttgcagtagacgccagcgaagccgcatggatcagaagtgaaatcccaagactcgaagaacttggaacctggcaagtcatcgagggatttacgaatagcttgcagagccaagaaatcaactgggtcgagaatcgcctccgtgaagaagccgaatcgaagcaggaacatcaaacaccaaaccaacttggtaaatctcatcatcatcttcttcttcttcttcttcagacttaaccgttacaggttcaagaaacagagactatatatattcacagagggaagaacagagacgagcctgtaagtagagaaaatgggttttgttttctgaattctcgngagaaggaaaagcctctggtttatgtgggggaaaaga

SEQ ID NO: 126226 - DNA, 673 bp, Arabidopsis thaliana columbia
  unsure (1)..(673): unsure at all n locations
nnnnnnnnnnnnnnnnnnnnnnnnnnnnnnnnnnnnnnnnnnnnnnnnnnnnnnnnnnnnnnnnnnnnnnnnnnnnnnnnnnnnnnnncggccgcacaaaatcatcgcaattttctctaaggacacaaaaactgaacagctcttccaacagaatgataagtaaaacagaatttagataaagggttcaaagctgttccgtttagtcatcattcaccgatgaacttgcgctttttagaggtgttcatgtacggtcttataacccattcgatctctgcttcattttgttccacagttcctaatttcacctggtagagccgcaactcaaatcgaggaccgatttctttaagctcgattgattttggacctccctctcctttatcatagacatgattcctgaatgatatataatcggattgattagaaaaagtaactatacgttttgcatccagttttggagcagggaagatatgtcctaagatgtttcccactctttgacccatctgagtagtaaagctgctaaaaatgagatgaggatattgctcaagcattttttccatggatttcttggctgaaatatcatgtcttggtaccaccttaagtaatccaaaggtttggcagttgggtcccaaatgggggagatggaagagattacatggagaacccttccaaggcc

SEQ ID NO: 126227 - DNA, 509 bp, Arabidopsis thaliana columbia
gttaatttaaatatgccgtacctccaccgaggtggcgggcgctatacaactattggatccccctttttgtattaattcttggtcgtaaatttgtagacaatggcctgcgatatctaaaatttctctattcaaagatggattcaaaaatgcctcttcacttatgcacctaatatcgtgaaacagcttatcaatgattatgtgattaaattgaagccatggaactgtacctgcaccataagctccttgatctaaaagtattttccaccacttggggtaaatctgaactcaacacctatataaggataagtgcaccattgcccacatacctcttctctagaaaaaccacctacagtcttactccctgcatatacgtattactcttatcgtaccaagaaaaattccaagctttatattaacgtgcaacacttgtgttccaattcccttcgtaggtgataggaaattaactcactcggaggaattccttcatgtaaaaaaaccataatctaact

SEQ ID NO: 126228 - DNA, 595 bp, Arabidopsis thaliana columbia
aacaaaccctattaatggtaacaaaacctggagctccaccgcggtggcggccgctctagaactagtggatcccccgttttttttaattcgcggccgcggatttcaaatggcaagagagtattcactacaatgatttttttttacaaaatgttataaaaatctattagtgtcatctttgcatatcctagaatctaaagctaacacataacgcatatatacactgtttttaaaaaccctatataccccctagttaacatccaaattttcgattttccaaattctgaatttccaaacgcaatcaagattcactgtaccagtggaaccataataattgtgaccttgccatgaactcgctgttagttcactctctgatgaacctgaattgcgaagattcttcttaaattgggtttctccattgtcaagcaacatctttctctactgaagaattgttttgtttaaacagaatgatcatactctagtcgacaacctatgtctgggaaaaaggttattcctatccggaaccaacaccttgtaagtttgtaaaattccgtgtcacccagaaacccctgggccatctcgggttcggattatggga

SEQ ID NO: 126229 - DNA, 758 bp, Arabidopsis thaliana columbia
  unsure (1)..(758): unsure at all n locations
ttnnnnnnnnnnnnnnnnnnnnnnnnnnnnnnnnnnnnnnnnnnnnnnnnnnnnnnnnnnnnnnnnnnnnnnnnnnnnnnnnnnntttaattcgcggccgcggcgatggtattccaaaccgttggtgctttcaaggttaaacgcaaaggcggtaaaggcaaactgatatttggatctgtcacagctcaagacctcgtcgacatcatcaaatcacagctccaaaaggacatcgacaaacgccttgtctctctcccagaaatccgtgaaaccggagaatacatagccgaactcaagcttcaccccgatgtcactgctcgagttaagatcaatgttttcgctaactaaaccttcaacgattcaagactcctactgcatcccaaggaacgtatagagagggaaaagagagtagcctcttgtggtgaggattgaaggttgtgaagtttttcctttagattgtttgatgcatttgtatttttgctatttttggaatctggaaacgctaaaaagcggccgcgaattcgcgggcgcttaagaatcaagtactccaacttctcgaattgacttatctattaactcagaaccaaagtctgtaacaaagcaaagcatgacttttcagacagaagttcctgatgatggttctagacagcttctcttcgcttactctgaaaagcaagatgtccggatgggcctgtgggattgatgatctttgaacagtttaacacgctggaataattggtcagacataccaatacactggc

SEQ ID NO: 126230 - DNA, 605 bp, Arabidopsis thaliana columbia
acaaaaccgagccccccccgggggggggcccgctctagacctagtggatcccccgggctgctttttttggggcctccccccctgttgtcaaaaaccttgcaaccggccaatacctcccacagattcgactcggagactcaccggatccagtcaagctcgtagccgatctggccggctcaattctctggtttgattggccctcaagacatgtttcctcgtcaaggaacctaatatccggtagctctagcggctgcttaaaggcaaaagttggaaatgaacgagtatcatcatcatcatcatcgcggaaagaccaaaacgccgattgcgaattacttgtttaaaacgacgcctttgggattacggcgagaggagagcttttcagtgacgtcatgtcggatgggtctgttactttctccggaaccgttgatctacttttcgcttgtactccaccgtggctgttacgtgggctcgctagtggagcccaatggagtatggggcttatgatgggccccaaatttcacttccctttcacaaacttggccgggggaaaacctatacgaaaccgttaattccgggttttaacctgggttttaacccctggttcg

SEQ ID NO: 126231 - DNA, 549 bp, Arabidopsis thaliana columbia
tttcaactcgtggaccccccgggctgcttgtatttgcgcccgcccggcgattatctcccatctagatccgatggcgaaagaaccagttagtgtgctcgttactggagctgcaggacaaatcggatatgctcttgtacctatgattgcaaggggtatcatgcttggtgctgaccaacctgttatcctccacatgttggatattcctccagctgctgaagctttgaacggtgttaagatggagttgatcgatgctgctttccctcttcttaaaggtgttgttgctacaactgatgccgttgagggatgtactggagtcaatgttgctgttatggctggtggtttcccgaggaaagaaagtctggagaggaaggatgtgatgtccaagaatgtttccatctaccagtctcatgctgctgccttggaaaagcatgccgctcctaactgcaagggttcttgttgtggcccaaccccggtaaaccaccaaccgcatttgattcccttaatagggaattttgcaccccattcaattccccctggaaaaaagaaaac

SEQ ID NO: 126232 - DNA, 670 bp, Arabidopsis thaliana columbia
ccctgcaggtcccggtccggatttccggggtgcaacccacgcgtcggggaaaagttctcctttgttgctgtggactccgaccaggagatggaaacctcatagaccagcatctcccatccgagaagaactatgaatcacccgaggggcaaaacatcacaacgggggctgacatagtcagatgcccagaagtcttgttccacccctcgtttgcgggaatggaagctgctggaatccacgagacaacctataactcaatcatgaagtgtgatgtggacatcaggaaggatctgtacggtaacattgagctcagtggtggaaccactatgttctcaggtatcgctgaccgcatgagcaaagaaatcacagcacttgcaccaagcagcatgaagatcaaggtcgatgcaccacctgaaaggaagtacagtgtctggatcggtggctccattcttggctttccttagcacattccagcagatgtggatctccaaggccccatatgatgagggcagtccaggaatcgctcacagaaaatgtatcttaactctcaagataaaaggctaaaaactgggggtttatgaatgggatcaaaagtttctttttgtgctttatattgtgcctctccatttgcttgggctcaatttccccctttttggtctttccacttcctaat

SEQ ID NO: 126233 - DNA, 786 bp, Arabidopsis thaliana columbia
  unsure (1)..(786): unsure at all n locations
aatacgactcactatagggtaaagctggtacgcctgcaggtaccgagtccagaaattcccgggtcgannnnnnnannnnntttttttttttnntnnnnnnaaaataaattaaaggtggtttattaaaagataaaaaaaaatgttataattaaaatgttgaatatagttttttgtgaataaagaaaaagaatatttataaagaatgaggaaaaaatgatgaagtgggcaaacaaaaaaaattgaacttattaactctgacttactgactcaatggtaagaagtactcctttcgaaaaaggatccttggtaattgagtgaacacgattggtacggacacgaaaatcccgaacacaagacgactgaaatggaacttcattttaaatcaacacttctaagattaagaagtgaaaataaaaagaaacccgtcccttatagataaaagattaaaaaaaccattataacaaaaaataaatttttattccaataaaaacccaaaaattaaaagaataaaataaaaactttatcttttaaaacatttaaagggtttaattataaaagcaaaaatctaataaattgtaaaaggtgaacaatacaccataaatagtacaattaatatattatagtctattaacccatatgtataataaaaaaaattgaacaaaattcgattaatataaaaaatacaattatcctattataaaaaaaaacctctttaactcttttctaaaaacacaaaaaacatatgggtgtgggcaaatttttaaaaaataaccaaaatttaaagta

SEQ ID NO: 126234 - DNA, 839 bp, Arabidopsis thaliana columbia
  unsure (1)..(839): unsure at all n locations
nnnnnnnnnnnnnnnnnnnnnnnnnnnnnnnnnnnnnnnnnnnnnnnnnnnnnnnnnnnnnnnnnnnnnnnnnttctgtttaattcgcggccgcatagattactaacagacagatgaagagagatagagatgaagaaaggagatagacctcattatttgtttcttaaacactaagcttatcaatctctctccttagagcattagccctaaccaaacttccaatggtgttcacagccaacttgatatcctccaaaggactacccggcgcaacccgcttgtacagatagctatcgaatgtcatcttctgaacatactcatcattacacatctgcacaaacgcttgtctagccggatttgatctgtaaaacactttctgcaacacatgaagtaccctgtaggtaggcaagtatgtcttatcccatttctccaagtacttcctcaagtccccttcgtcaatcatcttcttaccattctgtgaaccttcgacaatggcttcagcacacattcttccactcttagcagccaaggtgatcccttcaccagaggcatttagtcacataccctgcagcatcacctacaagagccacacgtttcgagagcctacggggctcggatgttcaggaatccgatgagccttcacccggatgatcttcccttcaagaattttggccttagctctgtttcggtccgcgagctgggaacttcttgatggtcacctttgtgggagtcacagttaccctggttccaaacagcttacttgtgttcgcacctttgtgggaaccaccccaacccattagaaaatcccgggggaacccaattatttcttcccaacaattaca

SEQ ID NO: 126235 - DNA, 832 bp, Arabidopsis thaliana columbia
cgactcactatagggaaagctggtccgcctgcaggtcccggtccggatttcccgggtcgacccacgcgtccgctcttttctctccgctctaatcatttctaaatctcagatctctgattccgttaacggggtcgttttccctgttgttaaagaccttccaaccggtcaatacctcgcacagattcgactcggtgactcaccggatccagtcaagctcgtagtcgatctggccggctcaattctctggtttgattgttcctcaagacatgtttcctcgtcaaggaacctaatctccggtagctctagcggctgcttaaaggcaaaagttggaaatgaacgagtatcatcatcatcatcatcgcgtaaagaccaaaacgccgattgcgaattacttgttaaaaacgacgcctttgggattacggcgagaggagagcttttcggtgacgtcatgtcgtttggatctgttacttctccgggaaccgttgatctacttttcgcttgtactccaccgtggctgttacgtgggctcgctagtggagcccaaggagtaatgggcttaggaagggcccaaatctcactcccttcacaactcgccgcggaaactaacgaacgtcgtcggttaacttgttaccttgtcgccattaacggcggtgtatcaaccagttcggtggaggaaggttttggagtggctgcgtctagaacggttgtttacaccgcctttgttaacccggctttgactgggcaccttccctaaattaacggtgaaaaatcgcaatttgaaggtccaccgggggaaaaaagcctcttcccgggggaaagggcccccttgggc

SEQ ID NO: 126236 - DNA, 548 bp, Arabidopsis thaliana columbia
cgggataagctggtccgcctgcaggtcccggcccggaattcccgggtcgacccacgcgtccggtcaacatttttgtattcgatcctgatcccaaagtcgaggccaatcccattctatcacaggcagatgttgtgcaaaatccggctccaaacagcgcattgggccaggacatacacgttgtctttacatcatattgcatggaatggaacatgattaatccctgttgtcgatctctctggtcacaaacggaagctgtctgagatccccaatggtcatgagaatgctaacgggactcatgtcttcctgtacttactgaatcacctacctgtaactgatatgcctacacatgatcttctaatggtccgtcaactagagcgtaaatggcacacccctggacgagatgagagtgaatttcatccggaaccctcttttgaggtgtcataaatggacataactcttgctgatcctgagagaaacagtttccttaccggaaattgtggtctgattgggggcgagtgttcatggggattggaacccgggctaattgc

SEQ ID NO: 126237 - DNA, 761 bp, Arabidopsis thaliana columbia
tgaccaattttagggaaagctggtccgcctgcaggtcccggtccggatttcccgggtcgacccacgcgtccgggctgttgttcccttctccaagaaggattggtatgacgtgaaggctcctggttctttcacgaacaggaatgttgggaagactcttgtttccaggactcagggtaccaagattgcctctgagggactgaaacacagggtgtttgaggtttctcttgctgatctacaaaatgatgaggataatgcctacaggaagatccgtcttagagctgaagatgttcagggaaggaatgtgttgacccagttctggggtatggatttcacaaccgacaagctaaggtcattggtgaagaagtggcagactttgattgaagcccatgtcgatgtgaaaaccacagacggctacaccttgaggatgttctgcatcgccttcacaaagagacgtgctaaccaagtgaagcgtacctgttacgctcaatccatccaaatccgtcagatccgcaaaaagatgaatgagattatggtgaaggaggcttcatcttgtgacctcaaggagctagtggccaagttcattccagaagccattggaagagagattgagaaggcaacacaggggcatctaccccgtggcagaaatgttgttcaatcccgtaaaggtgaaagattccttaaaaggcttccccaaagtttttggaccccttggggaaaagcctccatttgggaaggtggcccttggggaggaattatccccc

SEQ ID NO: 126238 - DNA, 593 bp, Arabidopsis thaliana columbia
agtgaaacgcgcccgccaccgggcccgattccctaggtccacccacgcccacgaccaacttttttctttttaaccgccaccagaaactacttagacagatctggctcctatcattgcacaaaaatggcttgtgactctacttcctgcagcgatctatatctatacggtacagtcgagtacaggactctccttcggctctcaatgggcctagcacatgatctcgtaactatatggattgggtgggcatggccctaaagatgaagccgcactgtaagctcaaggatcgctgttatattacctgctgaagggcctgactcagttttagccctctatacgtcatcgcccttgagcccaagcctgggtttgccaggacctaaaggccttccgatgtttccactttgcgagtgacactctcttcttctgggcacgggacaatcggccccgtggagaaacggcaccctatacgcacgccctaatcgcgttaccctcggcgtggtctaactatggggagtgatcccacatccctcatagacatctctgaaacaatcgccattcatacgttagtgtccccaccatctgtgtagtgcacactt

SEQ ID NO: 126239 - DNA, 584 bp, Arabidopsis thaliana columbia
aatacgacccactatagggtaagctggcacgcctgcaggtaccggtccggaattcccgggtcgacaacgccgacgaggctctatttccgggcatgaccgcctggttgcaactcaccaccgccagcaaagcatttccaatggctagccacctaaggagcatcttctcctccgcttctctttctcagcgtgtcgccgtcccgaagggcatctccggtgctcctttcggtgtttctccgaccaaaagagtctcttccttcactgtccgagctgttaaatccgacaagacaacattccaagtacttcaaccaatcaacggtgatccattcatcggaagtttggaaactccggtgacatctagcccattgatcgcgtggtacctttccaacctccctggataccgtaccgtcgtcaaccctctcctccgcggtgtggaactggggctgggccatggcttgttcctagtgggcccattcctcaaagccggcccattaagggacatctgcttcccccggggcaacccggggcttttagccggaggctggggcttgctaagtcactccccaagcattgtggcccctcaccca

SEQ ID NO: 126240 - DNA, 782 bp, Arabidopsis thaliana columbia
  unsure (1)..(782): unsure at all n locations
nnnnnnnnnnnnnnnnnnnnnnnnnnnnnnnnnnnnnnnnnnnnnnnnnnnnnnnnnnnnnnccacgcgtccggtttaaagagtgagagagaaagaaagagagaagatgaaggtacaggagggtttgttcgtggtggctgttttctaccttgcttatacgcagctagtcaaggggcaacctcgcaaggagtgccaaactagatgtggcaatgtcgcagttgagtacccttttggtacttctccaggttgttactatcccggagatgaaagtttcaatcttacttgcaacgagcaagagaagctcttctttggcaacatgccagtcatcaacatgtctctcagcggccagcttcgtgttcggctagttagatccagagtttgctacgatagtcaaggaaaacagactgactacattgcccggcggaccaccctgngtaatttcactctctctgaacttaacagatttactgtagtaggttgtaacagttacgcatttctccgcacatctggaggtgaaaaatactcaactggatgcatatcaatatgtgattcttgcccaacgaaaaaccgatcatgttctggtgaaggttgcttgcagaaccctgtccctgaagatacttttttgtcagagttaaaccacatagctttcacaaccattcctctgtgcctctggttaatccttgcacctacgcccttctcgttgaaaatgggatgtttgacctccatgccttggaagaactcaacattctgggaaatggttctaccttcccccggaaaaccta

SEQ ID NO: 126241 - DNA, 349 bp, Arabidopsis thaliana columbia
ctgccttggtagacctggagtgagtgagataaattttttagagtacagcggggcataaatgttaaacggacgatgataatggtaaggaatccaggaagataaaggagtaagggtttactcgatttaaagatgagtgaatgataagtggatacattgcatattatgaagttgatcaggatgtgggatacttgaatgcgactaactaattgaacagaaatataggccttattcttatgatggaacgataggttttacgactccttgaaagtgtaaagagttatagattatttagacgtatttttcaattggttagttaaccgggtaaaagagagttaggttttcatgtgta

SEQ ID NO: 126242 - DNA, 184 bp, Arabidopsis thaliana columbia
ttggttaaatgacccctttccaactcgcaaaccatcatctgtgtggatcaaccctggaacacaattctcttttttatggaacaaaaacaaatatcagcaacggttgcgtggtgtcccgaatgacaactaacgcaccacccaatttctcattaataaacctatgcaactagtaggcaatataaca

SEQ ID NO: 126243 - DNA, 673 bp, Arabidopsis thaliana columbia
aaccacttttagggaaggctggtccgcctgcaggtcccggtccggatttccggggtcgacccacgcgtccgagggttttttttgtcgcacgaggaggaaaaatgccagcgggtcatggagttcgggcgagaacgagggatctgttcgcgaggccattcaggaagaagggttacattccactctcgacttacctgagaaccttcaaggtcggcgattacgtcgatgtgaaggtgaatggtgcgatccacaagggtatgcctcacaagttctaccacggtcgtactggtcgtatctggaacgtcactaaacgcgccgtcggtgttgaagtcaacaaacagattggcaacaggatcataaggaagaggattcatgtgcgtgtggagcatgtgcagcaatcaagatgtgctgaggagttcaagctgaggaagaagaagaatgatgagctcaaggctgcagcccaagccaatggtgagaccatcagcaccaagagacatgctaaggaccccaaccaggattcatgggcgaagaatgaccctgagactgcactccatccgtcgatgtcgcacgatctcaggagctatagtctatctccaggtttgcagtgtgctcgtttagttctttctgtgctactcaatttgagatctcaattttatgaacaaactttatctgttta

SEQ ID NO: 126244 - DNA, 770 bp, Arabidopsis thaliana columbia
tccaaccacttatagggaagagctggtccgcctgcgggtccgggtccggaattccggggccgacccacgcgtccgacagtccttttctctaacctgaatgcagatagtattgatgaagataagctattcaatctattttctctttacgggaacattgtaaggattaagcttcttcggaacaaacctgaccatgcccttgtccaaatgggcgatggtttccaagctgaacttgcagtacatttcctcaagggagcaatgctgtttggtaagcggttagaagtaaacttctcaaagcatccaaatataacaccaggcacagactctcatgattatgtaaactctaacctgaaccgcttcaaccgcaatgctgcaaagaattaccgctattgctgctcccctacaaagatgattcacttatcgactcttcctcaagacgtgacagaggaggaagtgatgaaccatgtccaagaacacggtgcagtagtgaacacaaaagtgtttgagatgaacgggaaaaaacaagctctggttcagtttgagaacgaggaggaagctgcggaagcattggtatgcaagcccgcgacttctctaagcggatcaattatcagaatttccctcttcccactccagacgatttaaaatcacgaaaagacctctcggaatctctctccctttgcctatgtccctttcccccaaataacactatggggttgtgtgaaggattttaccgaaaggtattggttgctttttaaaccttaaaaaacctcttc

SEQ ID NO: 126245 - DNA, 788 bp, Arabidopsis thaliana columbia
tacacgtgcagtcccggtccggaatctccgtgtcgacccagcgtccgctatgtttttttgtttgtttacaatacccacactctggttggctctgtgtgttcttgctcttagggcttctctcggcccttgacttgaagggtatagaagcagaaagtcttaccatacagaaactggactctaagacactcccaggatgagattgtgaataaagtcaactaaaacccaaacgctggatggaaagctgctataaatgatcgattttcaaacgccactggtgcagagtttaagcgccttctcggtgttaaaccaacaccaaacaagcactacttaggtgttcctattgcgagccatgatccatctttaaagctacctaaagcttttgatgctagaactgcttggccacagtgctctcggattggaaacatctaaggtttggttttatgctcttagctttttccttacaattttagtggtccactgcatttcgaattaactcttgggttttgtgtgcgtgggttgcctgctctatgaaccgatcaggtaacatcactcaatcgtttgtgtatcttgcaactcctatatgtgccctaaggaataaaaggcttcatgagattctgtgggttctgcttacgggacattctggaccttgctgcgcatttcagtgctggcgaatccctattcatatagtatcctgccctccacttgggcatccaccaatggctttacaacgtaaatgagagcccctaactttgccgtgggccctcccgcttcccgtgcattggctgcga

SEQ ID NO: 126246 - DNA, 698 bp, Arabidopsis thaliana columbia
tcgaaacaacccacttttggtgagcatgaagctgcccctcgaccgggtggcggacgctgtatacccccaggcgcccgcggcttttttgcttctgctaaataacttctctccaagctcgtcctgggcaactggagataggggctaaacaagtcaaaaagcgtccgctatggaaggccgaaacaaacggaatttggatcttccccaggtggctacgggcttgactgttacactgcgctgggaggcctgacacagcgtacaaggcgtgtgcaggtgtcaaaaagcagctctcactcaacgaggctgacgaaattacccctgcacaccagataatgctgcactgaggcgctgatgaccttgatacggcggagatagttgtgggattagaggaagagtttgggattgaattggcggaggtcaaagcacagtctaatcgccccgctgagcacccatttgtactcatggaggagctatcgctggaaaatgcacggccggaaaatccttgacttcattagcaaaatcaaaaaacaccggcgctcaaagcaacttctttcgaataatgaggttaagcttgagaggcaaggggcctcccttcagaaaaaatctattgcctcggtttttcccggtttattctcatgaagcctaggggcatggggccatctcataaaaaaattttaaacttgtgtccaccaccgggaaaa

SEQ ID NO: 126247 - DNA, 968 bp, Arabidopsis thaliana columbia
  unsure (1)..(968): unsure at all n locations
cccgggttggggtaagggggaacccggcccccgggggggggggggnngnaaaaaaaaggaggaagagccggggcggcattataaattttgggcggggcccaaacggggggccgacaaggggggggggaaaccaacaaggaaacagaaggaacgccgccgggacaaaagaaaagccctagacaaaaaaagggacggaggcagggcagggaccagaaaacgagaagacaaggaagggaggcgaaggcaccacgaggaacaggaaaccacagggagggggagaaacgggccccagaggggggaacacacgacaagggggaagaagggaaaaaggcaaccaaaaagagccaggagaaagagaacgggaaacaaaaagacgggggcaggagggccacgggggagaaggagggagaaagagccagaaggaaaaagggagccgagagccgggaaggaaaggacgacgtgaacggcagaaaccaacaaaggggcgggcagaaaaaggagggacccaagggaaggaaccaaagggcaccgaggggaagagggacaacccgggcccaaggagacaagggcggaaggagcagaggacagacaggggcccagaaagagcccaaggggcgggacacgaggggggagggggaccaagcaaaagcaagaaaaggggccaagcagccaggcgccccaaaggaaaacgtgcccgagaccaaaaaaaggaaaaggggacccccgcgaagcgaaacggccaagcgggggggcacccgcggaagacagggggggccgaaggccagggacaaggagaaagggggggcaggagaaagcccggggaagaaaaaagcacccagggaacgaggagaaagcaagcgagagaacaaaacaacgacgggcacagagagaaagacacggaagaagggggggaaaacacagaaagggggagaagaaagaacacggacagggagcgaaaaagaaggacc

SEQ ID NO: 126248 - DNA, 737 bp, Arabidopsis thaliana columbia
  unsure (1)..(737): unsure at all n locations
aactaaagctggacctccaccgcggtggcggccgctctagaactagtggatcccccgggctgcttgaattcgcggccgcgggagatcagatagtgatggcgtcgaatcaaagatgcatattatggatgttttcctttgggggaaatgcttaagtgaagaagaggccgcttctttgcatgcagccattggcatggctgacttagacatgattgatttgtctgatgacaattggcaatggacggattcaccccccagagtcgatggttgggatagtgatcctgccgatgttgatctctatgatagggatgacgtagattgggatggacaatattccagtgggaggaaaagaagatcaggtcgggattttgtaatgagtgtcgattcctttgccaggagacacaggaaacccaggatggagacacaagaagatataaatcaaagaatgcgttcagttgagttggctgtcaaagaagctctctctgcacgaggtgataagcaatttactgaccaggaatttcctccaaatgatcgctctttatttgtggatacacaaaatcccccatcaaaattgcaggttgtttctgaatggatgagacctgactccattgtgaaagaaaacggtagtgattcccgtccctgcctgttctctggggatgcanatccttcagattgttgccagggggcgtttgggggattgttggttcttaaaccgcggttgccgttttgacagaagtttc

SEQ ID NO: 126249 - DNA, 1095 bp, Arabidopsis thaliana columbia
cccccccgcggccggcgagccgccctgagaacatagtaggaccccccgggacggtatgtaattttgacggcaccgcctatcaccaagggggacccagcttggggggcaggggcaaaccagtccgagaaacaggaagacatgacgcgctggactagacttcatctcatagctgacgctttaggaataaacaggaccagctacatagacgaacacacacatgctaagtagctgaaaccgccgaagagaggggtccacacgtaggtcgagaaacgggcctacgaggacccccaaaaccaacatggccaaagaagaaaaatgtccttgaacccccctaagcacataggaaaaacggaccccccagggggagatttccggagcgaaccccacaacctaacccaaaattggaagaaaaaaacgccctacccttggtagaattgtggaggtccccgggcgggagcacttaaaaagccccagtccggtataacgggcccttcacctcaatcaactgggcgaagaccctaaatgcacccctccccgggggcacaagaaccccaaggccctcctcagagaaaaaccggaacagcaggggcctccccgcgaaccggcgcatccggcagccccagggtcagcacttaaagctagaggcccacccctaacaaccacacgagcctacacactaagggcggctagggatggctacaggaacgggcccatcggcggaaaaaccagtcacttctggtacacccccaaatcgctactcacagcagaaaattcttaacccccactatctgtaccacagggaaaaaatcgggactcaaaccaggcagctctctgaacggaactttaaacggcctgggcacacaccaataggaaaaacgggaatcctggtcacccacccaccagggccattcgaaacacagcaatccttttagctggggtgaaacacatacctcccagggcatccatgcccaggctcacacgcgggcaccagggcactcgaaacacaaacaacattaaggggcccggaagagctcaaccgtaccgagaaggcaacctcaaacggtccaccccgggcacccgggaactccaaaaaac

SEQ ID NO: 126250 - DNA, 512 bp, Arabidopsis thaliana columbia
aaccctttttaaagtgagcaaaacctggacctccaccgcggtggcggctcgatctagagcatccccagggctggtttaattgtagtccgggccatccacgagcttactgggggatgagtctgcacagtacccgagaggtagatgttatcatatatatacacacttaatatttctacgagctgattaccaaaaccctacgcaagaaaaatctgaacaaaatcagatgttctttcttttttcaccaatgctgtgttaaatctcccctaaccggggaggcgaaaggggacattggaagggatgagaactcaaaaatcaaaactttaacttgagctggtcgtagggctagtgccaaaggttggaagatggtgcaactgaagctggcttttgttgagaagctccttcagcccaagaactcctaggaaattggggaatatgggcttggccactttgttttttcaccagttcccttttaaaaggcgttcctggcccaataacaaagtataaaatggggc

SEQ ID NO: 126251 - DNA, 1097 bp, Arabidopsis thaliana columbia
aaccggggccgggggttttgggtgtttgagaagaaaaacccgggggcccaggaaaaagagggagaagggggggaaggaatattacaagcataggagggaagggaaagcggttttttttttttaagaaggaggagagaaaagaaaaaaaagagagggggggggtttgaaagaaggaaagggggggtaataaatggagtattggttgatttattaatgtattgttaaatagaagtgtggattgatattgagataattgagtgggagtagaagttgtagtgggtggggtattgaaaagggaagggatgaagtgggggatttgatttaaaatagagatgaatggtatggattggtgtgagggaaaaaggtttgttgaagaattttaatattgtttgtgtttatatttggggtgttgtatgaggggaggatagtgatgtattagaaaggtagtatatgggaggggagaatattatgaatgtgatttggaatggggaggagtaagagattttgatgggggtaagatatgatagggttggttggttagggttattagttaatatgggaggtgggtatttaagtagaaatatagggaagttagtagatagattaatgagggttggagtgatattataggaggttgtgttgagtttaattagggatgggtgattagggtagtagatattattgtaggggaagttaatattggatagaagggttgatagaattgtatttaaggtgggaaataattgaaaggtgtgttattggtaaaaaatgtgggaataatataagtatcggatatgagtgttgtattatgggtaggatatttttgtgggatttttgaaaaatatttaattagtatgatagatgatagagtatttgtgggatagttggattaagtttgttgtttgctttgttgtaaggtagagggaggttatgtaggatttatgttatggttggatggtgagagaagataggagttagttatgtgggggtagatagtggtggttatatgtagttggaatggttggagtggttgtggaaattaggaagatgtaggtgatgtgggattaaggaggaggagggtttgattatggtgtggt

SEQ ID NO: 126252 - DNA, 693 bp, Arabidopsis thaliana columbia
  unsure (1)..(693): unsure at all n locations
tnnnnnnnnnnnnnnnnnnnnnnnnnnnnnnnnnnnnnnnnnnnnnnnnnnnnnnnnnnnnnnnnnnnnccacgcgtccggagaacctatataagaagagaagagaaagagagatcagaaatgtcggtgacatcaacggtggaggagaaccaccagaaaaatccatcaacgccggcggcggtggaggaggagaagaagaagaggagatgggtgttttgggatagaaggtggaggagattacattatgtgaaattctcagcttctttcactgttcattctcttgctctcttggctccgttttatttcacttggtcggctctttgggttacgtttttgttttacaccatcggtggtcttggtatcaccgtctcttatcatcccaacttggcttaacggagtttcaaagtccctaaatggcttgagtatctcttagcctattgtgcccttctcgctattcagggagatccgattgattgggtgagtacacatcgattccattaccagttcacggattcaaaacgtgatccccattggtccaaggaaagttttttggattagtcattcttctttggaatctatggcttttgtccattcctgtttcaaaagggggggaaacaagaagccaaccgtggaggaatttgaaaaagggcattgggtttttttttgggtattttttcaaaaaaagaccagggg

SEQ ID NO: 126253 - DNA, 734 bp, Arabidopsis thaliana columbia
ctatagggtatagctggtacgcctgcaggtcccggtccggaattcccgggtcgacccacgcgtccgctccagacaatgttttcacttggaagatacttcgtttctctaccttggaagataaattctattactctgatgattttcttgttggagaccgatactggagactaggatttaacccgaaaggatctggtggaggaagaccacatgcacttccaatcttcctatatgctcaaggccataaggcaaacgcagttgttacaaacacttggggagcggttaatctgcggttaaagaatcaacgaagctccaaccacaaacaattatattctgcagcttggtacccgattcgaagcgattatggtgtgggagtgaacaatataatattgatgtctgagctgaaagatgcatcaaaagggtatatggtgaatgatgccattatctttgaagctgaaatggttaaggtctctgtgacaaacatagtctccgtttaaatatcactacttctttttaacaacaaccttacgaataaagaggactttgatgagtttaatttggtatacgacaacgttgttgatgcttgtgatgtaatcgggtgtttctggtcctccgggttttccgtttaaccttttttttttcatggttttggctattcaaatgaaaataaaagggttttaaaaacttcttctttgggggttttttaaaagggtaaaacctaaataaaaatggggggt

SEQ ID NO: 126254 - DNA, 720 bp, Arabidopsis thaliana columbia
  unsure (1)..(720): unsure at all n locations
gacccactttagggttagctggtacgcctgcaggtaccggtccggaattcccgggtcgacccacgcgtccggactcttttattaaagccggaaaatgggagaggagcaagtacgtcggtgtatctctcgtcggaaaaaccttggccgtgatgggtttcgggaaagttgggacggaggtggcgagaagagccaaaggtctaggcatgaccgttatctcccacgacccttacgcgccagctgacagagccagagctctcggtgtcgatcttgtttcattcgatcaagctatctccaccgccgatttcgtctccctgcacatgcctttaactccggccaccaaaaaggtcttcaacgacgaaactttctctaagatgaagaaaggtgtgcgtctcattaatgtcgctagaggtggcgtcatcgacgaggatgcactcgttagagctctcgatgccggaatcgttgctcaggcagcattagatgtgttctgtgaggaaccaccatcgaaagatagcagactaattcagcatgaaaatgttactgtgacacctcatcttggagctagcacaaaagaagctcaggaaggtgtagccattggagatagccgaaggctgttgcanggggcattggaaagggagagttaatcaacctccttgcccgtcaatggcttcaaatgggtgggcttcctggaagggcctgggcctgaagtttggacctcccttt

SEQ ID NO: 126255 - DNA, 474 bp, Arabidopsis thaliana columbia
tagcggaacctggacctccaccgcggtggcggccgctctagaactagtggatcccccggtttgcttgaattcgcggccgccaagaatctaaaccaaatctctcatcctctcttctatgtcccaaaacaggaacataactactactactaccatgtcttgactctgttgagaatcttaaatcctacctaacctccaatgggtaagaagagcggttcttcttcttcttggctcactgccgtgaaacgagctttccgatctcccaccgggaaagaacacaacaacaatgctgatggtaatgaagtcgacgaagatgaagacaagaagaaagagaagagacgttggttatttagaaaatctacgaatcatgactctccggtgaagacctccggcgtcggaaaagacgctccggcgcagaaatccacagaaacaacgacgatcatcaacccaaccgtgttatcctctgttacagaacag

SEQ ID NO: 126256 - DNA, 670 bp, Arabidopsis thaliana columbia
taacggaagccggagctccaccgcggtggcggccgctctagaactagtggatcccccggtctgttgaattcgcggccgcatacagacttttctgatagtttatgagtttcaaaagtgaacttcttctatcattactaacgcttctgtaatcataacccgaacataattcactttcaccactgacgttaacttgccaaaatgtaaatcaagaggctcttgccgaagaagacttgccccggaaaccaacaacacttagtttctgtcctggtcttctatctgaacccgtcttccccctcgcagcaatcgatctggatccaaccgcttttaatatttttctttttggctttgaagatttctctggaggagatgatgcttttcttggtttcgaaaacgaacttgaacttgactttctcacgggtgtctttccacctgtcgatcttgcacgaggagatgatgataaatggttgtctctggaggttcaatgcttgctcacttttctgatctgcttaacgcttctttctttctcttgagtgatatgggattttggcggcgtctcttcctacattatcagtccgtgaggggattcctaaagcttctcggtgggttacttaattggtgttctttcaaattccggggccgggcttaacccaatttgggggcccctttccct

SEQ ID NO: 126257 - DNA, 756 bp, Arabidopsis thaliana columbia
  unsure (1)..(756): unsure at all n locations
nnnnnnnnnnnnnnnnnnnnnnnnnnnnnnnnnnnnnnnnnnnnnnnnnnnnnnnnnnnnnnnnnnnnnnnnnnnnnnnnnnnnnnnnnnnnncggccgcatagatattaagtaggtttaaacaattatgaatctatgaaaaatgcgtatgtcgagtctttctaatacaaaacttcatacaaataatgaccaaagagaatataaaatagtcaattatgaaaatattcaaatgataagcagacaagtaggtgactcagcgcattaagcaacccaaggacaaaatgggaactatatattatttcccttttcttcaccactctccttccgatacccaaaaccggaaccaatgacaacgcataccaatggcgcattctcatacttttccgattttaccctttagttttcccacaattctcgattagaccatttctctccgccgccgaaacctacggagaaggaagagaaaaaccatggaatcgtctccggtaaactgtcttccacctgattctctccaccagatcttctcatctcttcctattcgtgatatcatgatctgcagatccgtctgcaagttcttcaaccagcttttgacctctcagtgtttcatagagattatctcaactcgtccgccgttgaatctactcgctctccgacctcctcatcaccaccacagtcaccgtcacagcggaaacggacacgcaacgaatatccgaccgtacattcatgtatatgatccagagcagaatcaatgttcag

SEQ ID NO: 126258 - DNA, 626 bp, Arabidopsis thaliana columbia
  unsure (1)..(626): unsure at all n locations
taacataagctggacctccaccgcgggggcggccgctctagaactagtggatcccccgggctgcattaattcgcggccgcgaaaattctgacgaataaaaaccatatctaccaatcacaaaccctagatttttgttatcttcttcatccgaagattctctttgatctgtgtctccttccttctgattctcccatttcatttcattgattcttttgattcgattctattcgagctcaattttgtagatcagaacccagaatcgaatttgggataacttgaacaatatccttggtaacttgttgatctgaatttgagtgaagaagacatcgaattcaagtttggtgtgggagattttttttaatggagtgatgatgatttaaaggggaaggtaaagggaacgatgactggattgggtgttcgatccagtagctatggttccttggagaagacgggacttaacggcgtcgttttacctatccagatcactaccacgacgcgtaccaaacccatctagatgcagaaagatagagaaggattgtacattgnattctgcaattccctggtcgtaagaaggtggcatgttgcttctcttcttaatnnctcgcgtcgcttccttcgcgttcttt

SEQ ID NO: 126259 - DNA, 710 bp, Arabidopsis thaliana columbia
  unsure (1)..(710): unsure at all n locations
aactttagctgaacctccacctcggtggcggccgctctagaactagtggatcccccgggctgcatgtaattctcggccgcnnaaaaaaaaaaaaaaaaaaaaaaaaaaaaaaaaaaaaaaaaaaaaaaaaaaaaaaaaaaaaaaaaaaaaaaaaaggcggccgcaaaaaaattttcttgttgaggccattggagtttataaacttgtagtacatttcacaaaaccaaacgtactggattacaccccaacaaaagtgaaaattttttaaacaagggacacacccttttttaataaataaaatcaatctggggttcacacaaattttacaaacaacaacataggtgttgatgttaatgttgtaaaacctactgatctggaagtttttttttcaggtatttcaacacagcttttgttcctttttttaaaattggcctcctgatactttttaatgggttcccgtcaagtcgtaaaacctcaagtgtaggctcaagcaaacccaattttggaggaagacttgaaatgttgttgttggatttgtctaaatgtttgagtgaagtcatgttcttttataccccttggggaattcaattgaagttgaatttttggttttaaaggttaaagaaataattccaggttttaatatataaatttggagggtatttttttttttagggggaacttttaaataatataaccttgggatattttcc

SEQ ID NO: 126260 - DNA, 793 bp, Arabidopsis thaliana columbia
  unsure (1)..(793): unsure at all n locations
aaccttcnnnnnnnnnnnnnnnnnnnnnnnnnnnnnnnnnnnnnnnnnnnnnnnnnnnnnnnnnnnnnnnnnnnnnnnnnnnttcgcggccgcctatgatagttgttggttcaaaaacacaagaaagagaccatgaatgaaaccctctttctccaaaaacaacccaattctgtggattttttttacttgcggtggagactcgacagcttaccgagtttcatcttccaaagcacggaatccagcattgagatcgtcgtacaatttcttgaatttttccaccagtgtatcctccccttctgctgggtcttcgaacttctgagacactaaacggtagaaaagatctcctaagcgatgcttgataagagtgtaggtaatcttttgaccgtccattccagctgctctctcaaccgcctggttggctaggttgtagaaatggataatgttacgcatcatccacacggacttgtagaaaggacagaatttgtcatatggtgtaaacgcgttttgagcaaggtaatcttccctcaatagcttagctgtttccaatgtgattttgtccccttctgctagcgcatcttttcctacaagctggacaatttcattaagatcgtcttccctctgcaacacctctctggccttttgtccttgatgttgatgaaaatcttggaatcgaacttcttatagaaaagaattccagtggcccggtgaaatacctttgaggtaaagaaaatcaacccaaatttacaagaagggaaaaaaagggttttcttctgggggcaaggctttttttgtt

SEQ ID NO: 126261 - DNA, 811 bp, Arabidopsis thaliana columbia
  unsure (1)..(811): unsure at all n locations
nnnnnnnnnnnnnnnnnnnnnnnnnnnnnnnnnnnnnnnnnnnnnnnnnnnnnnnnnnnnnnnnnnnnnnnnnnnnnnnnnnnnnnnnnnnnncggccgccaggctatcccactaatcttattacacaaagtgaatgaattaaacagaaaaaaaaaaatagaggccgtatcaacacctcacatcagtggtaacaaataagacgactggatcagaaaactagtttgattcacattttatactgccgacagttaggacttaagaccgtatctgaagttgaagttgaattcggctcttgaaaccgacgagccagtaatgaagccaaaacttgaagaaacgaatcattcgcagttctcaatcaatggaagaagctgattccacgctcctatctgatttcaatctaatcccattcaacaacagtaacttcacatcattcttattcaaccctttcgagcatgttctgagaccttatatgcttctgaagaaacgttacccatccacaaaccagggaaaagaacatcgagctgcttctgcacgttcttggctctcttctttggtcttctactaggttttgatccagtcaacgcgtagatatctttatctatctccagctttgagagcgatatcgataacctcggtttcttcttcttttctttttcgtggtcgcccttcttaaccatctaacacccgttcccttggatcgtaatttgaccttttggttcttaacccgtttccccaagaagaattttatatttctcccggggttaaaagccaccccgggttaacaaggcttcttttcaaaatacccccccc

SEQ ID NO: 126262 - DNA, 844 bp, Arabidopsis thaliana columbia
aacaaaagcggacctccccgggtggcggcgctctagaactagtggatcccccgttctttttatattcgcggccgcgtttgctgagagtacatggcaatctgctgataggtttagatgtattaacgttgggttaatggtacagtcgaaacctattgagatggattcagatatgactgataaagagaagcttgagtattacaggagtttggagaaggattacaagaggagaattgatagggcacggccttgtttgttgcctgcacctgtgtatggtgaggttatgcagatgttgagggatcaagggaaagtgagtgctcaggctgttgctaaggattagggaccgtgttcacaaatggaatcatgatgataggtatgcttgggctcaaccagtgaattgtgggatattgattactaaagaggctgtatgtgaagttgtggaaggtgatataactcagctagatattccgtttcaagaataagcttggtaatgtggctgaaggaaatactcaagttcctgcggtgcgcagggaattgtctaaacattttcaacaaaggctatgttttttaacatttgaaagctggggaaaaaaagcctctccaataaaacatccaatttttattggggggcccggggcctctctaccacctttgtaggttccaattcccaccggcctcctcagttggaaaataatcataattggaagcgggggggccaattacatattagtttggaataaatacaacagcctttatttcgggaggtcttgggcatgccaaataatcttcaaacctcgtatagtttttacttttcccatacatatgggggggtcatttgggctttccc

SEQ ID NO: 126263 - DNA, 792 bp, Arabidopsis thaliana columbia
aaccctcatttagtgtagcagaagctgccacctccaccgcggtgggggctcgatctagaactagtggatcccccggtttgtttgaattcgcggccgcaatatatactagtatcacttccatatacaaaatcgttgaatattctatcgtatacatactctaacacagatcatatacacgccctctatattttgttgttgttttaaccctaaaatcgtataagaaaaaaaaagcgtgagacagccttaaacgcgtttgcgactcgcgtagcttttgcccacatagtgatcataactactattgctctgattaatactcccaccactagagcttttaccgcgcagtaaatatgacagcgcgctacacagaaacgattttcttcgacgcggcgtaacggctatcacgtgactagcatgtggtgctcgggacttcttaatgacaagacctctaacttcttccggcggcttataatgcctaatcaacgggcacttgatttcatcaaaaaacggatgacgtttgatatcttgcgcacccctggcgcatcctagccttttccttgggttcttaacccaaaagctctcaatcaagtccctagcttcatctaaatcaccggccatatgggaaactcgcggtctttagggggtcgaaactttatttcggaaagggttggctcttttactctctccccttaaaaacggcggttgtaccccgtaaaaataaaacttggtaaaaagggaatattttccgggaacgccccaacccagtctaacttccggttttcccggggtccggtt

SEQ ID NO: 126264 - DNA, 755 bp, Arabidopsis thaliana columbia
  unsure (1)..(755): unsure at all n locations
tannnnnnnnnnnnnnnnnnnnnnnnnnnnnnnnnnnnnnnnnnnnnnnnnnnnnnnnnnnnnnnnnnnnnnnnnnnnnnnnncggccgcgatcatttcatgtatataggaattgttagaaccctataaataccaagaaggaaacaaataaaagcaaggccaatatgaaacatttttctcttgaaacctaagaagtcatcacgattttctgtaatttcccaaaaacacagagttttggatccatctagctagatagcttccggatcagtattccttgtctctacaaaatgatcactcacaatgtagaattgtcccaggtggtacctagcgacacaccgtgcttctttatgatcttcaccgcctcaagaaggacctcttgttgtgtattgtatagctcctcttttccctgagacaaatgaagcttcaggtgtcattgacaagctttggcctggctgttttaggatcaatttcaaccctgagaccaatttcacggagttgaggcacatccacagagcctttaatctccaactcagccactacttcctgggtttcagggttcccttccagtaaatttcttatacaccacaagccccattctctcaagaacgggttctcatcatcggtcacacactgctgcagcattaaaaagagcccatctctctccctgatctcatcttgtacctattttttttctgtacgcgcagttcccaatcaccgacacaatatctcttctgaatcctttgtaaggacacggc

SEQ ID NO: 126265 - DNA, 797 bp, Arabidopsis thaliana columbia
  unsure (1)..(797): unsure at all n locations
gtgacatggatagattggttcagtagtgtcactctcccaatcctctccaagggaggggggggacactttgaaagcccctttggatttaggaccnaacccaggtttttggttttaagngagacccgcaccggggggggggggggtctgaatctagagtatcccccgggctggattaattgaaggccgggacaattctgacgaataaaaaccatatctaccaatcacaaaccctagatgtttgttatcttcttcatccgaagattctctttgatctgtgtctccttccttctgattctcccatttcatttcattgattcttttgattcgattctattcgagctcaattttgtagatcagaacccagaatcgaaattgggataacttggacaatatgcttggtaacttgttgatctgaatttgagtgaagaagacatcgaattcaagtttggtgtgggagattgtttttaatggagtgatgatgatttaaaggggaagggaaagggaacgatgactggattgggtgttcgatccagtagctatggttccttggagaagacggtacttaacggcgtcgttttacctatccagatcactaccacgacgcgttccaaaccatttgagatgccgaaaagattgaaaagggggtttgggcccttggggccccgcgggaacccttcccccccatttggtttgttaagaaaagggggtcccaaaccaggtttggggagggaccttggtgcgtttccccaggggaaacctccgctcttttttaataccaggccaggaattggggctaa

SEQ ID NO: 126266 - DNA, 705 bp, Arabidopsis thaliana columbia
gactggccgtccgggggaccggttgggataacctagacatcgaattggcggccgcaaaaaacatagaactaaatgaagggatgtttcttactaggaaggctcaaactccccgaacgacataagacattgcagacggcgtgaaaacaaagaacgctataagtagcaaactgacgtaggggaattcaaaacatgagtagtgacaagaaagcaacgagaggttggtatgatgtggctaaagcttttggatgtcttatggaccgagacgataaggaccatcacgcatgtaatgaccatccatgtacagaactgcgtggtgcgggtgctgcacgaccatccatcaccatgaactgcatgtcttcagatggcttccagcgacgctgactttggtatatgaaccaatggttgatgtgtttatgatctaaccccggtgattgcgccaacgctaccttctctgactcataaggatatggccacttgtaatgcaactcccaccacgtgagaagctgatgccgagcttttttaggaagtgcacctttcttttactgtcaggatggctcttgcttcaaactgctcaagtatccactatacttcttcagcaaatggttcttgagaatccgatctttcggcctcgagctaatttcgggaaatctgattcccctcgatgatgtccactggacgtcgaatgatgatcccatattgtcactc

SEQ ID NO: 126267 - DNA, 800 bp, Arabidopsis thaliana columbia
ccactaaccggagcagatgctggagctccaccggggcggcggtcgctctataactagtggaccccccgggctgcatgaattctttgccgcttccttgactaattctatatacctagttcgtattttcttcctcacatatatctttttcaatttatccggatattctttgggtgcaacttcacctcacaaaattcactctctattcttatattaatccgagttaggcctttttgatttcatagatgagccgactagtctcctggattggatgaggttatagtcttacacagacctctgattgaaataagaacaaaggcaggagtacgtccatactcttcatcttacacccatccttttcaattattctagggcataattttgtctcaattcatcatgttgctgtgatgatgatactcctctctcgtctctcaaatatctactcatctgggtatggatgaataccaacttgacaacagcaccactcctgaaagagaaagtttcttgtactctgcaatctcttcttccaacagaaacgataacacaagtgataccatcaacagcaacaacaataataatggctcctatttttggccctggttacaatattactaactacagcaatcatgaccagcaacacatgtttgactccagataagagccttttttctccctaaaacatcccaacaaagtgcattccgcaactgatacatgaattcaaccctcaagcacccaaaccgaacttgcccccatgctggattaaaatcctaaaaggcctaagcttccctttaaagaaattccaa

SEQ ID NO: 126268 - DNA, 340 bp, Arabidopsis thaliana columbia
tcgcttcccacccggggctcgcgccatccttttttccaatgtaaagtggtagcgaagctttcgttttatccgattacgattgtgaggaagatgagtcatagaggattgaaaggcgatgattccactgattgttccatggcttttctttatctgctttgttctattagtataaggactaatctgcagaagttcttgcgctctctctccccctacgcctctggcggtcccagccggcgtcccttcgttctctggccctgctaactacactgtgcatgcgtgcgacccttggttgtccgactctgtctgcactaccttacccttcccgagcctgcgttccccc

SEQ ID NO: 126269 - DNA, 631 bp, Arabidopsis thaliana columbia
ccccttatcgggttaagctggctccgcctgcatgctaccggtctcggaattcccgggtctgacccacagcgtcacgtttttttcttttttcgacgctcaggatcgttagaatatcgctttttcgaaggggaaaggggtagctgaatcattcctgcttcactccgattactaattgtgaggcaatatgactcatagaggattgaaaggcgataatttcactgattgttccatggttattctttatctgctttgttctattactctaaggactaatctgcagaagttcttggggttctctccacctagaggagctgctggtgctggtggtttgttcccaatgcctgatccagagaccaattgatcaacgttgatctgatgattgaattggattcttgattctgagctcgttggtactctgaaatttttatagataactatcatgcttctgagtattagtagttgtcttcacttccgtttgatgagaaacactctcccaacttccctaatttccggatatttcattcttagtattgacggtatagggatattgggattcccccctttagacatagtaattccttacattccaccttgttttataaactttcaccgactccctcttgtactctat

SEQ ID NO: 126270 - DNA, 704 bp, Arabidopsis thaliana columbia
  unsure (1)..(704): unsure at all n locations
catacgactcactatagggtatgctctacgccngcnggccggcgctctaaaactagtggatcccccgggctgcaggaattcgcggccgccatggctatttcaaaagctcttatcgcttctcttctcatatctcttcttgttctccaactcgtccaggctgatgtcgaaaactcacagaagaaaaatggttacgcaaagaagatcgattgtgggagtgcgtgtgtagcacggtgcaggctttcgaggaggccgaggctgtgtcacagagcgtgcgggacttgctgctacaggtgcaactgtgtgcctccgggtacgtacggaaactacgacaagtgccagtgctacgctagcctcaccacccacggtggacgccgcaagtgcccataagaagaaacaaagctcttaattgctgcggataatgggacgatgtcgttttgttagtatttactttggcgtatatatgtggatcgaataataaacgagaacgtacgttgtcgttgtgagtgtgagtactgtattattaatggttctatttgattttacttgcaagttgtcttgatttgaatttgtttttctcatatacgcatatcgattcgtgcattgggtaacaacaggtttcacgttttaccaagatacacggagtataccggaaacaccaaagggcaattctcctgttccttttggggattttgaaatgccctcca

SEQ ID NO: 126271 - DNA, 731 bp, Arabidopsis thaliana columbia
ggacgacggtctcgataagcttgatatcgaattcgcggccgcatgtcaatacaaagagactaagaacatacagtttttacggactttttaataagacagtagtttgggtttcgaaaaacaacgaactatttgttctggacaagcttttattgaacaagaacttgcaactatatgttctggataagcttttattgaacaagaaggtagcaacaactactaaaagaggggtaggcttttagggaaacgaacctgcatccattgcttctcatacgtaaccaaatggctccaacctatttcctccagcaaatccagtttaagttcgtagagtttcttattcgcagtctcgttctcgttttggatcaagtcatcaagtaccttcaatgcggtcccgagtcgtgatagccgtttctctcttagaacagtgagagtaccgtatttagatgatttcacgtctacccattttgtcagttctttgaaattctcttcgaatttatccttctggctactttcttcttctccttcaccttccttctcacccttcagattctcgaatctcgccatggctaaccctttctggtatagtgcatccgccagttgaacacgtggcacctccatttttttctttcaatttctttggcttacattcatccttctggggttcaagttttttggtccttagccaaaggaaattctttgggcttaggccttcaatcttaaccgtgttaaaacaa

SEQ ID NO: 126272 - DNA, 752 bp, Arabidopsis thaliana columbia
  unsure (1)..(752): unsure at all n locations
aacnnnnnnnnnnnnnnnnnnnnnnnnnnnnnnnnnnnnnnnnnnnnnnnnnnnnnnnnnnnnnnnnnnnnnnntttctgcattaattcgcggccgctctctcccctaggttaactcaagtgggtttatcatcaaagaagccttttttgattcggctcagatctcctgttgatcgttactcttttcccagaatgttaacggagaggtgtttgagcactcgtcggaagtttaatcgccatggaatcgctgtggtgaaggctgcgagtttagataaggttagcggcgcaatcaaaccaggtggattggtggagagtgacaagttgccgactgatgtacggaaacgagcgatggatgcggtaaatgagtgtggccggagagtaactgttggtgatgttgctagtagaggtggcttgaaggttactgaagctcagacagctcttcaagctatagcggctgatactgatgggtttttggaggtgtcggatgaaggtgatgtgctttatgttttcccaagggactatcgaactaagttggctgccaagtcgttaaggatacaaattgaaccattccttgaaaaggcaaagggtgctgcagattatttggctcgtgtttcctttgccccggcgcttatagcgtctatccgtattgtctacacggtaattataacccctgctttcaagccaaaagccagggatgaataattcgccaaataaaaaccccggcccccgtttttgaattcaaggatttcaatt

SEQ ID NO: 126273 - DNA, 966 bp, Arabidopsis thaliana columbia
  unsure (1)..(966): unsure at all n locations
gcggtaccggtccggaattcccggtcgacccacacttccgcaaaaaacaaaaatatagccaggaataatgtcatttttccactgtttcctctgcctgtaacccctaagccgagggtccataaaaagactattggtacaagtgtaccgcattttcattttgttgaaaagataaactgcgaactacttgtgacgctcaaacaggcctttgcgaacaccaatagggaacggaatcaaacacacttttcttcctactttaaacaagaaactgccaaaggcgcagcggagagagcccttttttcatccggccccaaagatcaatctaaactccatctcaatagagaggaccgaaaacatggagacgccatggacacagaacaaggcctggacccttctaatagaaagaatgaaaaccgaatcaagccttttaccagagaccagaacaacccaaagcccgacacaacgaccctcaagaattgccgaatgaaacttaaacacctccaaagaatgtgaaacttcgggtgggaaaacccatcaaacgttcttgtaagttaaacaacttgggtgggacaacactatggggggcggaggaaaaaaaattntcttgcaattcgcccgccctccccttttatgtaaaacacaccttctatgaacccggtgaagggcctaacatcaaccaaattctcaatttggggaaatcctctcttggggggaagaaagaaaaaacaccctccgcaacacaccggtgaaaagcaaaaaacctctacttcttcgctaaaataaaaaaccgggagaagccgcctcatcaaaaaacccacgcccccttgcgattcatacgaaaaatgcgcccggaaaaaaatccctcttaccggggaaaagagcgcgggggcccaaaaaaagaacgcgaccccgtcagaaagaaaaaaaaaccctttacaaccggtaacgaggggagcctccccgatcaac

SEQ ID NO: 126274 - DNA, 958 bp, Arabidopsis thaliana columbia
acctgccctgtgtgcaacttcccgtaatatctcactggttctaccccggccctgacattttttccttttttgacaccgactttttgagttccactttgtcgctcttctgttagggataactcgctctatgttcttaaatcttttcctcatcccctcaggaaatgttcttcctattatctcagtcattagggctcttccggagtattgataggcgcgctgattataactcctcggggatgctctttcggtctacgaatgcttatggcttcctaccagaatctactatcccttggccaagggcgccatgctagcactttattttccggagaaattttttcagaccagctttggaccgccccttaaattaactccataacccaccggcctggtcttgagtacgaaatgcctttagataactagcgaattatggcacttataactcctccttctgggttggcaatattacaacatctgtaggcccatttcgttgttattaatcacattatcccgaaaataaacatatagaacttatttttattggacctcacattgggactcaatttttcctacttttatgcaaaaccccccgggctctttcaccctaaactcaacatggctcacttttgctcatcttattcactttgtcgcatttctagttatcctatggtatggtccgagaatcaatgatagcaccattaacactgattccagaccattacttcctcccttaagctctcgttttctaggggattcccttccgagttctcagatcgggtgttcccccaggtaatcctccccgcttgccccgcatacttgccaaggactattcccaagcttttaaccctattttccttgtagtatgagacctttatcttttcctgtcaaaggtgttcctgctcagcgggtttgaaaaaccacattttatccccttttgtttactaatactctcattttaaac

SEQ ID NO: 126275 - DNA, 329 bp, Arabidopsis thaliana columbia
acggcctggataagcttgacaacgaactcgcggccgcatgtcaataccaagagactaacaacatacagttgtgaccgacttttataaccacaccgcccttcgcgcctcggaaaacaagggacaacatcggcccggaccaccctacaccgcacaagaacccgccactccctgccccggaaaagcctttactgcacaagaaggcagcccccaccaccaaaagacggggaggcatctagggaaacaaacaccgcccaccatggcgtctcaaacgtcaaccccaaaggcacccccaccccaaattgacccccacacgcacaaaacaccggcgg

SEQ ID NO: 126276 - DNA, 1044 bp, Arabidopsis thaliana columbia
gccacaaaccgaataaagttggaacccctccccgtggccggccggctagaactctggaatcaccgaccgcctttttcttttccgcggcctgatacttacaaggatttatattggtacacttcaagtgagcccattgtgtgaacgattttctacagtacaggcgctccagatacacatactccttcagataaaaatctggcgtgtcgaattcccaacgcatcaaaacatgcaaactcacattcatcaaatcacaacatgagccctcgcctctgtccacaaatcatatatgtaaccgttttattttggaaccccataatagttggttgtcccattcacgagcacaatgccccaccccgcgaaaagaacaggctcggcttacacacatttttcagcggtcttcccagactgttttaaagccttcaccaacaagattaattgggaccaatttagaaggctttaccctccagaattaggtatgtagcctactttccgtcccccttacttgaaccttgggaccctatttcgccccaatgggttcaagtcccctgggagggtaacctctcctatatctccaaaaagaaaaaattccctggtgttaaccgggtagacaataaagcttcaacctgtgcccttaggaaaaacactgtaaaaacctttatttgcctttacaaaatacccctcatgtcccaaacaaatatggtttgtaaaaatttgttggctaagaaatttgcactttcttgtatttggaaaaaattccctcgggctactcttgaaccccttgaaaatccaaaggtggtttgatcaaaaaggattactgagttgaagtgggtccccctttcattttggtttctaaacaccaatagggaatatattcccctcttgggcaactggagctcttatcctaacataaccccttaatgaaaaaaaaaacttgtcccttaaaatggtgaaaaaatctagaatttattcccaaatggcccaaatcattggtccactataattcgtggtaacaatcaatgacatccacatcaaaaaaatataaaa

SEQ ID NO: 126277 - DNA, 817 bp, Arabidopsis thaliana columbia
cccccaaaaaaattcagtggaacaaaaagagaagccaaacgggaaaagacaggaacgaacgaaggagcgaagggagcagaacaagcatttttttggaagttttttttttttgaaacagtaagcgtcatctgaaggagttatatctaattgggggtggttttatgggattatgtaaagtgttcatttttgtaaagtatgaaagtataataaatttttatttaacaattttgtgataggtttactggtatttttttatatttttggttatatttgtcagttttttggattaatgttttattttgggtatgtaatgtaaatttatagggaatatttttttttaattatcatattttgctgggttctatggcgttgttgatttttttattatgtattgaagttatatatatcgtaggttttggtggttttatagaaatatagttatatttttaaatatgatttgaatatttagtgagttagtattagaggtgtttaagaatatttggttttataaataaaaaagattattgttgaaaaggctgaataaggaatggatttgggtttcgtataatatttaaagaggtaaggatagagaacataagctctagttgaggtgaatgtagcatatcagtaataaagggttttttgataaataattggatattatgtattgattgggttatatatgggaatgttaatgttgggtttgagagggagtgtaggataaaatgaatattgggcttaaagaaattgtgggtgttttgatatgattagaaaagactagcttttatgtgtgataagttgggaggtttctcttgga

SEQ ID NO: 126278 - DNA, 556 bp, Arabidopsis thaliana columbia
tattgaacacaaccaaagggtactgaccttccctatggaatggaggactccactcgctagtcacccaagaacgacaccccgcgttaaaagtgcagaaagaacactgcggctgacacggctcgaagcgggatacttacatgggaggattcattcataaaattaaccggatgcatggggggccccttaacacatacccaccattgggaaacagcaccaaacattaagtctccctgatcgcctaacaccaacacacatagcaccccccaccggtgaaaacccattgaccaattgccaaaaaccctaactatgctgaactaagcaccatgaagcaacgagccacccgaccattctccctatcggggaaacgcgagcacgaaagatggtctaacaatccattaaaagttgtcttcgccgatgaccgtcaaaaacccatggactctctccaccgtaaaccacagcaaatgctacatggaggtccatgcataaacgcccgcgacccccgtaattaatagtcacgcgcaccacagcactcccaaacaaccccagggtccaggct

SEQ ID NO: 126279 - DNA, 710 bp, Arabidopsis thaliana columbia
  unsure (1)..(710): unsure at all n locations
tgcagtaccggtccggaattcccgggtcgacccacgcgtccgctcggtttccactaaagctagtagtaactttgaagataaaacagttcctctaaggggattcagccgagcaatggtcaagacaatgactatggctacaagtgtaccgcattttcattttgttgaagagataaactgcgactcacttgtggagctcaagcagttcttcaaagagaacaatattcttcagctactaattgctctttttaccgctactcgacataagtctctgtcaatggctctaaccaaatatcccttcgtgaatagttgcttcaacncnntattctttccacaccatcctcagaggttcacattctatttgatttgccatggccactgaacatggccttgccgtttctaatttaaagaatgttcagtcattatcggcgtcctcgcatagctggcgaccacacgctcacaccccctccgccgtactggctcgccaccaccactcctcgcattttcaacatcattatgtcaccttactttaggaaatttaactacaccattcgttcaacgctcccatctcatctcgcacttctcttattttgttctctgagtgcttacctcatatcttacgtggcactctacgaccctagatcttctctctacccaaaactattctcaaccctcgatctgacaattcaggatccacttcctcagattagcgg

SEQ ID NO: 126280 - DNA, 1017 bp, Arabidopsis thaliana columbia
taacttatattttgggagttggttaatacataatatcaaaatggtcaagacaatgactatgcacaaatgttagaaatgaatttttattataaattaaatatataattaaaaaaaataaaaattttttttattgaaagagaaataaatagaaaaagttttctttttaaagaaaatttttttaatagaaataaatctggtaaatttggattagtatgttcaaatcaaataattgttgtgaggaaattaaatttatcataattaaagaaagataattatgtattattttatagattgcttttgaaataagagaaataatacgagtgtgattttttcttcattagtcaccacagagaactattataaaattgtgtgtatttgtttttatataataaatttataatatcagtaaataagagaaatatggaggtttgttttataaatatactacgtagaattgtaaagttaagaatggggaggttataaatatttatgatattgttaatgattaaattagttagtaatattatttgtattaaagagttatttatattaatatgctatatttaatctaaaagaatagtttgggtatgggatatataaataaatagagtgtattaagataaacatccgttataaaagaggatgtaataattaatatttagagagatgagtattattattgattaataaaaagaagattttaaagttggagtcaacatatataaataatcgaaaaaatgtaatgagatgatatttattattagactttataattttattacaataatttgtgttataaaagaatatataataaatgtgtacgtgcatcttatatatatgatgattataaaattaatatatatgggaagatgatggagtaaaattatttatatatttgtaagaaataaaagctaaggtgtatatatttaattatatagtaatatattttgttaaggcgggggggtataaaaaatattaataaaaattataatggtgttgtgagtatagtaatataag

SEQ ID NO: 126281 - DNA, 328 bp, Arabidopsis thaliana columbia
  unsure (1)..(328): unsure at all n locations
taaggtacaaagctggaactctccccgcggggccggcgctctagaactctttggaacccccggctccgcgtgtttgcgtgtctcctgagacgtacctcatttgttcgnaagtgttatttgtattccgatggtacccaggttctcgagtatccatcgattgatagacccttaaaaatatgatctttactttggtttctgcagatctgagtgaagaaagctattacttgggctttgtcaggagagcggcanccagaggagcacctgttatataaagatactggctttattagaccgcacctaattaggtgccacggataactggcactgc

SEQ ID NO: 126282 - DNA, 713 bp, Arabidopsis thaliana columbia
ggaaaaagggagcaaaaaagcgcccacgaaaggagcaccccacgcgacaaaaaacagccaaaactaaaccacttttacaccgaaagcaaacgcacggacaaaagggccagcaaaaaacccccacagcacccaccaccccccaacccgccaccaccacccccaacacaaccaaccccgaacccccccccaaccaacccccgcccaaccacccccccacccccacgcacccaccaacacacacaaagccccccaacccacccgcaccacccaacgcacacaacaccccaccagccacaacaaaaccctccacgaacggccacaggacacccacacacaaacccacagaacccccccacagccccggaacaaacaccgacacacagcaaggagacacaacacccacgaacgaaaaagcaccccgcacagacccagaaaccgccggcgcccaacagcaggcacggcagcccagccacacccaccgacccaacctagcagcaaaacagccaccgcgcgcaagacacacaacgacagacaaacccccaagacaccccgaccaccggaaaaccgtacctaccaccccggcccaaaacgaaacaagaacaagcggcacaaaccgaacaaaaaaacccaaccgacaaacgacccccacggcacggacaaaaaggcccgaacacaacccaccccacaccagcaaggacaccaaacaaccaaca

SEQ ID NO: 126283 - DNA, 451 bp, Arabidopsis thaliana columbia
aaaccaaggaccacggccagggggcgcaaccgggccttcgtccccacaaaaacgaaggaaaagaaacaaacaggaaaaacacgacacaaaccaaacccagaccgaaagaccccgaaacacaacaaccggagaacaacaaccacagaacaaccaacaaaccacaaagcaagacacgacgccccaccaaaggaaaaaaacaaagcccgaacacggacacaagcgcaggacaaaaagaccacaaagaacaaaagacccaaacccccgaccaagacgaacacgagaacaaaagcaccaaaggccgaaagacgaagagcgcccacgcgaaaggacgaaaacaacagggccaaaacggaacacaacccacgacgaaaacaaaaaacaaaccggaaaaaaccccaaaaaacgaaaaagccaccaacaggacacacaacccacaaagcaaaccacgagc

SEQ ID NO: 126284 - DNA, 673 bp, Arabidopsis thaliana columbia
  unsure (1)..(673): unsure at all n locations
gggaagacggcctggataagcttgatatcaaattcgcggccgcatgtgagtacaaccaaacggaaacaaacagtttttgacaccttttcacaacaacatgtcaagctgtatgacaacacatgaaatatatgatctgcaaccactttttccgaaaaaagacctaacctgatcagaccaagcttgagtaccatccaaacacaaaccttccgatgctaccgagcacgagggcgaaccgaataacacactcgcagaagaacaagattcggcagtccaacacaacaacctttgatcaaatcccctacgaaacgccatgtcaatctctacttgatcctcagggcgaacgtcacttcgaccggttgaaacgaacagccgaacgtacccgggggggctcacacgacacagaggggaaaagaccaggatctgggatggcattaaacccaaaggcctcaaaggtgcctgctacaatcgaatccagagctgcaccgaacaagatccgccgcttgacggggctcagggaaaaagattataggttagaaacctcaaccgagcccggaggagccatggtgcgcaccaaatggggggggctgccgcaacccagtactacgccgactccacaaagggggcgccaccccgcacccattcaaaagggacatctcnaccaaggtcacaccgc

SEQ ID NO: 126285 - DNA, 765 bp, Arabidopsis thaliana columbia
acaaagtctggagctccgccgcggcggcggccggtctacaactttagactccccgggcctcctttatttttttgtcccctgccattcatcaaacctgtgtcgccttgagatatccacctggagcagggggctgtactatcttccgtcatgaggttcaggactgaaatcatcgaccacctcggttagagggcgcgaattctcgcactcttgatcttaggatcatcctgcctcggaatccacttttgtgatggacgaatacactatctttcgtgctcttggactgccttcatgattgcagatattcgttgcatacaccttgttggtaactatggatcttgtccctactagaatatttggtgacccttttaagactgtctgtcatactctgttccagctccaagatggatgatgccacaactcctacttcactgatataaatccttcttggctctggtatctggggctgctgttatcataccctcggcactattaagcgttctcggttagattgccctttaccgaggcgtccttagttttccttacccaggtttaagaacctgtttttttagatttgggccctacagtcaaaggtgatctcttgttccccgggaactctgttggcagctaccatgattcatctgtggaaatctgccgccgggggtttttcttgggaacccgggctctcccttttttcattgtaataagggtctcaccttggcccaaggggagcctgaatacgaacgattcccaaccccgaaaattgca

SEQ ID NO: 126286 - DNA, 766 bp, Arabidopsis thaliana columbia
  unsure (1)..(766): unsure at all n locations
nnnnnnnnnnnnnnnnnnnnnnnnnnnnnnnnnnnnnnnnnnnnnnnnnnnnnnnnnnnnnnnnnnnnnnnnnnnnnnnnnnnnnnnnnnnnnnnncggccgcggatcaagcaagtgtctcttcaggaaatataactgaagcaagtggttctaattacttccctcatcatcagcaacagcaagaacaacaacaacaacagttagttgttccagattcgcagactcaaaagaagaggagaaaccaaccagggaatccaggtttgtgtgaaaagaatacaaaaactttcatgctcttggactgattcattattccaattatttgatacagtcaccttcttggaaattctgtgtcttctcccgaaaagaatattctttttaccctttttgttctctttatcatcctctattccaaaacaaagaaaaataaaaccaagactcagactaaaaagaaaaattaataacttgttaaagtatattttgggctgtggttagtatagttttggttactattaagcattaatcattaaaatgtaactttatttagtgtttcttgatttttctaacaatggttcaataattttctttttaaaatttcagacccagaatcagaagtgatagctctatcaccaaaaacactaatggcaacaaacagattcgtgtgtgaaatctgcaacaaaggttttcaaagagaccaaaatctacagcttcatagaagaggtcacaatctgccatggaagctgaaacaaagatccaacaaagaagtgat

SEQ ID NO: 126287 - DNA, 792 bp, Arabidopsis thaliana columbia
  unsure (1)..(792): unsure at all n locations
gaagacggtctgagataaaccttgatactacgaactcgcctgccgcacttccatatgcaatcatgcagaatgccagccgatatttatgtgaactctttaataacacaaaaaagtatatgatacgcgaggatacatgagtcacacatgtaacaccatctccggaatacatcttgtgcttacacaccttacactctgcacactataaactcgttcgaacgactgagaaaccaaaggactctcctcttattacgatgaacacaaaacacgattcgagctcctcttactctctataacattgagcggtaccgacatgcatcntcacaatcacttgctcaaaagctaaaagacctctcctctcggcaacaacttcggcagcttgcacgagaattcctctgcacactattcctggcggaaacacatctgttctcgaccaaacgaccaaagctccacaagcgttcccttccatccactttatgactaaccgacacacccgccacttgccctttacccattcacaatgccgttaggccatttatctgctggaagtgccgggagcaaatatagatccttcgtagtgctctgcactaaccattctgctaccgctgctgcaaatccaaaattagcatccatctggaatggccggtgtgcagcgaacatgttactatacagtcctcccttcgtagtaactcttcgttcaacggaatcccccagtaatcaaaaaattatggggtaaacccaatcccaattatgcccttcgctccggctttattggtgggaaggcctcttggcccc

SEQ ID NO: 126288 - DNA, 505 bp, Arabidopsis thaliana columbia
acaaaagtggatcccgcgggcggttaacagacccggcgcttttttttggcacccgcattcgggtgtgaaataccgcacatacgtagaccaggatgagtgtccatctgggaaaaaaacgggttggtcctagggagaactctgtgaagaacggcggcgtcggggtcttactgagggcttctaccgtatctaatgaccctgaagagcttcaaatactacccaaaacctcttgattagctaattgggcttcaacttaccgggctttacccttcgggtaacaagaatgccagcacttactgtagggcgcttaaaccacaaccttcttgggacggttcaaagggaccgctatttttaaacccaacagggtacttatggttggacaggacttacccccggagggggtccacctgacataaatttgaaatgaactatggcatgcctttcccggaaaaaccgggcaagggcaggaaccaatggttggagaataatggctaggttttagcaaata

SEQ ID NO: 126289 - DNA, 663 bp, Arabidopsis thaliana columbia
ggccccccctcgggtcgacggtatcgataagcttgatatccaatcgcggccgccatcgttacacaaagtttgctgttttaataaaatttaataattactggaatgagttccaaacatcactattgtgtggctttcacgctaaaattatacattcttataccacacccacagacttttttttttctttcactaccaaagatagagccctgacgtggactatcttaaaatttcttgcggaatgctctaccaccccctatgatagagaaggggggttccttcaaaaaacccacctgaatggtatcaacgaagattattaccacccctatgtcctcggggaaacgcctccccacacccctgtctatattcttttgatcacaataactaccctcctcgtttctttgtcccctcctgcaaagtcatccttaccaaacttccggccattgccgtttacgggtggctctgaacgatggccacacatctgtggggctcatctgtgccctagtccatcgaagccaatattgaaacttttttgtggggggactcgagctccccataccggatccccacccaagagccgtcttttaaaccgcaccccggcattttatcctttcgtgtaccaaaggggacgccttggtttaaaccttcctcccctctttttaaaaa

SEQ ID NO: 126290 - DNA, 674 bp, Arabidopsis thaliana columbia
  unsure (1)..(674): unsure at all n locations
nnnnnnnnnnnnnnnnnnnnnnnnnnnnnnnnnnnnnnnnnnnnnnnnnnnnnnnnnnnnnnnnnnnnnnnnnnnnnnntttattcgcggccgctttcttctggatctgattcggatccatcactctctctttctctacatcaatttgttttctcagatcttcatctttttttcgtatacctgtatttgtcgaccttttctctcaatcactaaaccctcaaatcctttttttggattataagattgcttctctgattgtaattgctttgatgtgtatcagttgacttgtgaaaagtctgcaagtgacttctttctgtttacaccatcagctactccagaatctctcagattcttaaaagcttaaatctttttttcgactttgattgtttctgggcttcgctttggacggatgtgaaggaaaaaaggggtgtcttgatgaaatgagggatgttttcaccgtaaatgaaacttttgagtgcttggctgtggccgtcttttttctcgggcaggtcctttgattcaactggaaaccaaaatggattgcttttggtccaaagaactttggtcaccaccctcgtgggtgaaattcttccttgggtggtggggtcaaagcccaaccaaccttgctttgggggggattcaaagagccccccaagtttggaaatcttttgggg

SEQ ID NO: 126291 - DNA, 729 bp, Arabidopsis thaliana columbia
tgcggaattcccgggtcaacccagccttccgatcaactgtcgaattaaggttatggctactgtttccactcatgtttaatccttcggacagggtccttaatcccatgttgctagatccttgaggagaatcagaactcactcggctcaagattctcatctctcatcgacattcggctaactcaatattcctatgctagggaactactagcagagcactacttgtaggacagatctgacgttaattacctactcgaggctttgcagatagatcgacttactctggactctatccgacaaaacaatcggtcgataaagctatgatcttgcagtgagataccagctcgaattgatctcaagagtgatacctaccgttacctaggccgtgcttgatcgtcgatgtcgtccagtacgcgacgccgttaccggtgcaggaggcaacgcaagttatgtccttgttggggagcactggcatgagatgagaacctatatgggatttggctgtcgatctcaagcgcttgctgctgatgacgaatgttctcataggctaactgcggtactgatccagacaacctgctgagcccaacatgtataaaggcgaaactatatggatctaataggaaacagaacggtaccgaacagcacatggctgcttcgttagatagtcgagacgctggagttgaacataacgttaaatgagactcaagcccagcttgcttaaatgacattgat

SEQ ID NO: 126292 - DNA, 600 bp, Arabidopsis thaliana columbia
ctcatacgacccctatagggaaagctggtacgcctgcaggtaccggtccggaattcccgggtcgacccacgcgtccgcttcattgttcaattcaccgcatcgggaaacaaaaaaatctacttaggttccgccgtctgacgaacgaacatcagctactgcatcgctaggtataaatgacggcatcgacaggatttaaacggctaaatcaatggctgctaaataatcccgagcacgattacgagggacaaatccatgtctatgtgatggaccatgtgatgtctcacgcacaaagtcctcttcataggatagcgccactacggtgctgatcgcgcacaggttgaaggtggtgcaagctcccatcaggaaccgacatactcgttcgaggatccttcaacgcttcctcccacagctgaggaaacacataaccgttgtagcggtcaacaagcaggctcacgttatggccgctgtaaatgaacgcgtgcacaagagctatcgcataacaacggacctgggtgtaccaggaacggagctggccgaaagcatgacaggcgcgttcgacagtgatagcattattgccaaggacataccccgagatgcatg

SEQ ID NO: 126293 - DNA, 866 bp, Arabidopsis thaliana columbia
  unsure (1)..(866): unsure at all n locations
tataggcaaagctgggatcgcctgcaggtaccggtccggaattcccgggtcgacccacgcgtccggagcaagctattcttattttttctccgaacccgcttatgaagatgttgtaaaggatgttaacacggttggagacgaacttctcctttaataaataagtaacctgatagcttgggtgattcgaagtgaacacgttatatttctcggtcgttgcgcaccagtatctgtaccataggccatccgcatgaccactaaaatgtttttcgctaagcaggttcctagtgtggtgcgcaacacttcacttcgttggctaaacacaggtctagcgatataccgctagtagcggcaccttcggacacaatatgtgaagccaccactctgctttgtggcgatctatgatgctcaatctctaggcgcgagaaatcgtcattagaattcgtaatcacacctatgaacagggtacctatcgactcctagaagccaccacgcgctgaaattctaggcctaacaaaacatcgttggctctggacgaatctacacaggtcactctctgctaaaaatttcacacttgatatccgagcccccaaatttcattgaaagacggctaanctggcgagaactccaggacgtgccatatataatacacgactcttccttgttgtacccccggcgtatcttctaagcatcttccttcttcaaatccataaattgttcctaagctcacttgatctttatactaggagtcgcttttaaccccgagggttgtcgatacgtatattttctcaaggaagtccacagtctcatcttgtccgcggcagtgtatgtgtgcaaatcacacaataggaatggctcctaatattatt

SEQ ID NO: 126294 - DNA, 742 bp, Arabidopsis thaliana columbia
cactgggcccaccctcgggtcgacggtatcgataagcttgatatcgaattcgcggccgcaccaattcgagagaagaaaataaaaaagacagttacatgagagacctgaacattcgaacaactaactacttaagaagacacttacacatgtttagagataaagtatcacatgttcttcattcagacacgcgattccattttcttgacagcattttcgatggctggcatgtttttcttgaagggtgaccattggtcatctgttaagcttattcctttagaagtaggaagtgctttgccatctttcttgtaatactctctgatagaaaccaaactcttccctttaaattcctgaatcgtcactcttctcttatccgataacctgcaaatgataagatcgccgtcatcatcaaactctttgtttcctttaccacaatccttatctgcatcttcttcttccttattcacttgtgagtattcatattctctcgctctctcttcgtcgaggaatttctgcacgacgcttcgtacaaatgctttgtgagatttctccgagagatcgattgcgagtttctccgaagcgagtttacgaaccttgaactctgttatctctttcctcaatatgggttgtaacgatggagctcaagaaagagagactgattctcatactatccaagtcagctcttgccctcccttcatcatcatcatctttgtgttctgtctcccagagcgtctactacaaagtc

SEQ ID NO: 126295 - DNA, 202 bp, Arabidopsis thaliana columbia
agcagcggaggaaagaaaacagagacaatagggccagaatgaggcgagcaaaactataataatcgcattacggaagaggaggccaatagcaacaactcagacaggaaggaagaaaagaagacaataagcaaagagacgtaaaacaaaaaggtacaacaacagtctaacctatgaaggaggaggcagataacctgacaatatc

SEQ ID NO: 126296 - DNA, 821 bp, Arabidopsis thaliana columbia
atcacgaaattgggagaccccccacgcgccgcgggcgcgggcggcggctcagaaaagatgacgcgaaccccccccagcccgcacggtatatcgctttacgcgaaaacaaccccaaagcacaacacaggtgggggacggagagaaagaaagaacaacacaccgccaaaccaaatacaccacaagagaggaagacaccacaaggaggagcgagcgagcccgacaaccacaacgccgcagaagaaagaacaaaaaacgaggacgacggatgacgtagccccactcccaggtggggacgcaaaaacacacacccgcgagaaaaaagaggaaccaaccaaagagcgggcgagatgaaggacgaaaaataccacgggacggaacgaaagcaaaacaacaacgcagcaaagcgaccggcgagaacacacgccaaacagaacatagcgtgccaaggaacgaaacgaacaaaacaaagccagacgcccataaaaagacagaacgccagtgctcgccccctagcgaactggaaaccaacgcccacccactcgacaccaacgaaagcaaaaaaaaagacgggaacccggccaacaacagcagggcaaaatgccaaccggcacaaaaataagcaacgagaaccctcaacagacaaacgacaggacgcgcgaaaaccacggcggaccggcacaaagaacagcaacacccaacaccacccggcgcacaggcccgcaaccccccacaagccacaaaagcaccggtgcggaccgaacgcaagggcaaagagcgcgtaagacaaaaaccagaacaccccgagaaaaccgaaggcgacg

SEQ ID NO: 126297 - DNA, 791 bp, Arabidopsis thaliana columbia
taccgagattgggtgctccaccggggggggggccgctggaaactagcggctcccccgggctgcgtgtattttttggccgctgccgagatttatcgtccttctgtgaaactctccggagagagatgaaatctttcctcctgtatagacaagcgatccaccgtatttcactattatcttcaaaaaccccaactatctgcagaaacttctccggcattacatacaccatttctcactctgatcgtcatctaagaagctgcgacggacaaacccgattccaaagtgtcgaaatccctagacccattttatcattcaatcgatattggcactttactcgcgagtcccgactcagggaatccagtgccgccattgacgactcgaatgaccaacaggaagatgacgaagatggaacaacaaaggagtttctgtcacgattcggttggataatgcgggggaaagggtcacaagcttacccagattgtgacaagaagatgattgatggtttgcttctgcttattgttgagaaagtcgcggtaaaaatccaaagaggcgggattcaataaaggtgggataagcttccaccttcaccggcggtgggaaggttaaacgaataagctatgggcctacctatctggggaaagttagttaaattccggcggtttggaaagaatattgggagaacaagatgagggaagaaaaggtgtgaaagattgggagccaattacgtttccaacttcttccctgcaaagggaatgggacaacgtgggttgggttttggctggggaaaaaaaaat

SEQ ID NO: 126298 - DNA, 555 bp, Arabidopsis thaliana columbia
cccggactcaagggaaggagcgctggagctgcggcgggcggtggacactctagggactcccggggcccgctgtgatgcctgggtccgcggacgcaaacaactcccactcgcggttcatgtaccagcatcttcgtcctctacctttatctcgcttactgaaaccctaacctcgatctagtttcttcgtccccgtgtcgacctacgcttaaacggccgttcttaccactctcgccggttttctgattgtgcctacaccgcttatggagctgagtcataccgccgctaccagtatgagctttctactataagagccggacgcggcggggtactggcctatcgttggggcacgaactccggagcatacgccggcgcatgcgagctgcctttttacactatctgttccgatactgctggaggcgttagaggaacgcgcgtattgagacgaggagtaccaaacaagttacatgtgtggccatcaagacagtatgagtgagggactgcatggactggtggaaggtagactgacctcttagaagggcacttgacgctacagat

SEQ ID NO: 126299 - DNA, 621 bp, Arabidopsis thaliana columbia
gccgtggcggtaccgttccggaattcccgggtcgacccacgcgtccgatgcactgtacggtgactccgtggccgaacgcgcttttgtagacttcttaactgatgctgacagggtgggagaggaattctgcgtccggacgagtacatagactatctgttgacggcccctaatgtcgtcgttgacctgtgatatgctcgagccaatgttcgaagtcaggggatctatgggacagtggggtaggctggatgacgatgtggcgtcatccggaattcatctcactgctggcacactgcccgcttattgcagagctgtgcgacaccaagcattgtaaacgcgttgtggggcaattttatggggagggaactccgggccttttcagctcctcgacacgcacgcacactctagaacaattagttggccgtgctgttgggccttaccccgttccaggctcgcataggaagcgtgggcgattctggatcgagggtgccatatcaggtacacacggctgggacactctcggacttgtcgagggcgacctacttatacatgccggatctgggacagtccgggagggtaccgcattacccgctgtctgtgcagttaaaagaataccatcctaat

SEQ ID NO: 126300 - DNA, 808 bp, Arabidopsis thaliana columbia
ctcactatagggaaagctggtacgcctgcaggtaccggtccggaattcccgggtcgacccacgcgtccgaggaatactgttgtgattacgtgaacgaacgggtttttgtagacgctggatctgagcctgactgggttggagaggattcctgcatccggaacaagatcgtcaactatctgatgacggaccactaatgccgtgttgaccgttgatatgctcgagccaatgttcaaagtcaggggaactatgttacagtggggaaggctgcatcaccatgttggtgcattggatgtatctcctgaggccacagcctgttttacagagtggcgacacagcactgaatcgctgatgggaaatttatggtagggaactctggtcctgttgagttccttgacacggtctgagactctagagcaaatagtctgactgcttaaaggccttacccagttcaaggcttgcagaggaagaactcgcgattctggatccaagatgctatatcggggacgcactcatgggactttcccagacttttagacggcgacctaacttaaatatgccgaatctgcgacattagcggagggtctaggagaagcccggttttgcggggcgtaaaaaagaatagcagccctattctcattttgacgggctatgctaaaaaagggaatgaggcgtcgaaatggataaaccacttttttaaagaggtttttacttgattataaagaatggctaacttttggccggctcgcccaagggaaagactggatcccaatttaagctaattcggaccttctatatggggggggcgtta

SEQ ID NO: 126301 - DNA, 764 bp, Arabidopsis thaliana columbia
  unsure (1)..(764): unsure at all n locations
cnnnnnnnnnnnnnnnnnnnnnnnnnnnnnnnnnnnnnnnnnnnnnnnnnnnnnnnnnnnnnnnnnnnnnnnnnnnnnnnnnnnnnncggccgcgtcgccccaagcgacttcctgtgaacttgaagaaaagtatcaacgcgacaaatataccgtatgatgatcacaaaggattgcagtttgcttcgattcttgaagtgagagtcagcaacggtggctctgtgtcttccttaggtggcaagaaactaagtgttgaaaaggcagactgggcggttctgcttctggcggcttcatctaactttgatgggccatttactatgcctgttgattctaagatagaccctgcaaaggaatgcgttaacagaatcagctcagtccagaaatactcgtactctgatctttatgctcgtcatttgggtgactatcagaaacttttcaaccgggtctctttacacctttctggaagctcaacaaatgaaactgtgcaacaggcaacttcaactgctgaaagggtgcgatcatttaaaaccgatcaagacccttcattggtggaacttctattccaatatggtcgatacctgcttatatcttcttcaagacccgggactcaggtggctaacttgcagggtatatggaacagggacattcagccaccatgggatggtgctcctcacctgaacattaatctgcagatgaactatgggcattctcttcctggtaatantccggaatgtcaagaaccattgtttgattatatgtctgcttt

SEQ ID NO: 126302 - DNA, 606 bp, Arabidopsis thaliana columbia
  unsure (1)..(606): unsure at all n locations
nnnnnnnnnnnnnnnnnnnnnnnnnnnnnnnnnnnnnnnnnnnnnnnnnnnnnnnnnnnnnnnnnnnnnnnnnnnnnnnnntgttttcgcggccgcccgaaaacaacttttcccttttttcttgggttcgcaattggatgaaaagaacaccgcttttcatagcaccctacattaaaccgctagggatactctaccaaaaactagttcatttttcatgaaaagcgtagaaaacagacacacccttttaaaacccatatcccttataaatactgtgatactgggcaccctctatctgaaaacaccaatctcagactgtttcactttgtttctacaacccgtcacacaatcacatgtttagaccaacacgagaccctttgtggacgctctctctctctctcaagacctggtgaggaggcgcgtgtagtgcctcagttggagatgctgacttaggaacatagggactttgacagctttgtaagcctgcttcccacctcgcccaccagatgtatgcagccttctttcctaatgctggtaagaaaacctccaacttctttactacttccggttgtttggacaaagactgactgcggatcaccttgtggtgaa

SEQ ID NO: 126303 - DNA, 204 bp, Arabidopsis thaliana columbia
aggaagttggaaaactccgacgcgactgtcccatcgatcgacggtttttccgttttattccccccccaccccacccccctttgggtccgacgatcacaacactttctagaatctaatcgagtcgcatacagctagccgacgtgcaatcgcaatatcttaactctctcaagataccacccttagctggcatatctgtagacttgg

SEQ ID NO: 126304 - DNA, 734 bp, Arabidopsis thaliana columbia
ggccccccctcgaggtcgacggtatcgataagcttgatatcgaattctcggccgccaactatgctcttttgagccctctcctggggacttctcagaaacttgcctttcactgatttctcaatctattcctttcgcccttatggaacattctggagtgaatcctacggactcaccatctaagggcagtgactctggagtctatggaatcataggatgtggaatcgtggctttacttgtgcctgtgttactctctgtggtgttgaatggaaccaaaaaggggaaaaagagaggtgttcccatcaaagcaagtggcgaggaaggttacacaatgcgtcatgctcgagctcctgaattggttgatgtaccttgggaaggagctgctactatgcctgctatgcttgagcagtcttgtaagaagtattcgcaagatcggttactaggaactagagagtgtatagataaggaatttattactgctagtgatgggaggaagtttgagaagcttcatttacgagagtataaatggcagagttatggccaggtttttgaacgtgtctgtaactttgcgtccgggttagttaatgcccgacatactgttgatgatcgtggtgctatcttttccgatactcgagccgagaagtattatcgcggttcagggatgcatcatggcagagcataaccgctgctactatatatgcttctttgggaaaccatgctttgatttactcactcga

SEQ ID NO: 126305 - DNA, 1126 bp, Arabidopsis thaliana columbia
  unsure (1)..(1126): unsure at all n locations
cgaaaagcccgggacgacccacgcgcagcgagacaccgagcggaaacagcaggaccaagcggggagagaacaaatttctaagacatttcaaacagcagcaccaaccaaaagcgcgaccgcggggagaaaacagaccgaccgcaggaaaacgaaaaggcaacgcaaacagcgaacgacgcgcgccaagaaccacggcaaagggaacaacgagcagccaggggagacgaacgacccccgtgaaagcaacaccaacgacagcagaacccgaacaccgacaagccgcagaaacagacgaaaccgcgcgccccagagaaagggaacccaccggaacgagggaaaaacgaagggggacacgaaaacgaccgcagcctggcgagaggagaacgagagaacaggcgaaacgcacaagcaagcagggaaggaaaccgagaggggcaccgaaggcagggacggcacagagagcacgggcacggacgaggcaggcaaacaggggagatgacaaaaggacaaaaacgaagagcggcccacggaacagaggacaaactgagaccatgccaccgcaaaagcacgagacgcgaaagaacaaccgcgggacgggcgaaaaagctcaaccacgtggagaaacgaccagcagcgcgaagacggggcgcgacacgagacaaacagaaaagcaactagagagacccgggaaaacaacgggtcactccgcgagaggactaagaacggcaaagcgtgcagacaacacaggcgacaacgcaacgccaccgcaaggacgcagacgcggctaaccacgccgacacaaaaacaacacgccgagggacgcaacacgcctaggagaccacagacacgagagggcggcacgaggcgcagcggcggcgcacagaacacaacaacgcagaacgccagagcacgcacggctgaacgtggcgacgcaaggcgcgnggacgcacccaacaacgcagggcggcgacaactcagaactagaaaaaagaagaggcggaaacacggaagaccaagctcggcgaaacacggagaaacgcgcggagcgccgcacaaagcggcggaaccggagacaagcagaaggggggggaaagcaacacaaaaatcgcgaaacagggacgccagc

SEQ ID NO: 126306 - DNA, 273 bp, Arabidopsis thaliana columbia
tataggcgatagctggtacgcctgcacgtaccggtccggaattcccgggtcgacccacgcgtccgcggaacgctgttgttattttccgcgcgaacgcatctctatactctttggaaatgataataacacgctttgagacgattccttcctttgttggaacatcatgaagcatttcttgatggtctgtaaagccatctggcaccgtcgattaccctccagacaaagggaccaggtcatcggggtgaacagtgagtccagcgtgtgcgaggtctc

SEQ ID NO: 126307 - DNA, 1129 bp, Arabidopsis thaliana columbia
  unsure (1)..(1129): unsure at all n locations
gacaaaacaatctggaaggcataccaaacgatagaaggaggagagcgccttctactatactagtagggaagccccctttttttctggctttttaaaaagcaagagcagagctcacacaaacaaatttgtgaagtgggtgagaaagaaaaaagatgtacttcccaacaaaccaaaaagtaggatacattataaaaataggcaagggatgatcattctaaaataaaccacaacaacagatctttttttattacaaaaaaacataggggggaaaagaagacgctaaagaaaaggaagaaaagacccatgaaaaaagagaccaaaatgcgaaaaggaaacatcaataacaagctgaggtaaacacaaaaaaaatatttacaaccgaaatgtattatgactaaaagaacaatagagggaaaaaaaaaataacataacacaatcataagagagtggcctccgaaaggatatagaaaagagacaagaggaggagactcacacacttaaagttgttgaggaagacatactgcgatattcacaaagaggagacaaacaaagcatgataagctcacctttaatagaagataggacggatgcgaatatataanccactacatgtagtgtgttctacaaaaataaatgggggaaaataaaaatccttagaaaacaaaggagataaaaatcgtgttggtaattaaatacactctgggacagagtggattacgaataaaaacacggacaatgttatgaatcaaattatatgatcgaaacccaaaggcatagggaagaatttgattactcaaaaaaaaaaacgagggttaaaaaaaaacaccgacgtaataatttttattggaaagacggaataggaaagaatcacgctaatcgggggaaaaaataaaaaacatccggcgggaataaaagaaaggctagcggggtcgtaaaaaaaaaaaaattgtgaaaaagaagagagaatgatcttccagtacaaagaaaaaatatcataataaaaaaaaaaaaatacgagaggggaacaaaaaaataattaatctctagtggacatatggaatgttaataaacaaatcgctttatttgagatctcagcaaagaaaaacagatatggagaaatcaataaatg

SEQ ID NO: 126308 - DNA, 695 bp, Arabidopsis thaliana columbia
gtaaacggtatctataagcttgcatatcgaattcgcggccgctcactgggctgctgacgacgtgtctgaatttgttgcaccgctgccgaaatcaaaactgaagttaattggggtacatctccaagacaactgccactggatccttctacacgcaatggccagggaattctgcaatcaaagcctgggatggggagtgcaagattaaaccctggagtgagtggccttcctttaaagggatggccctcaactggcctccagcacatgccaccagctttaggaggccctcacgttcagaaatcttttctacaaaatcaaagtcaatttcagctctcgccgccagcgcaacaacatcagatgctggctcatgttcaagcgcaaggaaatatgactaattcacccatgtatggtggtgacatggaccctcgaagatttacaggatcacctagaggaaacctttatccgatagacggccaacaaaatgcaaatgatggatctattgggtcccccatgccaatccagtcctcaaagcatatcaccatgccgccagtcccgcaattctcttctcagcaacaagcaccacttacttatcccaccactcaccacaaaaacaacccgccaaggaaaagggcccttcctttttctggtccctggtaacagcacacgggccacggaacaacttgtgggacccatccaac

SEQ ID NO: 126309 - DNA, 758 bp, Arabidopsis thaliana columbia
cactaacgggaacaaaagtctggagctccaccgcggtggcggacgctctataactctggatcccccgggctgcatttttgcttggccgctaaagctaaacttcttttttcttacagagaaagggaatttgagcgcagacaacgtattttaaatagaaacctacaatatcccgctttatatattctagaaaaagaaagtgcatttttcaccaaatgcatagaagaatgagacttttatgcagcatactaaccattaccaccattgatggacaagcacccctctttgtctgagcgaattgaacagctctaagcattggctataagtcttgttggacttttggctcctttgaccaggacaacatctctgccacctgatgtaatggcattcaaggaacaactcatttattagacaaatcgctcctgtcttgattagcctcgggatcagatcgaattgggttccttcaacatccatcttcatcacaacaaagtgcctctatttcacactcttcttcaaccagttagcgaaatcaaacccttgaatcaaattcacctttccagctaagtcactcgagtcagactttttaaccggatcgattctgcccatccccctgccctttgttttggcttcacttgcttaccggaacgtgattgatctcaaacgaaaacgtatcgttcctcacccacgctgcgtatggaacagggtcaccttcttcttatcttatacttttcggaaaagcttgtcagcctgaatggcgaaaa

SEQ ID NO: 126310 - DNA, 904 bp, Arabidopsis thaliana columbia
  unsure (1)..(904): unsure at all n locations
ggcggtcccgtgtcgcggaattcccgggtcgacccacgcgtccgatgcacggccggctcaccacatgaacgaacgcggttttatagatgttcgagctgaggttaacagtgtgagagaggacttctacttccatatgaagagcatcagagctcctgattgacgcgccagctatatgctggtcttgtgaacctgctagtgtattcgctgccgaggccctgatgcgttcaaagcagctcatgtgtggtagtcgtcattagtagtaaccagcgtgtgggagagagtagaagtctcggtgtcattcggtacgcgacgtgaattgatgccagcgttcgcattctcgcgggaatatgctagaagactcttttcaacatcggactggagcccgccaccctcagagctcatgtgttgnaatttcgctagaacagatcgtcgattgtgacactcacagtnacatcgtgtgaaaattgacatgggatcggaggcgcaatattttggaggaggcgagtagaaaacatcacgactgccatgctgtgcacgtctccttgcgtacggaggctactgcaagcactggctgagtagccggaggtgcctgtggggccgtgctgtctaagcggccgtgcaccacagttcacaagagtctccaagaggcaatgtgtgtggcgcgagttctggtatcaaagagtgcgctagtccggggacgcaccgatgggactttcgaagacttgcggacggcgatatacataactttgccgatctggacatggaagaggtaccgattaccgtcgggaggtaacaggtgcatcaattatttactcagtcaatcgagaggccaccataccttcccggtggctataaaatgtatggcgtgctgctcgacaatagtttggttgggggcactctcggt

SEQ ID NO: 126311 - DNA, 247 bp, Arabidopsis thaliana columbia
  unsure (1)..(247): unsure at all n locations
ttacactactcactatagcggaaagctggtacgcnttgcaggttcaccggtccggaaattcccgggtacgacccacgcgtccggggaaatgctttagtgattacctgaaaaaacacgtttttgtagtcgttgtatatgaggttaactctgtttgagatgaatactgccatgagaaaactatcatcaaccttctcattgatggacactttattgtaatttgggacattttaattagccttctatcata

SEQ ID NO: 126312 - DNA, 943 bp, Arabidopsis thaliana columbia
  unsure (1)..(943): unsure at all n locations
aaagagaggcgggagggacgaagcgagaaacacggggggaggcgggggggggagaaagaaaagggagggagacgcaccagcgaaagaaggaggacggaggaacccaggaggaggggggaaaagggggccgcaggagcgcgcgaccaacaagcgcgacggggacgtgcgggccaccagaaaaacaggggggcgggaaaggcgccggaggcgagaagacgaggacgaagcgaaggaagaagggaaaggggaaagcgcggcgcacgcaagggggcaagaagaaaagccggacgcccgccccggaagcccgagacgggggagagaagagccacagggggggaggccacggaagacaagaacgaagggacaaccacgaagatgggggggcaggggccaaacgcgaaccatgaaggacggcgaagggagaagggagggagacggacagcgagaacggggacagcgcgcaagaataaaccaccgggggccaccgagaagacaggggcacaccgggaagggggcaaaaacacaaccaggggggaaaacaagggagcaacggggcgaaagggggacagggggcgaaggggcccagaaagaactcgccaccgaccgggcggagaaaggaggccgaggaagacgccgggaccccagaagcgaaccaagagcgcggagaggagcgcaaagacgcgatcgaggggagcggacggggtgaaaccaaaacgggagcaangaagaaacaagagacgcaaaaagacagcagggggcgaagggggccacaaacagagaggcccgaaggggggcggncaaaaagggagagcgggacaaacgggcggggggggaagacgcccgacgcagaaaagggggaggacccaaggaggaagaaccaggcggagaagcgaaaaaagaacagcccccgacggcggggggacagacaaggcgagggaggacg

SEQ ID NO: 126313 - DNA, 753 bp, Arabidopsis thaliana columbia
cacccccctcgaggtcgacggtatcgataagcttgatatcgaattcgcggccgcgggcaacgaaagattcaagttttttgcggcggtttgagtgaggtgttgaagagtgatacaatggaacctcatgaagcacaaacgtttgtgaacaagagaaccctttatgctcccattgagccatatagcagtggaaatttaaaggtttcagatgttcacactctctactgggagcaatcaggcaaacccgatggacacccggttgtttttcttcacggcgggccgggaggagggacggctcctagtaataggagattcttcgatccggagttttatcggattgttctgtttgatcagagaggtgcggggaagagtacaccgcatgcttgtttggaggaaaacaccacatgggaccttgggaatgatattgaaaaactaagagaacatttgaaaatacctgaatggctggtttttggaggatcatggggaagcactctagctcttgcatacagtcagtctcaccctgacagggtactggtttggtccttagagggatctttttgttgcgtaaaaaggaaattgactggtttacgagggcggcgctgctgctatttaccctgatgcctgggaggggttcaaaaatcttatttccgaaaacggaaagaggtcgttgcccttgggggaccccgttatcaccacaaagaattgaaactcctggatggaatctggggaatttacattaccgcccaccttgcaaag

SEQ ID NO: 126314 - DNA, 383 bp, Arabidopsis thaliana columbia
aacaaggaaccggcccggggacaaagccttggtacggcccagaggcgggccacgggcacaaaggaaggaaaaagccccaagaccgcccagaaaagacggacaacaacgagaccgggaaacccaaaaacacaaccgcgcaaccaaaacgcgaagccacccgagggaacacggccgcaaagagaaccaccgagaccacccgaaaaaaggcgacacaaagcggacaaggaaccccacaggaaaggccaaggccaaacgaagcccaacaacaccgcgcagggggacaaggcaccagaaacgacaggaccagaaccggaaaggaaacgaaccacagaaaagaccgaacggaagccgaaaagccaaaccccaagaccagagacacaaaa

SEQ ID NO: 126315 - DNA, 737 bp, Arabidopsis thaliana columbia
  unsure (1)..(737): unsure at all n locations
cccccctcgaggtcgacggtatcgataagcttgatatcgaattcgcggccgcgggcaacgaaagattcaagttatttgcggtggtaagagtgaggtgttgaagagtgatacaatggaacctcatgaagcagaaacgtttgtgaacaagagaaccctttatgctcccattgagccatatagcagtggaaatttaaaggtttcagatgttcacactctctactgggagcaatcaggcaaacccgatggacacccggttgtttttcttcacggcgggccgggaggagggacggctcctagtaataggagattcttcgatccggagttttatcggattgttctgtttgatcagagaggtgcggggaagagtacaccgcatgcttgtttggaggaaaacaccacatgggaccttgtgaatgatattgaaaaactaagagaacatttgaaaatacctgaatggctggtttttggaggatcatggggaagcactctagctcttgcatacagtcagtctcaccctgacaaggttactggtttggtccttagagggatctttttgttgcgtaaaaaggagattgactggttttacgagggcggtgctgctgctatttaccctgatgcttgggaggagttcagagatcttattccagaaaacgagagaggtagtagccttgtggacgcgtatcacanaagattgaattctgatgatctggaaattcaatacgcagctgcaagagctt

SEQ ID NO: 126316 - DNA, 795 bp, Arabidopsis thaliana columbia
tggaaagtttgaatcaaattcgccgccgcatcactcccgaataacaattaccctacttatttttttcgagattgtgcgagcctgaataatcaaaatggttgtgcttgctgatgccattgtggtcaagtctgggaaagtgatagcacccaaacactatgcggatatgtcccgtatcaaaatccaaggtctacttgccgcttttcctaagctggttggaatgggaaagcagcatacctatctcgagacggagaatgtgcaatatgtttatcaccctattgaagctctgttcctgcttcttgctaccactaaacagagtgacattctaaaatacctggccacccttactttgctctccaaacttgtacctgagtattccatgtctgtagatgaaaaagggatttccagggcctcttttgagctcatataagcatatgatgaagccatatctcttgggcacaaggaaagtgtgacagttgcccacgtgaaacagtcttgtgaaatggaaagccatgacgacaagttgcataaactggttatgccgagccggatccatgacaccgatgacgcgaacgaagccctatgggttaatgagatttgccccaaagcacggaatgcaaaacaattaacccccacgaaggatttctccgcccccattgggtttctcaatgggggatccctgggaaagaaccttggaaacagttggttttttccaaatcgggaattatggaacctataattctcctcttttgctcatgcccgggaatgggtgggtttcatttagagaacaagttgggt

SEQ ID NO: 126317 - DNA, 501 bp, Arabidopsis thaliana columbia
acctcctgaacttatcctataacggacaaaagctggagctcccgcactggccgccgcggtagaccttctggatccaccggactccccgaattgccggactccccggaccaaagaaacaaaggtgcttgctcctccttctattcggactgattcgcatctgttggatatcgcaatcctgcttctcttatgtcttctttcctacatttttggtctatgtctcatggaagcagaaaagccatacggatcatcatccttaccaccatagaagacactagggccttgattattccgacaggaggaccttctctggtcatggcgaactccagcacgacgatttaatggagcaccgaggtcttgccgctctagaatcactccgagactttaactatgtctcaagacgccggccttggcatgctgcttagctcttgtagtccgatgaaaacgcactcttattctaacctaactggatctgaaacaccgggatcatatctgacctcatta

SEQ ID NO: 126318 - DNA, 524 bp, Arabidopsis thaliana columbia
gaggctgaaacccggaagcagaaacgaacatgcgcacagcccacgccccgcgatccgagagaccacaaagggccgcaacgggcaccggacaaccacccgggcccgaccccccagacccacaccggacccccccgcccgcaacccccccccacggcgcacccgcccagcccgcacacgaccccaaggcaccagacccacaggaccgcaccacggccacccgccgcgaccacccccaaaacgcccccccagcaacgaccccgccacggccaggacgcgccaccacggcaacagggcccgccccaaccggcgcccagcgccacggccacaccaccccagacccccgccacccacgccacgaccgcaccgcgaacaacccccacagcagggcgacaaacaacccggcccccagaccccaaccagcacggaaacaaccgccggcaacccacaccagcggacccaccccccaaacacccccaaacgacacccagccccggccacccacccccacaccgcaagcacccgcc

SEQ ID NO: 126319 - DNA, 1069 bp, Arabidopsis thaliana columbia
  unsure (1)..(1069): unsure at all n locations
nnnnnnnnnnnnnnnnnnnnnnnnnnnnnnnnnnnnnnnnnnnnnnnnnnnnnnnnnnnnnnnnnnnnnnnnntgttttcgtttccgcccgaaaacaagactccccttgttttttggtttctcatttgtgtgaagagatcaacgcttcacacaacacaccctataaaatcaagaggggaactaagccaaaaacttatttaaagttcctgaaaaacggagaaaacattccgaccttttggagtcacttccccttattaaaactggtatttgggatactctatgaaagaacccttttgctcatatggattcctctcttcgccgatttccttggcacaattccacgaggtttgtaaagctctacccgtgataccctctctaggtcttaccccatcttacttgctcgttcttacaaaaagaacccacccttgcttttgggaagcggagtgccttgggcctaaacattcaatagagttgcgctctatttccatacatttgtggtaaaacatgttgtagcacctcttccatttttctctttctttcaacgcgcgcaacccctttgtggaatcccctctttttataccacacaagggcgtcatgacgatttaatcacttgatccttgccatcaaatgtggttatggaaaaacccttaaacattttttcttttttatcaaatgctgtctttgatagaaacacccccccactatgggattctttatacttaatttatcccccccgggggtgtgtcatagaacgggcccatatttccccttaccgctgggaccttttgaacaaattggttggtgggcaacccaggcttttccactctttttattgtaaatcatatgctttggaacccgttggggattttcaaacccggcaaatcttttggtttaggagaaaatccctctttaaacacctaagaggaactctttgaatttttcaatagcctttcgaaaataaccttggtatcctctcttttgggcggttaaattccatgtggggggaggttcacatgagcggaaaaaatggtcttcaattacctcatcagtgcctcctagggtaagggtc

SEQ ID NO: 126320 - DNA, 850 bp, Arabidopsis thaliana columbia
  unsure (1)..(850): unsure at all n locations
ggtcgaggtttcgatcgtctgcaatcgaattcgcggccgcgggcaacgaaagattcaagttttttgcggcgttttgagtgaggcgccgaagagcgatactatggaaccttatgaagcagaaacgtttgtgaacaagagaaccctttatgctcccattgagccatatagcagtggaaatttaaaggtttcagatgttcacactctctactgggagcaatcacgcaaacccgatggacacccgggtgtttttcttcacggcgggccgggaggagggaccgctcctagtaataggagaattcttcaacccggagtttatcggattgttctgtttgatcagagaggtggggggaagagtacaccgcatgcttggttggaggaaaacaccacatgggaccttgtgaatgacattgaaaaactaagagaacatttgaaaaaacctgaatgggcgggttttggaggatcatggggaaagcacctctagcctccttggcatacaaggtcagggtttcaaccccttgaccaagaggatacctcgggtgttcggggtctcttttaggagcgcggattctttttttttggcacggacgctataaaaaaaagggggagaatttggacccctgggggtttattaaaccnaaagaggagccgggctagccctgcacttggcttaatttcaaaccccctggaatggccctcgggggggaagggaggttttcaaagaggaatcctttatatttccagataaaaaaccgaagtaggaagggtgtcttcagacccctttggtgcgaacccgccttttttcacacaaaaaaagaactggaaaactccctcgggatggaataccggggga

SEQ ID NO: 126321 - DNA, 649 bp, Arabidopsis thaliana columbia
gaaaaactggccaataaactcgcggtccgaaaacaaagaaaacccaagggcgcctggacagtgttttgatgcctttttattacaaaggacgacctgccgacaagtccaatagccggggggtgaaaaactgccgatctcattcttgggatagaagtcgcggagaggctatcaacaatgggaatagcactgaattcgctaacacaccggatggagacaatgcaatccccacaagctcaaacctggtgccagctattcgcacatgagttcatgggcacttccttgctcctatgcttgctcggtggaaatcacgctgaccccttcctctaccgtacaaaaaccatccgcatattaccaaccatccaagctgtgaaaactggtgctctaccggcagaaactaagctgccagagctacgtccaccaacatgacatcatggagaagcttgcatacccgcgaccgccttacaaaggacaattctttatgtctcgctgtaccttatagccctcggaactggtggagtaaaatccactacctctgcatttgggtccgaccagctcgatgacaaagatccgtaaagagaagcccacatgggtctcttatgacacagggacaacattctttaaaagcagtgggggacattattgggctggg

SEQ ID NO: 126322 - DNA, 739 bp, Arabidopsis thaliana columbia
  unsure (1)..(739): unsure at all n locations
cccccctcgaggtcgacggtatcgataagcttgatatcgaattcgcggccgcagaagatgaagcactacagtcacggaattgatggtttacgaagcggtctttcaccttccgctaaacctttcgcaatcggttcttcttcttctcctgccttctctctcaaatctgaacacgaagattctatttggggtgattatactttagacctttcctttttatcctctgatgatcagagaagtggtctcgatgatgatgattcgttatctaacttgtctcgcgatgttgagactaataaagaaggattggttttagaggagaagatagctagttctggaaaggttttggtaaaccctaatccaagtttctcgaaattgcctgaggtattgatgaagtcctcagatgttgttggtgatgcgaagttgggtttgtcctgtgtctctgagaagtcttctacggagtctgacctagatgagtctgaggaagattctccttgttggaaaggaatgctttctcataagagtctggcttctggtactaaatctatgacttccaggcgttctactgatgatcttagtgggtttcgtaagttgaatcctttggcacctcagtttataccatctagttctaagaagaaacttgaaacggatggngagaaatgtgaagagactagttcttcgtcgttgaagaagtctttgtcctcgacttttccgtcgtcgtctggagaatttgatttaactgacc

SEQ ID NO: 126323 - DNA, 775 bp, Arabidopsis thaliana columbia
  unsure (1)..(775): unsure at all n locations
nnnnnnnnnnnnnnnnnnnnnnnnnnnnnnnnnnnnnnnnnnnnnnnnnnnnnnnnnnnnnnnnnnnnnnnnnnnnnnnnnnnnnnnnnnnnnnncggccgccaaaagtgtgatgacgtagtagttaacaaaagagtaacagtggtttgtttatacatctcttaatcaaagagtcaggaccataacaagaaaacattacaatcttcagcaatcaataggctccacgtccaaacatttcccaggttttcatctttctgcacaattagtcatgtgtcagccacttcttaggaaaatgatttgtatgccttatctagtctccatccagaaattggagatcttgaggctgttctttgatattttacatgccaacctttctaatatcttcaaggatatgggttcgaaagagaagtctcgtagaccatcaaacacctgtctgcttcagccttcagccataagcttttatagaacagtgcattttggttaatctgctccacaccttgatgctgttggtaaccatttgtaggcacaacctgaccaaagccgttatcttcggttgcaccatattgatacgaacgagaacctgggacagtctcccttgaaaccacagagtacttatccttccttttcacatcaaggtcgacagtcatattgtttgccgtgggaaactgatggtctctaatcgatagcttactcttgtaagtaacagctttagatcatatgaattgtattgtgcaacgctttgatttccagcatgttcctgactgttgttttggat

SEQ ID NO: 126324 - DNA, 770 bp, Arabidopsis thaliana columbia
  unsure (1)..(770): unsure at all n locations
atnnnnnnnnnnnnnnnnnnnnnnnnnnnnnnnnnnnnnnnnnnnnnnnnnnnnnnnnnnnnnnnnnnnnnnnnnnnnnnnnnnnnnncggccgccttttatgttagaagtattaaaaattttgatcttccataactggacagtgtcagaaaatgccaaagtattacaacaaagtttctgacgacaatccacgaacacattaaggagatcgaaacgaaataaaaaccgcacaaactcttcatgaaacgctaagttgtggagtgaaggtggttcttggtactcaagtttgagaggattcattggaatgaagttcttcactgttttgctgcaccatcaaaccttttacctatagaatccagatgttcctatgacttaagaataatccttttctcctcaatcttaaacttctcatcatcatttgcatcacctctttccactgagctgctagatggtggattctcttttgacttctccacatcctgtgatgacatcgaatccaatgacaataaatgaccttcaagattcctttcctgctgactagaatctgaatttgcatctccatcgtcaactttctcataatctgagtggggtttctctttcacagattttgatccagagtgtcttttcttgatcttatgatcctctgaactaacaggagataatgatctatcgccccgtcttttgtcacgtccnagagatgatgaccgcaatctttcatgacgttttgaccttttatctcttgaactgttctttntctctattgatcttga

SEQ ID NO: 126325 - DNA, 755 bp, Arabidopsis thaliana columbia
gcacccccccccgaggtcgatggtatccataagcttgatatccaattcgcggccgccttttactggggtacgtcgcttttctttgactttatgggtcctttcgttccagatttaggctcctacggaactgcttaaatctctgcgatcttgcctcttaattcttctgcctacccgtaacttccggaggattctcttcttgcttttccctgagcttctggatttggtcagagaagccttaagttccaaaggatccggcttttgaagattggtgttaattaagcttctgggctttcatcagtttgtctaaaagcgagtggagtctctcatcttaccctgaacctcttttttttggattcgagcatttctggtttgagaagaatcttgtggaaaccaaagacaaatgccccttcgaggcattgttcaagacttgacagatgggtttgggagcttggctaggacgagtttccattttaggctctccagccttcataaagggaaagcccaaggttcttcgctccgagagtattcgccatcccgtgatctcttgccccctgtgataggtcacaccagcacatgggctaatcttcctccagagttaccctttgatgcgatcccaagaccagaggaaacggagagcactggcccgccacaaaacccggccgtggcttgggcctctcccttcgcccggctttggacaaccatttccccccagaaaaaatggctttcgggggcccctgcaaactcctgcggggcaa

SEQ ID NO: 126326 - DNA, 971 bp, Arabidopsis thaliana columbia
accctacaaagtaacaacacggagctccaccgcggtggcggacgctctagaactacggatcccctttgtttcagtaattcgcggacgcctcaccggtcatcaaaacatggtggacacctatcttcattacccccgccacccccaaaaccaatggaaaaaaagctacctcttccgagcagtccacaggcatgcataacgggacacaaggttgccttcaagccaagttgatttcacgcggaaagcaaagtagcgcttggaaaactcccaaaaaaactaaggttgagtgaaaaaaaaaaatgggggttctaagatgacaccttccccacgggattgtgaaccacattcctatccagtcggtgaattctggggatggaaacaagggctcaaccaatgggtgagggccccaagggggaaaagaggggtcttctgtgttcacaacagtgcggaaaaatactacgggctattgtcgggcgctacaacaatacacgcacgactttttcccggaagtcgctctggcgggagatttatatacaacgaggaggcgacaacaaaccaatcgcatatcggtgtggttgtggcgaaaaggtgcggccaatcttaagtaggaaataaggttggaataaaataaacaacccaatacaccccggagaaacaaacatacccctcgtcggggcggtgggatggcgattcaaacccccctttaccactctggccctgtttttaaaaaaaatacctttctcttcttcaattaaatcaccgcgggaaattctctatttcctcccaacccaaaaaaacccttatgtctgggggaaaaggaggtattaacctgaacatttcgaaagtaaacctgatttaaaaaagggtggggggttgaatactggttaacattacaattgtattaagttttggagggggccccatacggacgtttttaacctttggggagggtaaggaaaaaaaactcttttttt

SEQ ID NO: 126327 - DNA, 917 bp, Arabidopsis thaliana columbia
ctgggcacccccctcgaggtcgacggtatcgataagcttgatatcgaattcgcggccgcaaatctgcaaccttttggaattatttatcaagctcctccttcaaatatggactctgaatatatgcctgtgatgaaaatattgcgaagaagcgaagatagtctgaaaaaagtccaaagtttttctaagtgggctataaaagaacttggggagatggaggatctgcagatgcaatcttcacgtggagatattgcatggaccactgttgaatgtgaaactgcagcagctgggatctccttgagcccttctctttttgaggaccaccggttcaccatagttgatttttggccaaaaagtgcaagacagacgcaaaacctgaggccatggttattgggacatttttactaattccggaggaggaacctaaacttaatcggccaagcatggttgggtgaaagcggaaagttccctgctgaaaatttttaagaaaaagggggggtcctttttgctggtacaatggctcccaacccggcaataaccaaagctggggtacaccggtgccccccctttttttaatggtttaaccaatgggttctccccaaacccaaaaaaattttcggccctgtgcgcccaggttggacaatatttcaccgggaaaagaaacatttttggggattatttccaactctttttcactgggggtttactatacaccccccaaaagaaaaaatatccacaatgtggccttaaaaaaaaaaggtttattatggggggacccccccttattcacaaaaatggagaagcgcgcttcccctttttcacactgggcgcgggttttggaaaaaaaaaatctctttggctacaaaaagggagatatttggttttcccgcaaaacccccctttttttttcccacaaaaat

SEQ ID NO: 126328 - DNA, 947 bp, Arabidopsis thaliana columbia
  unsure (1)..(947): unsure at all n locations
nnnnnnnnnnnnnnnnnnnnnnnnnnnnnnnnnnnnnnnnnnnnnnnnnnnnnnnnnnnnnnnnnnnnnnnnnnntttttgcatttattcgcggccgcgctatttacagagaataaatttgctatatgacactgaatgaaatatgtttacgagtcagaaagtaaaatcaaggagaaatagacatcatcaacgtgctattcgcctaaagatactctgggctaattaaatcgctatattaacagttgtaagatctcttttcatttattgaaatggacctcctttaaccttacctttattagaagatgacctcctctcacgtttcgagtttctggactttgatcccctctggacgctgattgagccacctacttacacgaataaagccctttgtgaagcctttcttgtggtgaatgttcttgcatccaagagaaagactcctcctttttctttttgtagccaggccctctttgagccaccaagggcggaccctgtcttctgcggttttagggaaactggatatcggttgctagaacaagtttatgttaagcctttggaagaacttttggcggaagggaattccccaaacaaaggccaccttgtgggaatccataagtaattcgcagacctaaagggttcctaccccctgggtctcctttcaagacccacattttttataaagggttcccaaaaaatattgtgtggcgaagggctaaataataggaatttggttgtgttcccccccaaaataaggaaagaggcatattcctgaccctatttgggatttcattcccaccgtttttaaaagaaaaattccccaaggaaattttagtaaagccacccccaagaaaaaatgtccctaagaattaaagggggaaaaagaatgattatttttaaaagaagcccgtagcaatggtttttgggaagggggggttgggaaaaatgtgggc

SEQ ID NO: 126329 - DNA, 793 bp, Arabidopsis thaliana columbia
ccccccctctggtcgacggtatcgataagcttgctctcgaattcgcggccgccgacgatgaagcactacagccactgtattgatgttttacgaagcgggctttcaccttccgctaaacctttggcaatcgggtcctcttctttttccggcctctttcttaaatctgaacacgaagaatctatttggggggaatattctttaaaactttcctttttatcctctgatgatcagagaagcggtctcgatgatgatgattcgttatctaacttgactcgcgatgttgagactaataaagaaggattggttttagaggagaagatagctcgttctggaaagggtttggtaaaccctaatccaagtttctcgaaattgcctgaggtattgatgaactcctcacatgttgttggtgatgcgaagttgggtttgtcctgtgtctctgagatgtcttctacggagtctgacctacatgagtctgaggaagattctccttgttggaaaggaatgctttctcataagagtctggcttctggaactaaatctatgacttccaggcgttctactgatgatcttagagggtttggtaagttgaatcctttggccccctccgtttatcaccatctatttctttacaagaaaacttagaaaccggatggggggagaaaaatgttaaaaaaaacaccaattctcttttcgctcggtttggaaagaaaagagtctttttggtgccattcgaacatatttttacccgcatcgctacagtgtaatgggggagaacacataatcggaatttttt

SEQ ID NO: 126330 - DNA, 639 bp, Arabidopsis thaliana columbia
  unsure (1)..(639): unsure at all n locations
caannnnnnnnnnnnnnnnnnnnnnnnnnnnnnnnnnnnnnnnnnnnnnnnnnnnnnnnnnnnnnnnnnnnnnnnnntttttgctttaattcgcggccgcccaaaaggtgattatcttccagtttaacaaataccactcgtgaattgtttttacccccctttatttcttacccattgtatcatctccagaaaacattcctactcttacatttatatatgctgggcgagctaacattctccagggattatctaatctgcccaattcattttgtgaaaaggcacctcctttgaaaataaattttttagaatatgtccacctcttacggaaacaggagattcacttgctggtcctctggacactgcatgcgacacatttatataacataaaagctattggagacagagagaaggcggggaaagtttttgcatccaggaggaaatagccctccttttcttaatcattgttagaacatcttcttttccgctaaaggtacaacaaatactctgatgtctgtcggacacccatttcgtacggcacaaactttggacatcatttgcgaacattgtctgagggaatccccccaagtcatcttttaatcaaaacaaacaaaaccaatggggggacagggagctttcccc

SEQ ID NO: 126331 - DNA, 700 bp, Arabidopsis thaliana columbia
ttggcactcggccccccctcgaggtcgacggtatcgataagcttgatatcgaattcgcggccgcagaagatgaaacactacagtcattgaatcgatgttttacgaagcgggctttcaccttccgctaaacctttcgcaatcggatcttgttcttctcctgccttctgtctgaaatctgaacacgaagattctatttggggtgattatactttagacctttcctttttatcctctgatgagcagagaagtggtctcgatgatgacgattcgttatctaacttgtctcgcgatgttgagactaataaagaaggattggttttagaggagaagataactagttatggaaaggttttggtaaaccctaatccaagttactcgaaattgcctgaggtatcgatgaagtcctcagatgtagttggagatgcgaagtcgggtttgtcctgtgtctctgagaagacttatacggagtctgacctaaatgagtctgacgaagattctccctgttggaaaggaatgctttctcataagaggctggcttctgggactaaatctaatgacttccaggccgtcctactgatgatcttagtggcgtttcggcagtcgaatgcctttgggccccccaggtttacgacccattctacctctttgcgaaaggaaaacttcggccacccgggttggggggaacaacaacgtgtggaaa

SEQ ID NO: 126332 - DNA, 800 bp, Arabidopsis thaliana columbia
  unsure (1)..(800): unsure at all n locations
nnnnnnnnnnnnnnnnnnnnnnnnnnnnnnnnnnnnnnnnnnnnnnnnnnnnnnnnnnnnnnnnnnnnnnnnnntttttgcttttattcgcggccgccaaaagtgtgatgacgttgtagttaacaaaagagtaacaggggtttgtttatacatctcttaatcaaagagtcaggaccataacaagaaaacattacaatcttcagcaatcaataggctccacgtccaaacattttccaggttttcatctttctgcacaattagtcatgtgtcagccacttcttatgaaaatgatttgtatgccttatctagtctccatccagaaattggggaacttgaggctgttctttgatattttacatgccaacctttctaatatcttcaaggatatgggttcgaaagagaagattcgttgaccatcaaacacctgtctgcttcagccttcagccataagcttttatagaacagtgcactttggttaatctgctccacaccttgatgctgttggtaaccatttgtaggcacaacctgaccaaagccggtatctttggttgcaccatattgatacgaacgagaacctgggacaatcttccttgaaaccacaagagacttatgccttcctttttacattaaaggggcgacaaacaatatttgttttgcccggttggaaaaactggaaagggtctctttattcgaaaaggcttaactcccttgggtttaggggtaaccaaggctttttggaattcatttatgaaaaatttggctattttggtggcccaaacggccttttggtattttccccc

SEQ ID NO: 126333 - DNA, 768 bp, Arabidopsis thaliana columbia
gggccccccctccgggtcgacggtatcgataagcttgatatcgaattcgcggccgcgtactaaccaaaaaacaccacttttgggcttttttaaaaaagcccaacataaaaagtcttaacagatcgaaaaaaagcaagtaaaagagatagagataggagaaagagagaggtcaatgtccaacaaattagccgacctcctcgatcttaggtccagcaccgcctgaagcagggggagcatcatcgtccataccagaggcacctggaccaccggcttcaccaccagctccttggtacatcttggcaatgattgggttgcagatgctctccaattccttcatcttgtcttcgaactcatcagcctcagccaactggttaccctcgagccattgaatcgcctgctcaatagaatcctcgatcttcttcttgtctgcagccgggagcttctcaccaatcttctcgtcttggatggtgttcctcatgttgtaagcgtagttctcgagagcgttcttggcttcaaccttcttcttgtgctcctcgtcttcggacttgtacttctcagcctcttgaaccatcttctcaatctcatccttggagagacgacccttgcaattggcgacggagaacttggtcttctggcccgggggtcttgtccttcaaccaaaagacattggagggacaccaattgggccatccaatgggccaaaagccagaacttgtcgatcctggggggggaacacccccactagggaagactgggaagggaactttc

SEQ ID NO: 126334 - DNA, 746 bp, Arabidopsis thaliana columbia
  unsure (1)..(746): unsure at all n locations
aannnnnnnnnnnnnnnnnnnnnnnnnnnnnnnnnnnnnnnnnnnnnnnnnnnnnnnnnnnnnnnnnnnnnnnnnnnnnnnnnnnnnnnnncggccgccttacttgcaaagcaagaaagaaagcaatcaataaaaagtctatgtccccgcacaagttttcaataacattatcatacaaacaacaaccacaaaaaatcatatcgtggcaaatattagaaccggaacaaaaacctaaagcggcttttcagagttgtggccaagacgcagatcgcttgatgactggtttcatgagtttgtcttcttcaagagagatcataccaatgtgtgaaggatcttctatcaacattttcgccactaagtaacctgcgattgaccaagtctggtatttccttgcctgttttccaacgtaccttccgagcttaccgtcgtaatactctggccaacagtctcggtgaagacgcgattctatgaggtcaaccgcgcgtcttgcgatctgcggtctccctgtcttaatgcacgctgctgttagctgccacagcaaaactggccaagatccaccattgtggtagctccaccgtgtgttcttggggacacagccaggaaccgatgcgccactcatggcccttcgaggcatggataacaaaatcttggagaggcattttcaccttacaaagcctctggccccacccgagtggcttcaaagggaagggtcccaataacaggggccccatggggaatctggaatc

SEQ ID NO: 126335 - DNA, 615 bp, Arabidopsis thaliana columbia
gggacaaaaaggaacaacaacgattagtgaagcaaatgtggggggctaagggaacatgggtgttagaggcataaaggaaagagaaggaaatggaaaaggagaagagaaaggcttagataaaagaagaactgaatgaaagggcttggtaacaagaatagaaagaagacagatattggaaaaagaaaagacaaaagggaaagaaggaggatgacaaagactaagtaaagagcagacacggcttcattggaaaaaatttgagataaacaagaggagaaacaggggggttaaaaaggatgagaaaatatacgaggggaaaccaagtagataatatgaacagagtgggataaaaaggtcacggaaaaaaaggttaagggaagaaatggatagaaagggcgtctttagagcaaatggagaaaaatcaaatggtgaaaaagaaggtaggctacgaaaggcgatggcacacaaatgggaaaaggcgagataagggggaagaaaaatgccgctgagaaactgattaggcgtgggggagaggcggcatatattttaacggcgggactaaaaagaaaaaatttagttaaatactcggaatctaacatagagagaggtggagaaaag

SEQ ID NO: 126336 - DNA, 705 bp, Arabidopsis thaliana columbia
gcaaaaccctacaagtacaaagcgggctccacgcggggcggcgtctaaataaggaccccttctgttttttccggccgcttacttgttagcagaagaaggcataataaaagctatgttcccgacaagtttaataacattttatcaaacacacaacaaaaaatattgtggcaatattagaaccggaacaaaaacctaagcggttttagattgggccagacgcaatccttgatgactggttcagagtttgcttttcaaagagatcataccatgtgtgaaggatttctatcaacatttcgccctaagaacctgcgatgaccaagtctggatttccttcctgtttccaacgtaccttcgagctaccgtcgaatacttggccaacagcttgggagacccatttttgaggcaaccggcgtttgcaattggggctcctgtcttatgcacgctgctggtagctgccccagcaaaactggcccaagacccccctttgggggtaggcttcacccgtgtggttttttgggggggcaccaagcccatttaaacagatggcgcccccctttcatggggccccttcggggggggttggggatattaaacaaaatttttttggaataggggccatttttaaagccctttcacaaacactttttgggctcacacccgggggggggtttcaaaggggggagggtgcccacataaaatggggcc

SEQ ID NO: 126337 - DNA, 773 bp, Arabidopsis thaliana columbia
cccctctgggaaaacggtatcccaaagctagatcttcaattcgcggccgcgctcgagtagacgactgccgattttcttaactttcacgtaaaccactgaacgccggtattcagctatattgtgatttctcaggtccaaaaattcccaacgaaatggagaaaatggccaaaggatggtttccgatgagcggcactagtagcagtggagatcagcagcagcaaccgctgcaaacaggaggaacgcctctgctagctgattggaatacttacgccgcatcgagagattctgaagaagacaccggaactttaggcttcgatatcgaatcccccggtagatctgccaacgacactggttccggcacctttaatgatgtttcgaaaggagttagagataacctgcagcctgcaacaagcagtatgccttcaggaaaagccttgatgtatttcgggttacttctagcaagtggcgtattctccattctccatggcctcaccatgtttctcccactcatggtgcctacgccacagaagtttgcaatttgctaaacccttggatgtggatttaaaatcggatccttctttgctcttccgggccccgcaaaacaaactgcctacatgtcatccggagaagaggcttccaacaaaccttaagggttcacttgccccccatggggtgggccacccataatattgtactgcgaaaggggggcctaccaataacataaccatatccccactctggggaatcttacactccttggaaattaaaccagg

SEQ ID NO: 126338 - DNA, 824 bp, Arabidopsis thaliana columbia
  unsure (1)..(824): unsure at all n locations
gaaaagttgcagcaccnggagcgcggccgcggtggtagtagttctagaaccagaggaccccctttttgcttttttcccggccgcctcccaaagggagtatatatatgaacaagaaaactgaagtctttttttgcttcgcacatacaaacaccacaggagctgtctgggatgcaggtcatggcatctgaagaaagaagcaagaaaaaagcaacaaaacatagaccacaaggggttgccctgataaaaacagaaagaaaaaaacagaccacaagggaaccaattcatattaaactcgaaagaactgggattctttcatctttagtgagctcaacagcttcaggctcctgataccttataaagattccccgagtaagatcactaaattcctgagactggtcttgaactaagctctggcttatttattcttcatctttttttttccccaaacgaagcttcctaagccaaattccagtgggcccgataatgttaactggttttacaaactatgaagttactctttaaaaacgccttaatggcttttattaccaatacgaatggaggggagggtgttcactggattggccaccttcccaacgtttgcaacagagtaaagacctcaacctttttcaaaatggccgcgcatatacctttcaataaaaaaggatatctttgttaaccancctcacacaattttcccaccaaaatactgtccagaacaatacaatctttgggaaggcttcgtaaaaattccataatcaaacgaaaatgtctcttattcttgggaaggtacaaccactccacaataaaaaggggttttcctgatt

SEQ ID NO: 126339 - DNA, 528 bp, Arabidopsis thaliana columbia
aaaaattttccagggtagaaaggttgggcccaaaagagtcaggagaacgttgagcagtgaggcgaatcggagatatagaaagtacacaaaatttttttcaccttttttaacagagaaaagagggaaaaaagagtgtgaaattgggaaaagaggcgagccaaggagcgaatagagaaggggagaggagagagtaagaactatggaaagtaggagataagggaaaggagaaaagagaagatagagaagagttttgaatctgaaagatggagggaattggaagaaaattagaggaagggaagatgaggaggagaaagtaaaagggcgataaaaagaaaagtacaaggatggatgaggaacgaaggaagtggaaaatagggaagagaaggaaaaaaaaagaattagtgaaaataaaagaggggaatgaaaataagtaagggattattggtgggagacaggggaaaatagggaaatagtaaatatgggtgataacaggatgtgggacaatggataggaaatgagaaagctagg

SEQ ID NO: 126340 - DNA, 771 bp, Arabidopsis thaliana columbia
ttgcaaaaacccttaataagggtacaaagctggagctacaccgaggaggacggacggtcaaaaactggggaggccattttagtttttagaaagggggacaaataaaaggggaaatggggcattaaaaagagatggcggaagaaagagaaaaaaatgaatggaaataatggaataaagaagagaaacaagagtaaatagaggatgggaaagaaggagaaaaaaaaaaagataaaaggctcgaggcaaatgattaatgcgaggaaaagaaacggaaaagaaaaaagagatctaaggaagaggattaaaagaataaaagagacgatgaaggaaccagaagaggatagagcatgagtaaagaaaagagtggataaagagtgatataagagagatgaaaaaaagaagaaagacttagctaacagagaggatgaagaagaaggaggaagggacaaatagagtagaaggaaaaaagacaattgtgaaagatgaaggacgggtagaaggaagctgttgaaagttaataaaagggatgaagaaccgatgagtaaaacatcgagaggatagagagtcgggagggagagaaagagggaaagaggaatgatgaggatagtgcatgagatgaaaataagagaaataaaacaaaagagagagtggaaaagaaaaaatagagagcataatctacataagtgagggcagaaataggtgaagtgagggagaggtaatgacggaaagtagaatggaagaaaaagaaaaaaataagaaaagcgggggaaa

SEQ ID NO: 126341 - DNA, 995 bp, Arabidopsis thaliana columbia
ccaggggaaggttaggcaaaaaccgcccaaacgaagagcggaaggcgaacgggcaaacgccaagagtttcaaacacatagagcgaaacaaagaaacgacggggggacagggaggagaacacaaggaagcggccagcccagcggcccgagacaagggaaagaccagagacaagaagacaacaagaaagacaagacgaaagcaaaaagaagggaggagacacacagaaaccgacgggaaggcaaaacaaaagcacccaagagacaggaacgccaccgcgagggccgagagaaaacccagagacaagaacacggacccgcggaagaggacaacagaaacacagccagagggcacagcgcaacacgcgcggcaacgcgagaccgaacacacagagcgcaaagcgggaaacaagagcgaggaccgcgacacgcaaccgagaacgagagccgaaggcgaaagggaaggggacaagaaagaagaaagaaaatagcaaacgcgtaacaaacacgcagggaggaacacggaagaacacggaccacgacgacccggaagagcgacagagagcaagggaaggcagcaaaagcgcgggcgaagacacaacacacagcacaagacaacgggaccaagagcggacgacaaaaggcggacggaagcaacgccacaggcgcgaggagacgagaacatgccagccgaaggcacacaaggcggcgacaacggacaggaaccaagccgcaaaccaaggaacacccagacaacggaaagcagcacgtagaggaacaaaacgacaagcaggaacgaggaaccgcatgaacgagcgcgatcgaaaacaggacggaccacgaacgcacacacgggagccagagaagagaccacggagaaacaacgccagcggacacacaacacgggccgagcggcgcaacgcggcaaacaggacgggcgaaaggccgccacgacggccgaaacagagagagagagagaaaaggcggcaggcgaaaaaa

SEQ ID NO: 126342 - DNA, 659 bp, Arabidopsis thaliana columbia
  unsure (1)..(659): unsure at all n locations
gtgtattattttattattgtaatattgggtttgtgtattattgttgttttatgtgttgttagtttatgttttgtttgttgtgtggttgttggatgagtttatgttggttaatggtgtgattattgtaagttggatggagtttgtattggtagtgtatttgtggttgattggtttaagtgttttttggtgttatagtattgttttgttgttgtttggtttgtatgtttgatgtgtgatgagtttgtgattgattattttgttggtaattgattttgatgtgatagtattatttgtgtatgttatgttgtgattgtagttgatttgtaaatggtgtgattgtagttggagttgatatgaaaagggtaagggaatttgatgatatgtgatatgtattttttgttggtgtaatattgcggtgggttgtggtaggtatacgtgttgtggtatgtagggttatgttaatattactagtgtttagtttgggatgttgtaggtttaataggtagagtatgtaggtagtgtttgtgttgttatagataaatgtgatgggtttgggattatgtgngatgatctatactttagattgtagggtatgtgagggtagtggatgtgggtagagatgtgtattggtgaatgtattgtaatttattgattgagat

SEQ ID NO: 126343 - DNA, 563 bp, Arabidopsis thaliana columbia
aaatggtgtaactacacttaatatatcttgttttttcaacccatttttttttttaaagaaagcaatggaacccactttttgatattgattctaaaaaaatttttttacctgtttaaaaatatgttgaaaaaaccccctcaacaattggtttcccgcctgaaactctccattttttgcttttgttttgaacccctgttgttttttgcaaattcagataaattttttgaattgaaaagccccaatctggaacttgtcccaatttaagcgtttttaaattcgggtactcatgtaagagggccattccattttattgagaaagatatcttcaatctcggaagggaattgatgtataacaacagtgccattcattatttttatatctactatacttttttcttatcatttagtttttcttctttggttatcttatactttaatctgttggttgaataacctttcttttgttgagaaaggctccttttcttttaactttcccctgtttggaaaaaaaggtttttcttcgaagttttttttatccacaccttatataattttttttaatt

SEQ ID NO: 126344 - DNA, 390 bp, Arabidopsis thaliana columbia
tcgaattcgcggccgcgacgtctcgccttaccatacaatttaccattgttctgacaagaaaagaggacctatggggatggtgcagaagatggtgttgcggcccgaaaaagccgctgcagaaaccgacctgcacgacgtcggcctacaccgcctgccacacgtcctccaagcctcccagcctctggctgtcgccccacccgcagtaccggatcgccactagcacgatcacagccttcccgaacattgccgaccgccccccaccccggagacctgcccccgacgcccacgcgcacttcgaagctcccccgcccctccccgcccagcgggccaccccccacctctccactggccgacccccgccatcctcccgcacacctcaccgcccggggc

SEQ ID NO: 126345 - DNA, 295 bp, Arabidopsis thaliana columbia
gaaaataggacccacacgacccagacgaagcacacaaaacaaggggaacagcaagcgaaacagatttatcacaattttcccacgaagcaacacgaaagaccgcaacacaaggggcacgaggggggcgcaacaacaggaaaaaaaaaccgacaccacaggaacgcagagaccaccagcacagtaaagacaaacaaacggcccaagacaagcaaacaaagccacaagagacaagacgaaggacacaaaccaacacacacaaacgacccacgaccacacacaacaccaaagcagcaac

SEQ ID NO: 126346 - DNA, 529 bp, Arabidopsis thaliana columbia
ccaaccgcaaaccaccgactttttccctttttttccccaaaccgactcgaatactgcccgtgggaaatatgccaacaaccaaacccctgaaaaagccccacctcccctaacgggccatcaaaaacccgcgagacggaggacttgagagcagccccacccggagaatcgatggaccaccgtgaatggaaactgcacaccgggacccctgagccctcccctctgaggagcagcgcccaccataccgatttggccaaaagcgcaaacacagcgcccaaccgaggcacggaatcgggaataccacttacccgcacgaagaactaacataactggcacgcatgccggcgaacggaagccccgccgagatcccagaaacggcgtcctttgctgcatggcccaccgcatacagcaggacaccgccccttctatgcaacacgccccaacagacccgaccgccgcgaagacccaaaaatccaacacccctccctgcgacgcaccccaacaaacaccaacgcctacccgaacggccaat

SEQ ID NO: 126347 - DNA, 1029 bp, Arabidopsis thaliana columbia
  unsure (1)..(1029): unsure at all n locations
ccctttccaaagttaacaaaaactgcgagcctccctcgtggtaggcgggccggttttataaactagggatcccccttttttttatattttcgcgccgcggcattttacccgtaagaaatgtggttataaagttaaataacgaaatttgacatccattcataaagtataatctcgggtaaatagacattatccttgtgtcattggtcaaaaaagacattaatgttaatataaatctttcttcttcacagatgactgcttcttcttcttatattgtttatagatgcacttgatgaagcctcattttcacggaagccctcaacaaccgatatgagtttacggtattgaacccgtgcttttgtgggttgaaccctctacctaacacgagtaaaagccttttgatacctttcctctgtgttggtttcttccctctttaagataatcaaactcttctttcctgggggatccctagggcacatattttgattacacggggggtccgggttccaacggtttttggtgaccttgcttttttcggttttaaatacccttccttataacccaatttacaccttttggcgggtgtttacctaaccctcccataacaaaggtaatattttacccttcgcgaggtatagaattgctcccgcgtcacatgtatcccctaattagactggaacctctggtggttccgcggtcggtaactcttgtgtttatatacactctgggacacctcnctcaggcctagtgatgataggtcttctcttcttctcatctatacgcgatatacctcatctccgcactagatattctttttaactcatcatcactatcctttttcttttctcttcgtgattctgtttaatatagaaaaaacactcccttttttcttctctatgtttttntctccacccccccccagaaagatttccttcttctggcaatatgtttgggggtgagccccccccctctccttagaaaaaagatctccccccccgcctctcggggtttttttaatttttttgataaacc

SEQ ID NO: 126348 - DNA, 1069 bp, Arabidopsis thaliana columbia
gggaaggaaatatagggggaacaacggggagcaacaagggaaggatgcagggacgaaaagagaggaggcggacaccgaaaaaagcactgggaatgaggaaaaggagcaggaacacaaaaacaaggggaggagaaagaaggagaaaggacgagaagaaaggaagaaaggagaagaagaaaagaaggcgaaaaaaaagaggggaggaaaaacgaggaggaagaaagaaaacaaaaagaaaaggaaaagggagaagcaagagagaggcaagaagaaaggaacgccaggaaagaagagggagagaaggagaggacggaagagagggcgggaagagagaagaggcaaaggaaaagacgaaaacaggcgagggggaacgagagaggaacagcacacggggaagaggacaaaagaagaggaaaggggaggaaagaaagaggaacggacgagagaggaggaaagaacggagacggaaaacgacgaatgagaagcagaagggagcgacgaaaccgaggagaaaggcaaaggacaaagagcggaaaagcaaacagaggggagagaaggaaggagaggcgaaagcaaaggcagaaggcaccgaacagaagggaagaacggggcggagaatcagagaggagacagagaggaccggagaggaccggcgacaggggatgaaacgaaagagacagaaagtcgcgacgaaaaagacgggcgaggaagagagcaacgagagacgagagagagacaaggcgagcacagacaaaagcaggcgaggagaaaagaggcagaggagagaggacgcagaaaagagggaggaaaagacagagcggagaagacagaagggcacgcgagaaaggaaaggaacaggaacgaaaaagggcgagaaaagggagcagaaggaggagacacaaacagggcagagagaaagaggaccaaaggaaaaagggaaacagagaagaagggaaacggagggaaaagacggaccagaagaacaaagagaaaaaaagaaaaggagagaggggaacagagaaagggagaagaacggaaaggaacgaggcgagacacgaagaaaaagagg

SEQ ID NO: 126349 - DNA, 501 bp, Arabidopsis thaliana columbia
gcaaacttggggttaggaagtcataagtggaggttaggtgtagggattttgttgggaagagaggaatggggggataatggggggtgggagaggagggtagagggaaatggtagaggataagggagaatgatgtaggtgaggggagggggagaaggggagaggggtagggaaaagaaaaagggttgtaggggggggaaaggtggagaggggggggggtgaatgggagagaagaaatggagaggaaatgtgaggaggagagagagtggtgaagagggtgtggaggaggggggggaaaggaaaggaatgtggggggtgtagagtgaggttgatgtgggaggtgagagaagatatgaagagtgagtggaagtgaaggagaaggagagaagggatagaggaggggtgggtgagagatggatatagaggagaagaggttgtggtgttaagatggagaaggaaaaagagaggattaaagtgggaagaaggggaagtgagaggtgattt

SEQ ID NO: 126350 - DNA, 638 bp, Arabidopsis thaliana columbia
acccttcgaaagttacaaacgctggagctccaccgagcgtggcgggacgcttctagaacatagtgagatccccctgtattgctttttttcccggccgcttctctagttttttgctcagtgtctggtcttagataccttgtagtttccaaatcttccgataaaaatgtcgggtaaaggagaaggaccagctattggcttcgatcttggtaccacttactcttgcgttggagtatggcaacacgaccgcgttgagatcattgctaatgatcaaggaaacagaaccacgccatcttacgttgctttcaccgactccgagagggtgatcggtgacgcacctaaaaatcaggtcgccatgaaccccgttaacaccggttttgacgcctaaaggttgatcgggcgtcgtttttttgacagctctggtcatagtgacatgaaattgggggccattcaagaattaaagcccggaccctgcccgataagcccaacggatcctactgtccgaattccaaggggtggaaaaaaaaaaaaaaggttcccccggcctggaagggggaatttcctttccgcatgggggtgctctaatcttaaagaaaaggccgctgagagaatttaggctctggagggcctatatacccctt

SEQ ID NO: 126351 - DNA, 440 bp, Arabidopsis thaliana columbia
agggaacagaacagaaaggcaaccgatcgcgaagcgcgacgactcggaccaggagcggaagcgacacgaagcgacagcgaaggaagcccgaggacacggcacggaaaagacacacacgcacggaaacgaaggacaaccagagagagaacgaaagaacaagcgcaggacgcacaccaagggacccacaggcgacgaacgctcagagagaacccgcaagaagggaggaaccaaagcgaagagagcaccacagaccaccaacagcacacaagacggacgcacgacgcaaaacgggaggcagggcggcaaaacggacggggcaccccgaacaaccgagcgaaccaaacagacgaagacggacgacggagacacgcgaaggaaggaggacaacacggaagaaaagccgagaggaccaacgacaagacggcagcaacgaacgaagg

SEQ ID NO: 126352 - DNA, 737 bp, Arabidopsis thaliana columbia
aaactactaagacaaagccgaccacccgggcgcctttaaactaaggacccttttattttccgcccaggtttaccttcaggtccgaaaaggaaattggaccttgggggtcctaaaatggatgacaaacaggcactaaaaaactgaaaaaagcatcactcgccgaattacccttcgccacttggaaaatggcaaggtgtccccaccacttggccccatacctaaaaattaacttagattttccacctccgagcaagcattgctgctgaagaagtgattttgctaaaccattcttactgatctctaccaaccaaaataatcttggccagtttacacaacccactcggggtttcggcagttgttgctaaaaaattcaaccccccttgggatccaaataaacccattggccctttaatttttctacccttatataaaaaggaatttggggaaaaccccactttacccaactatttgttaagaacctcaaatcaacttaccccgaagtaccctctaaccacctctattccgaataaaaaatttcacccctcctatcaatattttatattaatagaaaacctctaaaacctaatgttgccccaaggaaagagcccccaaaaaattggcccctgataatggtttttaataataaaaaatcgatattgccctacaatataaaagcacagaattggtttccttgtagaccccctcaaaaataataccctccgtggctatttaccacc

SEQ ID NO: 126353 - DNA, 689 bp, Arabidopsis thaliana columbia
  unsure (1)..(689): unsure at all n locations
gcccgaaaatcccggggtgagacccacgcgtccgcgcagatccgaacttgaaaccatatatacaactcttctcaaggccaacatggatgctgttgcattctggaatcaacaaccactagctgcaagggaatatgcatcagccactgtaattccagccagtgaagttgttgtggacatttcaaacagcgcaaaagatttcattgagaaagaagtgtctgctttctttcaaagtcctgataacagtctttatatgcttccagcaactccccagggacttctggaatctatgggagctaatggatcgacgggacctgaagctgttgcatatgcagagaagaatgctgctctattaacggctagagctggtgcaagagatccatcggcaataccatctatatgtcgcatttctgctgcccttcaatatcctgcaggtcttgagggttcagatgcaagtttggcctcagtgttagagtctcttgagttctgcttaagagttcgtggttctgaagcatgtgttttagaagacttagcaaagggcatcgatttggtccatattcggcaggatctagttgaaagtgccattctctgttagatcatgctttccgtcccagcnaaatatgaagaacactaactctgctaatctactctgacagagatcattcgacagtgtactgactagactgatcaat

SEQ ID NO: 126354 - DNA, 698 bp, Arabidopsis thaliana columbia
cgccgaaataatccgggattccacgctcgacccacgcgtgcttcctggcaccatagggctgcagaaactttgggcggcctctataatcatctgcgcggatataagccctaccaaattccaaggagcccataaattgggagtcaccgagtttgtaaactctatgacatgtgataaaaaccgtgttagcgaggtgatcaatgagatgactgatgggggagcggactattgcttcgaatgtgttggaagtagttctttggttcaagaagcttatgcttgctgtagacagggatggggaaagacaataactttaggggtggacaagccgggttcacaaatatgttcagattcgtttgatgttcttcaccatgggaagattctgatgggttcgttgtttggaggtttaaaggctaaaacacacattccaattcttcttaaacgctacttgagcaatgaacttgaattggataagtttgtgacacatgagatgaaattcgatgagatcaacgacgcattccagctacttcttgaagggaaatgcatcaggtgtgtcttatggatgggctaagtgaattgacttattttatctttccatcttttgcatcaatttcatatcgttcatgtttaaactattttattggtttgttatcagacaagcaaatgccaagtgacagccaaataaaagtcatgattgtactgaa

SEQ ID NO: 126355 - DNA, 746 bp, Arabidopsis thaliana columbia
cggaaaatttccgggggtaccacccacgcctccagagtgtttctaggctccagagggtgcgaaactttggggggcctctagaatcatgggcgagaatatacgccctcccatactcggaggagcacataaatgggaagtcccacatcttcggagatcatttgactggggataaagaccgggtttacgctgtcatcacagagatgcaccgatggaggccttccccaatgctagcaagtggtacgagtccgtggcttcccaacttgctaaaagtttccctggaaaggccgttggagtacaattcggtggctctgctgctgctgctccagctgttgaagctgaggcacctgcagctgcagctgatgatgatgatgacatggatctctttggtgacgagaccgaagaagaaaagaaagctgcagaggagagggaggctgctaagaaggacaccaagaagcctaaagagagtggaaagtcttctgtgctcatggatgttaagccatgggatgatgaaaccgacatgaagaaactggaagaggctgttcgtggtgttgagatgcctggtcttttctggggagcctcaaaacttgtcccagttggttatgggatcaagacactcacaattatgttcacgattgttgatgaacctcgggtccccggacaacctttttgaagacttccttacctcagagccctaacaacgagttcatccagaggtgtgacattgtcgcttttaacaatatttagaa

SEQ ID NO: 126356 - DNA, 750 bp, Arabidopsis thaliana columbia
  unsure (1)..(750): unsure at all n locations
aacgactcactataggggaaagctggtacgccnngcggtaccggtccggaattcccgggtcgacccacgcgtccgctcggtttccactaaagctagtagtaactttgaagataaaacagttcctctaaggggattcagccgagcaatggtcaagacaatgactatggctacaagtgtaccgcattttcattttgttgaagagataaactgcgactcacttgtggagctcaagcagttcttcaaagagaacaatacagattccaccatcaaacacacttttcttcctactttaatcaagtctctgtcaatggctctaaccaaatatcccttcgtgaatagttgcttcaacgcggaatctctcgagatcattctcaaaggttcacataatattggagttgcaatggccactgaacatggccttgtcgttcctaatataaagaatgttcagtcattatctctgctagagataaccaaagagctgtcccggttacaacatttggcagcaaacaacaaacttaaccccgaggatgtgactggtggaaccataactctgagtaacattggagcaattggtggtaaattcggatcccctcttttaaacttaccggaagttgcaatcatcgctcttggaagaatcgagaaagttccaaaattctcaaaagaaagaactgtctatcctgcatcgataatgatggttaacattgctgcggatcatagagttctaagaggggcaacggtagctcggttttg

SEQ ID NO: 126357 - DNA, 730 bp, Arabidopsis thaliana columbia
aattcggattccacgaccacgcccacgtgctcttgaatcctcttaacacaacgccccagacaaatttttctttttcagccaagggctatctcataataggccaagcgcacgctaagtgcgctataccggtcgctcgagctatctggtgatgattacgcgccagaagcactccacggaaggcgtcatgtgcctgacaccgacgattgggtggatgttccaccggcaccaagaataagcgcgtcattcacgtttatcctgcctcacagagctgtggagaagggacgacgaaaaacggacgagtatacacagattggagcgcagcctcacattgaaccggcgttgacacaccactcccatcatatatagaggtcggcaacacgtgaagcgtgaacgacgcaattccacatatgactcgctgaagaccccttagcggcacttcctccatgaccgaccggattacaaccctctccatcgatgagtcgcacttcggcgcagacgagcgccctgctaagggggcccattcgcacaagctgcatcattaaagaaccctggcgaacgaccggccaagcgcgtcgatagccgcgtttttactagaaccaactcttacgatgtggctcaccacataggtgaaattttctgggcacatttgcaaacccacaatgaggatggccggaggactggtgccctgggaccggaggaaggggtatatgacaaatcctggcaaaaaccc

SEQ ID NO: 126358 - DNA, 616 bp, Arabidopsis thaliana columbia
aattcccgtgtcgacccacgcgtccgcgaacctcgccgagactcgccggaatctcgccggagattatatttttgctgattgcgagaaaacgaaggtcttttagctgagagattgttgccggtaacgcacccatgattctgccggggacaatggagagctcagtgagtgcagagagtttgcctattgctgggtcgatccgacccgataaaccgggtgaaccggctctaggatcgccgagattgagagagattactttatctccgttgcagtagacgccagcgaagccgcatggatcagaagtgaaatcccaagactcgaagaacttggaacctggcaagtcatcgagggatttacgaatagcttgcagagccaagaaatcaactgggtcgagaatcgcctccgtgaagaagccgaatcgaagcaggaacatcaaacaccaaaccaacttggtaaatctcatcatcatcttcttcttcttcttcttcagacttagccgttacaggttcaagaaacagagactatatatatacacagagggaagaacagagacgagctgtaaagtagagaaaatgggttttgttttctgatttctcgtgagaggggaaaagtcttcttt

SEQ ID NO: 126359 - DNA, 754 bp, Arabidopsis thaliana columbia
  unsure (1)..(754): unsure at all n locations
catacaagcataacacaattacaaatagctgagtgttgtgggngtaaatcctaaatatatgctacactcaagcaaactatctctgtcagaaatatacatactcttacttcaccgggattgattcattataaatatcaatagatgcaaccttataaatatcatcgcaaatgacaaatagctagacatcgagtcgaaatatcttcttatggtctttctaccatatctgtatatatcgttgccatgcgatcctacccaggttgaatcatagatatcacattattgtttacccgcaatacatacctggctatctactttccttccaccattcctaacacgcgaccacactctngctcataacctgatcatttgtctaacaaggagagtagatccaattactatctgtattcaagctgaagcacaatcaactaggttatcaatggacattcatataaagtatacctatcaacgggcttagtgccgaactttcatatggcctaattacgtgaattgattgcacgggtcctctactgtggattcctttctatgtgtcaaccatcactctatataatatactcctgcattctcgaacctccagtacatcgtataatgcaatacataatttatggatgcttaccacctccaaaagttttatactccgaaaaaagactagtcctctattataccaatattcttattcatctcataagatgtcactaagagcatatctcgccctttctgaattaatctcccccca

SEQ ID NO: 126360 - DNA, 470 bp, Arabidopsis thaliana columbia
aggcccacgcgccggggcaaacagacacggaccgagcaccggctttttgggattttaaaccggggcccccccccaaccacgaaaaaacagcgggcggggggggcggccaaagcacagcgggagaccgccacccccacggccccccaagcaccgaacggcaagagccgacgccacaacgaaaagcgggggaccccaacaaaacagcacggcgcacgacgagacaaagcacacaggcagcgcaacaccagcgccgacgcgccgaagagcagagcgcgaagggaagcacgcccaccaggaagccacgggcccgccccgagaccacggggccacaaccgcagaaaagggggccgccagacgaaaaccccagcgaccacggagcagagcccagacccaagcacacggcgagacccgggaacgcccccacgagaaagggcccgcagcacaccaacgaagaaggggaccgacagaca

SEQ ID NO: 126361 - DNA, 670 bp, Arabidopsis thaliana columbia
ccaatacacggccgcagaaagaggacaaccacacacaaaagtattaggttataccacaaacgaacccgaacaacaacgggggggaagcacagagagaacaagccccaaagcccaacagacgagaacccaagaacaaagacccaacaaacacagccaaacgaaccagaagcaccacaccaacagacaaacggcggagaccccgacagagacccgccggcaacaaaacccggacaaccgaccccaccaccaacacacaccagaagaggcgaaccaagaacccggcaccgaaccaagacacaccgaaagcagaaccaccgagaaaaaaacgcacaagaagagagcccaaccggaaaagagcaccgagacacaccaacccacaaaacccccaaaaccagacacgagccacaaagcggaaagacaccaacggccaagcccccgcaaacagaaccagaaaagagaaagcagaacaccaacgcaagaaccaccaaaaaccaaaaacaacaacggaggaaaaaagaaccgacgaaacaggacccaccgagcgcaaaccccagggcctaaaccgacaaaagggaccaggcggaaccagaaaaccaccgagccgaaaaccgaaaaaaacggccaaagacacagcacacccagaaaaagaaacacgaaaaacggacaacac

SEQ ID NO: 126362 - DNA, 1042 bp, Arabidopsis thaliana columbia
  unsure (1)..(1042): unsure at all n locations
gcggagcgagggacaacagcggcaacctaagcagcacgcaaggtttttggattttcaaccagccgcacgggcggggaacggcacacaccagggggggagaggaggaagcaaaaaagacaaagcagacggagggagaagaccagaaaaaaaaggaaacaggaggcgcacccaaacaaggaaagaaagacaccaatggccaaaaagagcgaaaggaaaagaagcgaagcaggacaacccaaacgacgaaagaagggaggggaaccaggaacgggaaccgcgacgaagaacaaacccacccaagaagacggacacgccgaccaaccaaagaaggacaaccaaaacggaaccaagacaccaaaggaaaacgcgagaagaaacagcataagacgaaaccgaacaaaaaaacaaggacagggacgacgcgaagaaaagcaaaaacacaggcccagcgggaaaaaaagggcaagaccacgacgcgagaaaaaaggaagggaaaaggccagacgaaagacaacccagaaaagaccggcgcaaaaggcggagacccagagcgagaagagccgcgaacaccagcganatgagtgccgaggcagggaaaaacccacaagaggggaaagacgacacaaagggccccagacaagagaggcgaaagaggccagccagaaaaaacaccaagcaaggaagaaaaaagacagaaaggcaaagaggaagggaaaaaaaagcgaaggacaaagggggacaagccacaaacgcacgaagggaacaacgacaggagagggaaacaaacaggaaaaccgaagaagagggaaagaccggagaccagaaacgagggctagagaccacaaaagagaaaaccgcagggggaaggaaaaccgccaagaggccaaggaaaaaggaccgagggggaccgaaggacaaacgcgcgggggaccggaggaagaggccgggaaaccgcgacccaaacaacccaggccacggcagaaaacaaagggcgaagaacaaacaaaggggagaccggacggaagaaagaaccagggccaac

SEQ ID NO: 126363 - DNA, 631 bp, Arabidopsis thaliana columbia
  unsure (1)..(631): unsure at all n locations
ccccccngatgtcgattgtatcgataagcttgatatcgaattcgcggccgcaaaccaacccaatgagtttaatttccttttcttttttctttatgtaggatttgcacaacactactgttttatgagagaaagagagccaaacaaccactgctaaaattcaatgaaatcccatagtagctttgaaggcaggagcatccggaggcggtgaaggcaacaccgtcaacgccaatacaccacttaccgctgccgcaatcgctcctaacacaaatgctggaatgtttccaccaccgaatagttcgtcgaatggtccacctcccacagatattaccatctgagggacgacaatggctagattcagaacacctagggaaagtccttggccggcaccggaattggttgaaaatatggaagctagtgcaaaaggaatgctaaacgtaatggcttgggggataccgaggatggcgaagagagttaaagcaccagctgtgacgttaccaggtggacctgttttagcgccgccgtgatctcgtcggtgattctcagcttgtttcgtaaccacaaccgtcatggccaagcaaatggcgaggatgaagttaacaataccccaaagccttttagcttccttcccccc

SEQ ID NO: 126364 - DNA, 934 bp, Arabidopsis thaliana columbia
aaagggcccaaggcggggagcgaggaaagaaagggggggggggaggagaaaggaaggaaaaaaaggggaaggaaaaggaaagaggaactgagagagcgaggaagaccaggaaaaagaagagagcagacgggagaaaagagagaaaaaggaaaagtggggcggggaaacgaacagaaacgaaacacaaaaagggggggaaaaagaaagcagagagggggaaggatcgagcaagggaaacagggaacaagagagggagacgtggaaaagaaagacggcggaaacagggggtgaggaagaaacagagggaacagaacgaataagaggcaacgggggagggagacaagaaccagagggtagaaacccgggaagcaaacaaaagaagacgaatcggcgaagaggaaaacgagaacgaaggttagagaagggagggcccaaacaggagaaaaggccgggaagggaaatagcagagaaggcccaaaacaggaggccgaggaaaaacggaaagggaagcgaaaggggcgggggaatgggaaagcccgagggaggggaaagacgagaaagagaacaagaaggaacaaaggagaaaagcgaacatgtggggaacaaaaagggaaatgggggagggaaacggggaggaaaaaaagagaaaagggacaagcaacgggggaggagggactgaggcaaggaggaaacgcgaggggaatgaagaggaggggcaaggaggagccaagggggaaagcaggggagaacgggaaaaggaggggagaaaagggagaagcgctagggaataggaaaccagaaaaaggcccaaaaaagaaaggcccgggagggaaagaacgagcggagggggggaaaaaccaaaaaacggacggaaacgagaaaggtgagggaggagaggccaacaaatggggcagaaaaaagaaaaaggggaggg

SEQ ID NO: 126365 - DNA, 625 bp, Arabidopsis thaliana columbia
cccccctcgatgtcgatggtatcgataagctcgatatcgaattcgcggccgcccgccacatccgtgttttagccttacgtataatcacgatgcaacgcagactcgtaaggttaaaaaaagagtatatctacaggaaaagcttggaaggtgatgagcgtaaggtctatgagcagaagcggctgataagagaagcccttcaagaaggaaagccgattcctactgagctccgaaacgtcgaagccaagcttcgacaagaaattgatcttgaagaccaaaacacagctgttccgcggagtcatatcgatgatgaatatgcaaatgctacggaagcagatccaaagattttgttgacaacttctaggaatccaagtgctccgctcatccgattcactaaggaattgaagtttgtgtttcctaactctcagagaataaatcgtggtagtcaggtcatttctgagatcattgaaactgctcgttcccatgattttactgatgttatattggctcatgagcaccgtggtgtgcctgatggtctcattatctctcatctcccatttggaccaactgcatactttggattacttaatgtggtaacaagacatgatatttcagacaagaaatccat

SEQ ID NO: 126366 - DNA, 942 bp, Arabidopsis thaliana columbia
  unsure (1)..(942): unsure at all n locations
attaataacttcttacatancataatataggctatcttaaattccaacactttttatttaataaaaataaataccctattttttttattttaataatacaaaatgtcaataaaataccaataaatttatatatctattatatttatacatatctctgttgtgtattggatagaatcatatgattcaagcgaaggtgaggttaataggaaaaatgtctttttgaaaataggtgggtgttagaataaaaattatttctcatatactatatatgaaaattggttaaattcgttttaaaattttgtggtggactttatataaaaagtaagtctcaaatagaatttttattggggggggcttttgtgtgatcttgttgttgatggatttgaaattttttggtgtttttttataaagttttttttgcttcaaattaggtaaatggaattgggaagggggatttattaggtatattatgtcgatcagagtaatttgtgaaataaggaatgttgtgtttagatcactgggtgattattacttgaaatgaagttttttggatttgaataaaggttaacggtgtagatatttagatggggaagagattttaaaaaatgttatcgttattggtggaacctcgatttttttttggaaagaggaattatgagatgggtgaagtgataaaggtattgggaaaggaagaaagaacctgggttttttgtttgatgggaatttagaatgttttggggggtatttttttggggaaaaaaaaatgggggatataggaatatgttataatgcgaggggtcaatggaaggaaattgcgttaaagggtgaaagttatatttgttttttgatagggggttatattaacaagagaggggtaattgctatacggttatttggaattgcggagggtgagagatttatacagtgggagtataagaatgg

SEQ ID NO: 126367 - DNA, 603 bp, Arabidopsis thaliana columbia
cgacccccacccccgctttcactagtagctctaagggcggaagacatgatcttcatttttttttcggcggcaaacaagccgcgaaaaccggggacgcccactcatacaccatactttcatatgatgaaagaagcaatgatggcccaggaagagaagctcggatcaagcccttatgctatagctaagaagatagaggagaaacacaacgatttactttcagagagttgccgcagaacactttctctacagcttaaaaactctgctgctggaggtaagctcgtgaagatcagagccttttacaagctctcagataccactcggatgattacgaggcatctggactagaagcaataagcagaatatcaggcaagaggatcaagagagcacaaagaggactaggtgttcttcgacaaggcctaagaagactgtgcctgtgaacatacgagaaaagaagaggaaagagaagaacgcgagactccctaagtctatcaaatcttcagttggtaagaagaaggccctgaaagctttcgctgatcgatcactgaggaggaggagaagaagatggaactgcgtgagaatatgaagaactaggctttttagttg

SEQ ID NO: 126368 - DNA, 662 bp, Arabidopsis thaliana columbia
ccccccccgcccccccttttgattgacctgcgatggacgcccccgaattcggtgacgacccacgcgtccgctcagaatctctttcttttctaggtttattactacacatatccatttatcatcaactttagttactaaacaatggcatcaggctcaatgtcttcttatggctctggctcatggactgttaagcagaacaaagcctttgagcgtgctctagcagtctatgaccaagacactccggaccgttggcacaatgttgctagagctgttggtggtaaaacaccagaagaagctaagagacagtatgaccttctagttcgtgacatcgaaagcatcgagaatggtcacgtgccattccctgactacaagactactacaggaaacagcaacagaggcaggctgcgtgatgaggaaaagaggatgagaagcatgaagctgcagtgagacaagaagcaacaaaacctaactacgtatgatcgtcaaaataaaagagaatcacttcagagagatgtgtttttttcaatgtctgacgaatcaatgtttttttcttgcaatttctcatgtttttccctaaaaaatggtttttttttcgaggcaacaaaaaaaaaataacactcgaatttgttacaaaaaaaaaaaaaaagggcggcccgcttcta

SEQ ID NO: 126369 - DNA, 622 bp, Arabidopsis thaliana columbia
tttccttttcgacccacgcgtccgaaaagaatctcaaaggaaagcgaccattttggaaaattcttttttttttctttataattcttctacttatgagtggatgtgtgaagagtagggaaaaagtaccaaaggaaaatatgagtgaggagaagaggaagcaacacttcgtgctagtacatggtgcgtgccacggcgcatggtgctggtacaaggttaagcctcttctcgaggctttgggccatcgtgtaaccgccttagacctagctgcttccggtatagacacaaccaggtcaatcactgacatttctacatgtgaacaatattctgagccattgatgcagctaatgacttcattgccgaatgatgagaaggttgtactcgttggtcatagctttggaggtttgagtttagccttagccatggataagtttcccgataaaatctctgtctctgtcttcgtgactgcattcatgcccgacaccaaacactcactcatcgttcgtcgaggaaaagtttgcaagcatcatgacaccagaaggatggatgggctctgagctcgagacatatggttcagataattccgggttgtctgtgttttttatcacacgactttattgaaaaa

SEQ ID NO: 126370 - DNA, 605 bp, Arabidopsis thaliana columbia
gtatcgacaagcttgatatcgaattcgcggccgcacacgtgtaatcagtgttaatttttttttagcggagaagagagatggattttgggagatggttggcgtcgagagtgaatgagcagatgatccttgtatagaacttggaggtgacgagtcttcccaaaatgtaagcttttgaatggaggacgatagtgagattaagcggcagggagagtgtatcaagatggaaagaaacaccaccgtagaggggaatctgatggccttgcaccaccgtcactacgttcgtttcgccatttctaccaaccgtgaacttgttcatctcaccggaggatagtaggaggttggagtagtgaaggagaagaggagaagcagtgacgtggactgcaaagaaagttgatgggttacggaaatatatcctgaccgtcgaattaagagacaacatgtccgtaagcactccgcttagatcgttccctgcctgcaagttcaagtcccttaccagcattccctttacagtaacctatgggaggggaggatttgcttgctccccagagtttaagagagaagactgtgaacaagaagattccggagaggagcaacccttacgtttt

SEQ ID NO: 126371 - DNA, 617 bp, Arabidopsis thaliana columbia
ccccccgatttctttgtatcaaccagcccgatatccaattcgcggccgcctaaattcaaacttttttctctttttttttttaacttaaccaagacaactacaacgtgtgtgatttcataacctaggttgctgctctttatctccaaccatgtcaatatgatcatcaaactcgatcaacaaggttcgaatttccatcggaacatgctcaaccactagcttctctgcgtacaccgtctctcctctgttgactatcctccccggccgagccttctactttccagattagccgtctcttctccatctccgccttctctaggctccctgaaagactggtctccttaacttcccttatcattttgttgaggaatacattcttgagctctacttttgcgctacctgagtactcactatcctgcccaaccttgtataagtgagcgagccttaagaacaacttccccattttgcaactcctggagggggaggaatgcgacattttttggtaatgaatttgacaggacaaacgccgagaatgtcgtctgatgggaaattgtccaacttttttgcttcctggatatgctgaaacgctattaacatagtccgaagaaaaagattttttt

SEQ ID NO: 126372 - DNA, 1048 bp, Arabidopsis thaliana columbia
ccggtccggaatacccgggccgacccacgcgtccggaacaaccaacactaagcaaaaaagaaaaccccaattaccatagaaaccaccggcaaccacaaaacaccaaaggggaagcgggaggccccgacacccgaacaaaaacccccaaaaggggcagaaaccaaagggcccaaaggacaacccaccgcacagccggcggaagggcacaaccccacaccaaacccaccccaaaaccaccccggaagggggaaacccatacccccacaaaaagggacgaacccccggaaaacacgagaaggccccagagggaaaccccccgggaagaacccacaacccccagggccggaagggaagacaccggagcaccccggggaacgaaaacccccccccaagggcacaaaaataaaaaagggaacaacgggggaacaaaaccccgaaaaacagggaccaagaagcgacacgggccaacaacgcgcactgaaagaaaggccccccaccagccgaaaaccaacaaagccacaaacgcaaagggcaacagcaacgaaaacacgcaacacccaccacgcagcacaccaaggaggaaagacgacaaccccacgggggaaaaacaagacacgccacaaagaccacacgagcgaagcgcggccagaaacaaagagagagggcagaggagcaaacacggaaagaacccccgcacaaccacccaaaccaaaaaacaccccccctaaaaacggccgcgcccccccaaaggggccaccaaagcccaaacagagcccccggcagccccccccacccacagagaaaacggaacgacgaaacccgaaaggagcaacccgacaggcaacaaagcaaaaccaaacgggaaacagccacccgggaaacgcaacgaaaacgacaaccgatacaacccgaaacccgacatacgaagacggggcgacgccaacaaaggccggcgacccacacgcacaacggaggagccgcccccaccgagagaccagacgacacgaaaaacggaagcaagggcacagacggcgagggacacaacaac

SEQ ID NO: 126373 - DNA, 830 bp, Arabidopsis thaliana columbia
gtttcggaattaaccgggaacgactccccgctgcggccatatgaaccacatagcagaacacgcagcccggcgaacgtattttttatttttcaacagcgaaagcgacgcccgcaccacccacgtgtggggatggcatagaccacacgagaattacatatgcgccgcacccgcgctggaagaacccaaaatcaaggcgctctagcacaacagacccatgcgctggatttcaatgcacgaacagtagaagcgcgaatcgctcggtacagtctgcatccaagcagcctccgtacgaagcggaagtgatctctttaccattactcggtacgaaccggcaatgccgagagtagcacaaaccgatatatgccagatgtacaaagacagttccaccgggcataggcatagtgagcaatcctgaaagcaaacgacagcctacaagattatatacctggcaggccggcataaacacacgcgatacgacactgggacaagtaataccgataccagctccataggcgaaggccataatttccaaaacgcacaggttacttagcgactttcataaccaccaaccaggattagcctcgctccataaacagacgacacgagcaaaagggaaagattgtccccctgcagaactaaatagcagccaaatgaaaagaaaagatgcccgagggcttccagatttacaaacccacccagaccccaacacgccgggagcgggtcggcaggatagccacgactttctaataggattatcccaagcttcttaggcccccaaggaccgggctgtaactgagcaatcggacaacgggacccaacatctgctccct

SEQ ID NO: 126374 - DNA, 828 bp, Arabidopsis thaliana columbia
atttggggtataaggggaacccccccccccggaggtcgcgggcccagcgcgaaaacaggcacacaacgacgccagggcggcattttttgttaaagacacaaacagccgaaccggacagcgcgacacaaagcggagggagagggggccaccgacagcggaacacagagaaggaaaggccgcccggagcacagagacaggagacatgggtactaacgcgaggcgcagagaccacaacggagaggggagacaagcggccgcaacacggagtagggaaccggcgaaggcacaccgggagagaccggccgggacgcgacccgcgggaaggggacggcgaaaaacgaaaaccgcaggggcggagagggcaccagggaaacggaacaggagaaagggcgcgcgggaggaaaccaaaccgacagcgccaccgacgggagccgcaccggggcaccacaccaagcgaaagggacacagcaaaaggggacggccaacggcgagaggggaccggaggcacaaggcgagaaggcaggagcaaagagcaagccacaagggcggaaaggcgaggcggccgccgagataagcgaagccggcaccgggcacgggagacaggaaacgggcaacacgaaaaaggacgcgagcgggcgcaggaggcggagggcaacgggcacagcgcgagggcaaagggaaccccagaaaagggaactgcgcaagagggccaaggggagacacagggaaaacaaacggaggcaaacggccgaaagagggccacagggaaggacgcgagaccgcgccaaagggcgaacacgacgaaccccgccgaacgcggagaaggcc

SEQ ID NO: 126375 - DNA, 601 bp, Arabidopsis thaliana columbia
tcgatcagccgatatcgaattcgcggccgcttcatctctccaattcgcttgcttcgattatatctccaccaatgtcgccgccgctgagcggttcgtctctctctcttcctccctccctctctctaattatcaatctctcccatcttcctcctccttcaaatttccatatgcgtataagcttctcgagcaatttattgtgatcacggacctttggaatcgaactattcaatttcaagctctgatatagattcccccgtacgaatccgatttcagcatctgagaatggaattgtttacattttacgcagattagtcagagaagctcacgctaaaggagctaatatcattcttattcaggaactttttgaaggatattacttctgtcaagcacaaagagaagacttctttaagcgagccaagccttacaagaaccatcctaccattgcaaggatgcagaagctggcaaaggaattgggtgtcgtgatacctgttagtttctttgaggaggcaaatactgcacattacaattcgattgctataattgatgctgatggaactgacttgggaattcataggaagtctcatattcctggatggacctg

SEQ ID NO: 126376 - DNA, 651 bp, Arabidopsis thaliana columbia
  unsure (1)..(651): unsure at all n locations
actccgcannnnnnnnnnnnnnnnnnnnnnnnnnnnnnnnnnnnnnnnnnnnnnnnnnnnnnnnnnnnnnnnnnnnnnnnnnnnnnnnnnnnnnnnnnnnnnnnnnnnnnnnnnnnnnnnnnnnnnnnnnnnnnnnnnnnnnnnnnnnnnnnnnnnnnnnnnnnnnnnnnnnnnnnnnnnnnnnnnnnnnnnnnnnnnnnnnnnnnnnnnnnnnnnnnnnnnnnnnnnnnnnnnnnnnnnnnnnnnnnnnnnnnnnnnnnnnnnnnnnnnnnnagggacacccccctgtaacgggaccattaaacgcggcaaggagaggggtgggttaccccgcaaaggggtaaagatccaaccctagaaaacgaacgctggttacccaaaacactataggattggatcacaggcaagtttttaaaccccgtattcaccggcatttaacccccacagtaagctcttaaacaaggggggcctcccttttaagggtcccccaattaagggcgtttaacgggggaccctgacccccaaaaaaacttgattaagggcgaaggctcaagtaattaaacaagcacctatacaatcgattaatcactcaatggcagtataaaaaggatttaaaaagtgaacgcatgttttaaaatggaacaacaataa

SEQ ID NO: 126377 - DNA, 634 bp, Arabidopsis thaliana columbia
tccgctttaccggtcgcgaattgccgggtcgacccacgcgtccgctctgttttcatggctgtatacaataccaaactctgtttgtcctttgttctcttgctcttagggcttctcttggcttttgacttgaagggtatagaagcacaaagtcttaccaaacagaaactggactcgaaaatactgtacgatgagattgtgaaaaaagtcaacgaaaacccaaacgctggatggaaagctgctataaatgatcgattttcaaacgccactgttgcaaagtttaagcgtcttctcggtgttaaaccaacaccaaagaagcatttcttacgtgttcctattgtgagccatgatccatctttgaagctacctaaagcttttgatgctacaactgcttggccacagtgcactagtattggaaacatcttaagtttggttgtatgcttttagctttttcctcacaatattagtgctcaattgcatttcgttattaactcttggtttttgtgagtgtgtgtggactgctctatgaacagatcaggtaaattatcaatcttttgtgtatctcgtaacttttagatttgtctagaggaataaatggttgtatgagattttgtggatttggtttacaggaccaaat

SEQ ID NO: 126378 - DNA, 465 bp, Arabidopsis thaliana columbia
aaggctggattcgatggggggccgctttctatgcccctgtatcaactggatgaagaagggagattcacaccggaggttgcgaaagtgcatacttggtggagctaacaaaggcacacgctaacaaggcgcccttacactgcaccgtgacgtggtgactatacgtggccatctcaagcagggctatgctttttttttatagggctaaaaagcagcggagaacgctcaaaagccatgaagccaacggttcggactttcagcaccttgggagcggaggaccctgttaaggtgaccatgatggctaaacattcggacaccatctatgactctggttgggagggctcgtccacccacacatccacataagagcctggtcctgatacttgctgaacatccggacgacaccgttcctaacaaggctgaacacctttatttaactcaagagtaccatgacataaagcaatggga

SEQ ID NO: 126379 - DNA, 518 bp, Arabidopsis thaliana columbia
  unsure (1)..(518): unsure at all n locations
cccccccacctgntnagngacaccnacagcttgatatcgaattcggggccgcctcgtattacgcttgtatccatgcgtcagtcaaacgatctgtgctcctttttagccagcgctcttgcatttgagctcattgaagattgtgcatctttgacttcatagtatctagttttacttttcttcagctcgcaattttcaaccttctgtgcagtgaagattgatctcttgagcggggtttgattagcagcacgaaaccttcgaaccctaaagacgaaattagggcaaataacagaaattttcctagtaataaccctctgaaccctaaagaagtaaccttcatagcccgggtgaaaaatttaacactggtgacttcccaaaggacatgcgcaccatacgagtaacgcctctcctttttcctgacaggccgtggagtaaacgctaagagaatccgattcttggcccatcctgtactgaaccacgacgctttctcgtccgcctactgcaccacagctacgcccccg

SEQ ID NO: 126380 - DNA, 444 bp, Arabidopsis thaliana columbia
  unsure (1)..(444): unsure at all n locations
cgctctatttactagtaggatgcncaattcctgcaagaattcgcggccgcttcaaagacaaaaacatatacaaatactgatacaggagaaaagtatctctctacaagtcagagaacaaaaagaatataatgaagacacaatcatgcgcctcctgatttctcaaaaagcggactcgtccacgacgaaggaggagacancatcgcttctcagaagctgatacttagttaatcagagagaaagaaatctccctctccttcattacataaagcggcatttagctctggaaaagcatctcgagatcgcttttctaaggtccagtttgaaatggaaagccacattcatctgtcgctcacatgctctggtattagcctgagataagctccggggagccccgacaactcttgttgaaggtgaacaccggtggtagaggtccggcatttggaa

SEQ ID NO: 126381 - DNA, 459 bp, Arabidopsis thaliana columbia
agtcggatggggggcgcttcttggctgggggtgcaattctctagaataaagctgggtgattgctcgtccgtctattctacaacaacgatgtgtatgacgggcagaatttcgatggcgtttgtacttgttatgttgtcggcggcggggttgaataggcgccgcgggggagggggtttccctactttcgggggggacaaggaccgcgacaggacatgtacgcgaggataaaagggggaggggtaggggcagcggagcgcccgcacccgcatacggagctcgttaggggggaattattgatccaaaggtttgacggacgccctgtgccggccgcgatggggggtccagattatagacggaggttggggctggtggagaggcggtggtgagtggtgaacatcgtgatggccagagcggttccagtgtaagcagtgtgatggacggaagaggaggtgggatcag

SEQ ID NO: 126382 - DNA, 430 bp, Arabidopsis thaliana columbia
cgaggggggggcgccgattcaagagggggcaaagctcgaagaaaacaagggccgcggacgaaaggacacagcaaagacggagagggcggcgccccaacaaagcgaacagcaccaccgccaccacggcaaagcggcctaagaggcagaaaagcacacacaaggaagggaaaaattcctttccaggggggggggagaaacggaaaagaaaaagaacgaaaaaaaacacggcaccaaaagggaaagagaccgacgacgcccggaacaagagaaacgccaaacggactaagaaccaagagacgaagcgagaaagagagacgcgcgagcaacgacgaaacagaagaggccacaagagggccgaccagcgcagagatagccgggacgcagaccggcacctaacgaggcggcgacagcggaaaccggaacaagaggc

SEQ ID NO: 126383 - DNA, 499 bp, Arabidopsis thaliana columbia
tggagctgcaccgcggtggcggccgctctagtctagtggatcccccgggctgcaggaattcgcggccgcatggctctacaagccactactactacgttctgcttctccggtccaactttccgatcaactcctcactcactcacttcaaaacgtcctatctccatcaaagctactacttcttctccttcttattctccaattcacgatctaatctcaaaggaagagcattgtctagtgatggttcaacacaagaatctccttatgtagtctgttgtggagatatgctaatcgattttgtaccgacgacaagcggactttcattagccgatgcaccggcttttaaaaagctccaggtggtgcacctgctaatgtagctgttggtattgctcgtcttggaggttcttcacctttcattggaaaggttggtgaagatgagtttgggtatatgcttgcgaatattttgaaagatataatgtgaacaatgatggcatgaggttta

SEQ ID NO: 126384 - DNA, 209 bp, Arabidopsis thaliana columbia
tttgagccattgaaaaagcgctgggctttggggcagccaagcatacgtcatgacaacagtacttgcaagcccggtggagcctcaattttgggaaacagaaccgcccaacggcaccaacgaaccaccacagcacaaaaagggcccgaaagggtttcacgacacactcgcgaacccacaagaaattgagaaactgaacaacacgcagggaa

SEQ ID NO: 126385 - DNA, 435 bp, Arabidopsis thaliana columbia
  unsure (1)..(435): unsure at all n locations
gcgctgcaccgcggaggcggccgctctactactagaggagccaagtcctgcaagattagcgggcggtaaaaacactgctcgtaccaaaatatgtcacacaaagctatgaaagatacacaaagagatgtacctgatttctacaagatgctagatcattgtacaacacgatctacatcacaagccgaatcccttcttacaaagagggggaccagnnnaancanaacactaaaacagacacagccccaagccggggccttgggtgtgacaatctgaataaaaatatatagctgtagccaaaggacttctccgcgggaatactgatcagcaactgagaagaaaccgtgggttgcatctaaagagttagtaaacatatcggttagccaacaaaatcctactcccaaaacagagcttaccctgggagccccgataaaggta

SEQ ID NO: 126386 - DNA, 174 bp, Arabidopsis thaliana columbia
ggccgcagcacgagagcaaaaagcaaccacccgcaactagaaagacaacagccgccgcaagacgaccaaacacccgaagaacacaaccaacacacacgcaggcacaggcaaacaccgcgcgccgaagaacaagaccaccgagaacgacaaacggagcccgagacaagcatgaca

SEQ ID NO: 126387 - DNA, 486 bp, Arabidopsis thaliana columbia
  unsure (1)..(486): unsure at all n locations
nnnnnnnnnnnnnnnnnnnnnnnnnnnnnnnnnnnnnnnnnnnnnnnnnnnnnnnnnnnnnnnnnnnnnnnnnnnnnnnnnnnnnnncggccgcctctctctctctctctctctcttcttcttcttctacgctcgtgctctggactcgcttcgaatccatgcgatggatatttatgcagctcgaaacttaatttaagatcatacctttttctggcttttgttgacgaatcccgtttcaattgcacgagttgcttcgccaggatcatcaacttaagaatgtcctattattaaagcgatgatgctgagtcatgggagatgtggatgatggaatggatgaagatgatttagatgaggattttcggggggatgatatggctgcctctgatcccgatgtcgatgagttagactaccctattattaaaatagctgacccttcagttgacccaccccggaaagggaaagccttgcaggggattccttgggaca

SEQ ID NO: 126388 - DNA, 347 bp, Arabidopsis thaliana columbia
  unsure (1)..(347): unsure at all n locations
nnnnnnnnnnnnnnnnnnnnnnnnnnnnnnnnnnnnnnnnnnnnnnnnnnnnnnnnnnnnnnnnnnnnnnnnnnnnnnnnnnnnnnnnncagccgctttcttttttcaccccataactatgatatgcatttccctcttaccttctgggctgggggatatccaacaatgaggtaccttactagacgttggcctaatctatctaacagaaatttaaagtgcaaaatttttctgatcaactttcttcctacgaacaccatctttatgatcatgataatgtaccaagttgcagcccctttttatataactttaagctctcacttgaccgtgccgcttaaccatttgtttta

SEQ ID NO: 126389 - DNA, 447 bp, Arabidopsis thaliana columbia
  unsure (1)..(447): unsure at all n locations
agctgattcgatgcggggcgcgaataagcagtagcagaaacttgagacaaactaaaacgtttacttttaggcaanttacagtcactacgcatacagactatcccaacaaaagaaaactacgacaagacgctctatggaaattccccagttcaggatcaatttactcacacacccgtttgaaactgttcttgaaaacggtttttaaaaggtcgaaaattgcccctcgtcattagcacaaatttacagttccctccacaacacaacacacccacttctgctctattattccattcagctctcctccgtaccatttgatcaagttcttgcatcccatcatactccagctgagcttttcatgagccagtttcaccttttggtatcttgctgagcctttcttggaccggacatggcctggactttaacactggcctctcagccgttccccgc

SEQ ID NO: 126390 - DNA, 484 bp, Arabidopsis thaliana columbia
taccctcctaaggacaacctgactcccgggggcggcgtctatctagggatcccgctgagaatcgcgcgcttgccttatagttacattcgtttgctagtcagaaaatctaaactttatcctccttgcttctggaatctgggaggactttaaggttcttcttgtccaataattaatctctttccaattgtggattgtgtatcattcattgtcatcatctaatcttcttcttcttctacttacgagtttggagaagttatccgccattgaagcatttaaaatgcccgagaaaggaatgattttcccgccggtaccgagccaattggtgattttacaggccaagccctctttttcataggcggcttggtgctcttacagcactcgtctgcttccttatgttagtcgtttggagtattgcccggtgttcaattcaaagcttcgttcaccatggagattcaatgcttactctggtcgaataagtccttct

SEQ ID NO: 126391 - DNA, 274 bp, Arabidopsis thaliana columbia
aagcctgatatccaattggggggcgctgattgttacaagtcacaagtcacactattatctatggttttgggaacaaaatcttttgaagcatgaaccacgaaaataaatattatagcctaactatccgcaaccgttcaaccgcttaagggcaaccgccaataccatggaaccttccaagaaaaagagacctttgtatatccaccctttcattagaaccgggctaaccttccaccgcctgagtgccagaaggcttaccaccttgcgaccattggtt

SEQ ID NO: 126392 - DNA, 489 bp, Arabidopsis thaliana columbia
attaaccctacctaaggggacaaaccctggagctgcaccgcggtggcggtcgctctaatctagtggatcccccgggctgcaagaattcgcagccgccaaggttgtattgaggatgtcaatggtggtgaacatcagacggtgattgatgacgatagtaaggaagtgaatgatggtagttctcaagagattggtaagaagaaataaggaaggggatgcctctttactgagaaagagggcgatgggtcacagtcgaccactcgtaggatagatgttccaagttcaaaggtaggtgtgtttgattggtaaatgtgggcgagactatacgggtttcttcagtgtaacctctgggagccaaaattcccaatttttgaagagactcagaaagctgatcccgagcttagcgtttaaaaccagtcgagatcattaggaagttgttgcttgcatttgaaaagagctgaaaagccttattcatagcattccttaagcaaa

SEQ ID NO: 126393 - DNA, 475 bp, Arabidopsis thaliana columbia
  unsure (1)..(475): unsure at all n locations
cccccctcnggttcgacggtatcgcaaagcttgatatcgaattcgcggccgcagtagatacatcaaaataagccatggatcatcaaaccacaacgcacattagaaaggattaacaaaccatacatttaaaaagaagaagcagaatctcagtttccagattcttgaaatctctttttgaaaggcatagaaccttggtggcctgcctcaccttctnccgaacccgtaattcccattttattcccaatggtggagcccagtgactgtgtagagtcttgaacagattctggagacttttgcgtcacttctttccgtcgacccacgatccaagaagtaacagctcctctcagcttctgcggcatccctcctttcgctttcttcgcatatgcctcaccctggttcgaagctgctttcgagctcggatccttaaaccctcctaaccttttctccacctactccgattgtgtcactatccctc

SEQ ID NO: 126394 - DNA, 451 bp, Arabidopsis thaliana columbia
gggaacaacacaaccccccgtccaatgggggggccgacttttcccggcgtgatgaaatctgcaccccaagaccctggccccttgggtgcctcaaagaaagcaaaaaagcaccgggttaccctgtctttacggacaaactccccttttacttgtccacctgccgtcgaatacataaaccaccacaagggcagaccccaggtttattattttgcggggttccaccacagaaacccccaacacccaaagaaagaagcagcccggaaaacccaaaaccggaggaaacacccagacgcaccgcagaccagcaccaacccgagagaggagaacacccaaaccgaccacaaccaaacgaaccggaaacaacaagacacaccacacaaacgaacccccccaccaacagcaaagaagaaaccgaagcaaaaagagagggagaaacccgcccccggcaaaa

SEQ ID NO: 126395 - DNA, 187 bp, Arabidopsis thaliana columbia
  unsure (1)..(187): unsure at all n locations
ggaaggaagaanagaggacacccccggaccaaaaaccaccacaagaaggccagagggcgcagaaagagcagacggccgggacagagaaagcggacgaagcccccgccaccagaagcccaggcgaacccagaagaggagaggacaacaacccgaggccaaaccaaacacccggggacacacagaagag

SEQ ID NO: 126396 - DNA, 459 bp, Arabidopsis thaliana columbia
ccgaatggggggcggcaaaaatataacgcaggaacatcctgcttataaggaagccgcggaaccgtttgcaacctaacttttataaccggtataggacttcttcaggcctaaggaaagaaaagaaacaaaaggcaagttcggagagagcgagagatttagcagcagggaaaggaaagagagattttttttttggagaggcaaacggccactaaggatctgcaaaccttaagagggaaagctctgctctgagatggagaatgccattgatgaaggatcgactatcttccgctataaaagacgaccatgggaccccaaacaggttttgtggaacctactgctttccctactgggagagagaagatcccttgagattggcttatgaaaccctacgggggcttagaccttgccgagaatacatagtccactccgaacctcaccgaccattggtgctgcagccgt

SEQ ID NO: 126397 - DNA, 473 bp, Arabidopsis thaliana columbia
  unsure (1)..(473): unsure at all n locations
gaggcggccgctctattcnagaggatccaaatcctgaagacttcgggccgctaagctctccgacagttctacggcttaagaattaattgaagagaggtgatgagaggtacttactgatatacagatctgttcgatcccaaaacccaaaagggatccgagacgacacatcctctctcttagggctgtcgaagcgannaaaaaagccgctgttaacgacagtaacttctctgatcgtttgcttcggatccaaaatcttgggagacccttcgattctcagtctgaagtagaggggagacgagtattgttgattggggctcgtctcgcaagaagaagaagaaaagatctcatgaaggaacctggggttaacgatttcagacatggaggcatgtccagaagagccaaatttaacctgataacaaccttgacttggatgggatgtcctggtggtgaaaatccctgttgatgaaggagga

SEQ ID NO: 126398 - DNA, 454 bp, Arabidopsis thaliana columbia
aggagataagggggacattttacggggggagatttatgttgtaggccctccaaatcaaataacataccgaaggccgaagatccctggaagctcgtgaatacaaatctgtgcagtgtttaggtggcctccagagatcaagatctgcgccgagaaccattttttttttggggggggaagccagcaccgggaaccacgcgcgccgagcaaacgaccaccgacggggaggacgaaccggagcgagaacacaaggggcgcagagcagaacggaacaagagggcagacaagaaggaggcacagagcagcgaggggaagggaggacacgaccgagcaagacagccgcggcaaccccgagcggcgagggccgaggaaaccaaggaaaggacaaatcgagagaaagagagcagggagcaggcgggggaaggccaaggccgcgggcagacccacaaaccggaga

SEQ ID NO: 126399 - DNA, 511 bp, Arabidopsis thaliana columbia
  unsure (1)..(511): unsure at all n locations
gccccccctcgttgtcgacggtatcgataagcttgatatcgaattcgcggccgcctccttcctatatccccttgctctctgggtttttgctcagtgtgctacgtgagagatagagagatggaaggtctgattcaaaccagaggaattctctctttacccgcgaagcccatcggagtgagaaggcttctccaaccctcacatggcttaaagcaaagacttttcaccacaaacttacctgccttgtccttatcctctaatggtcacaagaaatttcaagcctttcagcanatcccacttgggatttcggtttcccacaaggagagaagcagaggattcatctgcaaggcggaagctgcggcggccggaggcggaaatgtgttcgacgaaggagacacagcggcgatggcggtgtcgcctaagattttcggtgtggaggttacgactctgaagaagattgttcctttagggctaatgttcttttgcatccttttcaattacacaatccttaggg

SEQ ID NO: 126400 - DNA, 503 bp, Arabidopsis thaliana columbia
gggcaccggccccccctcgttgtcgacggtatcgataagcttgatatcgaattcgcggccgcatctagctcaaccatggcgttgctcgtcgagaagacctcaagtggccgtgaatacaaggtcaaagacatgtctcaagccgatttcggtcgtctcgaactcgagctcgccgaagttgagatgcctggactcatggcttgtcgtaccgaattcggaccttctcagccattcaaaggcgctagaatcaccggatctcttcacatgaccatccaaaccgccgtactcatcgaaaccctaactgctctcggtgctgaagtcagatggtgttcctgcaacatcttttccactcaagaccacgccgccgcagccaccgctcgtgactccgccgctggtttcgcctggaaaggtgagactcttcaggagtactggtggtgtaccgagcgtgctctagattggggtccaggtggtggtcctgatctgattgttgatgatggtggtgacgc

SEQ ID NO: 126401 - DNA, 481 bp, Arabidopsis thaliana columbia
gacccagcgtccgattgggggcgacttttttcaaggcggggtccatgataagaagaaaaggtactcggaacacgtggatgctttcagagccgcctgtggacaccacccagacctgaaatcctttgattctaagattcagccgaggacctggaatgtgagacactcggtaaccgctgaaggccatttttttttttgggggggggcacgcggaaccccagggggcggagggaggaccctaccagcaggcagcgaatgcgggagcagacctcattactgaatgcggagaacaaatgtgggagaacggaactctaagatctctggtcgaggactatattaacagtaccatggaagcttttaagattgtcaagactgtaacgctacgggttcatgacgcagaagggggcccacataacattaatgggggcggtggcccaggtggacaaaaactcgcacgacagggcgccggtagtcaaaataagac

SEQ ID NO: 126402 - DNA, 516 bp, Arabidopsis thaliana columbia
aaccctccctaaagaggaacacagctggagctgcaccgcggtggcaggcgctctattactagtggatgccccgtgctgcaagaatttgcaggccccaaaatatatcccaaaccatacaagattttttcttggtaaattatatttagctaagaggaacactttaacttggctttataatcaacaattacaaaattcagacaaaaacgcactcatataacttcttccttagtctctggttaagcctccgagtcttctctatccatttggaactcttcaagttcatggtgtttctcactataccatttttgctcaatccaatgaaattcaaaattttggatcaaaagaaccaaatgaattctttcaaaactaaaggagaagaagcaattcatggctgtgcccgggatatacaaaatggccacaagggtcacgactgaacaagccattcatgcattaaagaagcttgcttgtccttcttttcgaccgttctcctgggaacatcttcatgatccatcctaa

SEQ ID NO: 126403 - DNA, 482 bp, Arabidopsis thaliana columbia
ctggagctgcaccgcggtggcggccgctctattactagtggatcccccgcgctgcaagaattcgcggccgctaagtacatggtctacaactattgtaacgacaaaagaaggtttcctcgaggtgttcctgtagagtgcagttaaattgttgattctttgatacatgaataagttacttggcattgccttatcttctcaatagagttcttacatatttttatcattcatttgttgctcatatgtatgcagtgtttgtgtaagttattcttctcacccttctctgtttctttatcattcatggctccaaattcagtagcagtgacaatggagaagccagacaacttctctttactagagatcaacggctcagatccatcctcattccccgacaaacgtaaattcatcagtccaaaacaattctgatggttccttcttctcatagctcatagactcatctcgtgtctctcgtggctagtctcttc

SEQ ID NO: 126404 - DNA, 476 bp, Arabidopsis thaliana columbia
  unsure (1)..(476): unsure at all n locations
ggaggaggggggcgnacgacctcaggggggggagaagccctgaagaaaaagaggccgcacaaggaggcgggacggccaagcaaaaagagacgaacggaggagcaagaagaaggaggggagggaacatgcgccgggagaaaaggcgcggggaaacaaggaaagggagacgggaagaagaaagagaagaaaggcacctttaacaagaggggggggtgaannaaganagggagagagacgcgtaaaagaaaaaaaacaacgcccccgaaggctggggggagagggggggaggccccactaaaaaaaaagaaaggacgcacgaagagaagtaaaaggagaggagagggagagagaagaacgcgaaagagcaggctnacgcaggagaagcggccgcaagggacgccgagaagaacggggaacaagaacggaggagacgcagaggagaaagagagggagagaggaagagcggggcacaagca

SEQ ID NO: 126405 - DNA, 205 bp, Arabidopsis thaliana columbia
  unsure (1)..(205): unsure at all n locations
taaagagaaggcaaaaaaaaaaaaaaaaannaaagacgctggttgccgacgccccccctcggatgcgacgggataacttagcttgatatccaattcgcgggcgctctattttcatcaatggaagctcttgtatcttctaccaccaaggtcctctagaaccgagtcatgaacgctgccttaaaaagcaagatcactctttcttggt

SEQ ID NO: 126406 - DNA, 516 bp, Arabidopsis thaliana columbia
  unsure (1)..(516): unsure at all n locations
nnnnnnnnnnnnnnnnnnnnnnnnnnnnnnnnnnnnnnnnnnnnnnnnnnnnnnnnnnnnnnnnnnnnnnnnnnnnnnnnnnnnnnnnnnnnncggccgccaaagaagaagcctatatcatgactgtacaacaagcacaacaaccactaaagatgctcctagcagagaactatgcgtgtagttgtacaagagagatagcttgtgctgcatatgatacctaatcatatcttattaatcattattgatattactaaccatggttatggcaccatgccctttacgaagcaagcttattatacctatacagatctatactgctataactatgagtacatctacatggacgaaagtctccttctgcgagttcttgcatgatgaacctctgatttagctgcacagacagaggatgctcttgatagatggttagcttctgctgattactcctcattacttccactacattnggaggctgctggaccagctgatcctgctgctacatctgatggtactgatgcc

SEQ ID NO: 126407 - DNA, 494 bp, Arabidopsis thaliana columbia
  unsure (1)..(494): unsure at all n locations
gaccgggggggggggccgacttacaggggggcgaggctccagaaaacaggccgcccggacaccgcgcgcccagaacagaagcgaggcacgcgccaaggcgacaaagaccgctcgaacaagaagaagccccgcggcacacacaccggccagaacccgaaccagaggtcccgtgactaagggggggggaggaccaaacagcacgccgcgaaaaaaaaccccgggacggacgccagcggcccaccccccgcaaccgaggaccaaacccccgcgggcgcgacagccacggcacggcgcggcgagacagccgcccgggagaagcgaagcggagcaccaaccccagcgaccgcccgccccaacagcccccacggaccccaaaaacgagacccgagggcccccaacgaccgcacacccacaggagggccgccacgaagaagcgaaggnagacgcacgcaggcgaccggcaaaaagaacgcccccgccaggggggcgcgcga

SEQ ID NO: 126408 - DNA, 163 bp, Arabidopsis thaliana columbia
gcagttccatggggcgcctttaactgggatcacttctttagataccaggcgctggacgaagtcatgaggaagatcacatctgcactgaactctttcatggttcggggacttactccgagcgaggatcggaacgaccttaacggctgggtgaatgctccacccg

SEQ ID NO: 126409 - DNA, 498 bp, Arabidopsis thaliana columbia
  unsure (1)..(498): unsure at all n locations
annnnnnnnnnnnnnnnnnnnnnnnnnnnnnnnnnnnnnnnnnnnnnnnnnnnnnnnnnnnnnnnnnnnnnnnnnnnnnnnnnnnnnnnnnncggccgccaaagaagaagccactctcaaactgtcaccaacatcaacacctacatagatagctgttagaaagactctatgcatgagtcataacatatagaacgctctagctacatatagaccctaaccctttcttctaggcattactcatatccaaaaccattgttattgcaccatcaacttcacagagcaagcttattatacctctacagttcactactgctgtgactctgagtacatagaactgggtgatagtgccttctgcatatgcttaatcctatacctggcattagctccacatacagaggacactctcgatagcagatgaccttatgatgatatcgtccattactgccactacattgcaggtactgtccaagtttaactgctgctacaattgatgggact

SEQ ID NO: 126410 - DNA, 498 bp, Arabidopsis thaliana columbia
ccccccgatttgggggggaaaccgctagcctggtttcggatttgggggcccgcccctacatttggggacaccagtattgggcgcccaaggaaaaggctggttacccagggcgcggagcgggataactggttgacggcttccaaattcactcttccatccattccaccatttttttcaaaaaatgatttgaacttgtaaatattttttttcaaaaaaggttgtctttggcatcgctgtgtgcactttaaccccttaagaaaacaaccaattttccaattttaattcaggagattcgctatctctggaataccaacctagggtggaatccatttaaaaatcatttgggggaaaaccaaaaattatttatacaatggacctttgaatccccccaagctaatgttttcttttttttgaaaaaaaaaccaatttattaattttattgcttaaaaagcggaaatgggtcctcccactggtccaatcgtctcgaagccttctccc

SEQ ID NO: 126411 - DNA, 473 bp, Arabidopsis thaliana columbia
  unsure (1)..(473): unsure at all n locations
gagctgcaccgcggtggcggccgctctataactagaggagcccacgcgctgcaagaattcgcggccgcctacctcgcagcgttgatcgagatgaagcacctgttccactgggcagcgccggcgagccgcgtctacgtcatcaacaacggcaagcgatgctcactcgaatgttcgctggtcagacccctccttatgcaggcgggcagacgcaaccctaggaaacagcggcttcacacgggcccnctaggacgcatgctgggaaagggaagagcagcggagacatcacgagggcaagcgcacggagctcatagagaccacatgcttggagtccactcacgaagacccacgaaagtgctggtcatagccggactgccaaagactctacaccgcatccggccaaaacccgaccccattgccctaagcgagccagctgacgtagcctcaggggcatcagcaccccggcacgggctgac

SEQ ID NO: 126412 - DNA, 455 bp, Arabidopsis thaliana columbia
gtggggggccgctttttcggtggtgcgaaagtctttcttgatctagcccgctccccgaccgcgggggcgttggaatgcatccgacaacaactgtgcaggggccgcacggcgcgtcatcttcccccggcctgcttcatcgacttatcccccacagcaccagacccaccactctcctcattgggggggggggagcgggcacgccgacaaccaccacaccgaaagctctcgacggccggcgggttggaggtgactctaaccaaaattgtgtgaccactgaagtcccctgacctgacaagtcctaagaccaaaccgatcttctcgggcaacctcaccctgcgctttacaataccaccccccgctccgcgatcctatacgtactccaatcgtgtacgagtctcgccgtcacaggtgcaccagccaatcaacagccgcgcccgtctgtaccacacgccgca

SEQ ID NO: 126413 - DNA, 523 bp, Arabidopsis thaliana columbia
cccccctcggtggcgacggtatcgattagcttggatatcgaattcccgggcgctttttttaaaaaaaagggatttggtatgaagaagtaaaggtattagatgaaccttaagaggaccttccaggagaattaagaagggacccttccttatcttttcccttttcttaaaattccttagaaaaagggaacccaattccaaaaaccaaaaccgccgttcattcttaaaacctggcttttatggttaattaatttaccattaccggaggacttttagagctcatggggagactaatcttcctcctcagtcgatgattctcctcctgcactgggggctccgcctgatctctggtaaactgctgtgatgatggggttacacactgcctctacctccttgagcttctcgtcgaactcttctttctctgagttttggttctcgtcgagccactccaaggcctctttcgtcgctgcttctatcttctccttctcatctccttccaatttgtctgcaagcttgtccttgtcgt

SEQ ID NO: 126414 - DNA, 513 bp, Arabidopsis thaliana columbia
  unsure (1)..(513): unsure at all n locations
acccaggcgtncgattgggggatggcatgttttttagcgttgagggcactctttttaaacataaaccctgaggattcgcgccttcgatatccacacatacatgaaaatcgtcgtgaatcgaccgtcctgtttgcacaccataggatcacgccagattattggggatttggggatcagccagatgtagtaataggccctaaaggaggacggttttctccttttgggaggtggaacgcccaggcggaccgccaacacggcgccataaaacccgccgccggcgcccgaagacacatcacacaccgacgacacccccaggccgacgggacgccaacaggcaaaacctcacccccagaccggagaaaaccgacacccccaaccgcgcaccaggcctgagtccaacaccaagcttggatccaaagctacaaagagcgccaaggtttaagggcggagcggagcatacccgcgcccgtgcgaaatcttaccgttctcctgacataaccacccccccgctgc

SEQ ID NO: 126415 - DNA, 350 bp, Arabidopsis thaliana columbia
  unsure (1)..(350): unsure at all n locations
nnnnnnnnnnnnnnnnnnnnnnnnnnnnnnnnnnnnnnnnnnnnnnnnnnnnnnnnnnnnnnnnnnnnnnnnnnnnnnnnnnnnnnnnnnncgggcgcgaagaagtacagaaatcggctgatgtcgctgctgcttccgtggtgaaaggaaaaccttttaccgattaggagggtactatttctacccctgtggcaaaaaaagaggaagttgctgcttctttctctgatgagaaggccgtttcaaaaaaagaagtgactcccgagaaaggagccccaaccgcggaagcagaaaaatcctgttccgtgaaagaagaaaaaaccggtggtggaacttagaaaggtggtggttta

SEQ ID NO: 126416 - DNA, 519 bp, Arabidopsis thaliana columbia
ccccccctcgagtgcgacggtatcgattagcttgatatccaattcgcgggcgccttcttcattctttttttttcggcgcgcgctttattcccaccacctttgaattcctgccctttgaaggaagctgcttagatgggtgggaagccagctcttaggagccttggtgcctttcccagaacaaaagatcatttgcttcaaaagacacccatcctgcccctgttgttatggagtcctttttccattccctcctcttggtattttaaaatcccccttaggggggttggattaggttaccatttgaaattggtggtaatggaagaatctatggtggacctcctaatatggcctccttggtcctaccacaacctgagttattaccttaccacacttccgagcgcccaggtatgtgtttagttcgagcgaaatcgggcgctttccggttggtccctcggactctagccttcaacctgctgggaatagccctatacatccaagtaaaacatcttcggttacatgtgt

SEQ ID NO: 126417 - DNA, 464 bp, Arabidopsis thaliana columbia
  unsure (1)..(464): unsure at all n locations
nnnnnnnnnnnnnnnnnnnnnnnnnnnnnnnnnnnnnnnnnnnnnnnnnnnnnnnnnnnnnnnnnnnnnnnnnnnnnnnnnnnnnnnnnnnncgggcggactatattcatggattctaaagtttctgaattatggaatcattaattctggaatctctggtgggtggtggtggctgaagaaagcagataccagttttgggatttgaaaaaatcttccttctttctttgggtttttttggttctcaatagtttggcctctgttcaactaagttacgctttaatacttaggttccttgtgaaagaatccattaagcggaaccttccaccattcttacctttcctgcaaaaccaatggtcccgcttattaccagcccaaggacaattggattagtggaagaaacttccggggtccttccttgttggcccagggttgggtgaagatcttttagaaggtaacagttggcc

SEQ ID NO: 126418 - DNA, 185 bp, Arabidopsis thaliana columbia
ggagctccaccgggtggcggccgctctagtctagtggatgccccggtctgcaagaattcgcggccgccacatgagatgctacgcatgagcacttgctagacatgagacgccaattcgatagttagcggacactgagttcgatctgtacaacatagcatatacgtgcatataaaacatataggaga

SEQ ID NO: 126419 - DNA, 320 bp, Arabidopsis thaliana columbia
ccccccctcgatttcgacggtatcgattagcttgatatccaattcgcgggcgcgcttcaatgactgaaatttcagatctaccagcacatttgaagaaggcttgccttagctcttagggaaaattgacactctttgtgtgaatatattccacctttgaaggagtcaaattccgaagaagcgccagataattttatcggccaccgggtttccaacccgaaaaccttcaaccttatggtatctttgaaccgaccactatttgataaggttcttataaaccaagcttttgatatgaaccaagccggtgtgggcttatattattt

SEQ ID NO: 126420 - DNA, 259 bp, Arabidopsis thaliana columbia
cccccctccggtgcgaggggataaataagcttgatatccaattcgcgggcgctcagtttttaccaagggaacctctttcatcttcttcacccaaggggccaagaaccaaggcatgatggagatcgaagaatgcagattcactttttcttgggttggagactttcttacgaaccagaattggaaggacattaaggcttaggtaaagcctaaaccgggaactttcttgggttacgtttgagatccggaacaactgatttga

SEQ ID NO: 126421 - DNA, 537 bp, Arabidopsis thaliana columbia
  unsure (1)..(537): unsure at all n locations
gggccgaagctttccaaggggggccaaatctccctgcccaaaaaataaccggccgcggaacccaggggcggggccggaaaacctgcaaagacccgctaccggccgggaatgcttaccgacacgcatctgtgatgggttggggacaccaatcggcgacccaccctagggacaacaccgggcgcccagaggggaggaggatttcctcaatttaggaggggggtgcncgccccccccgaccccgccccaggaagggcacaaaaaccaaccccaanncaaggaaagacaagaggacaccggagaaaaaccagaaacccacaaagcaacggggccacacccccccagaaaaagcccccaacggcgggaaaccccagaacaaagaggcccccgcacgaggaccccggggaggccccccaccaaggcaaggcggacggggaacggggcccgaaaaaaacaaaagacgggcacgggaacngaggagcgcccaaacaaccgggaggaagagccccgccccaaccagaccccaaccgcccagggaag

SEQ ID NO: 126422 - DNA, 468 bp, Arabidopsis thaliana columbia
  unsure (1)..(468): unsure at all n locations
gagctgcaccgcggtggcggccgctctatttctagaggagcccaagtcctgcaagaattcgcggccgcctacctcgacgtcatgttcgagatgaagagcctgttccacctagagagatacggcgatcttcgtctacgtgatcaacaacggcatagcctatgctcactcggaccaaagctgggcgacactccttcaagaaaggggatgacaccccgcnaagaaacacacggccacaacaaagaccacacaaaggacgacaagccggggaacagagaacgcgcaagaggagacacaagagcgcgcaagagcacggaacacacagagacgacaagcgaggagacacggacaaagcccccgaagggacgcgccagaacacggacagcaacgaccaaacgggccaagccgcgaagacacggccacaccaaccaacgccagccaccggacggaaccaccgaggcagcagcccga

SEQ ID NO: 126423 - DNA, 510 bp, Arabidopsis thaliana columbia
accccccggtttgagggggaaacgataagctggatatcgaatggtgggccgcgatcttcagaaagtgccagggagatatttgagaaaatggtgcggtgcgctctagcatgaagaaggccgctcaaaaaaaagctgctgccgccgctaaaagaggtggtaaagctgttgttccatccaaatccgacgcttcttcttccaacggtgtagatagctagggtttttttgtcgatgctcttcaaatatctgaacggacttgtaccgcgattcatggttctcatcactcaatctagagatgtccgaatggaatctatgtgtgtgactttacatggctatgaccttattgccgattcactgtaggagctcaactatggacggcgttatggtctacttgggtagcatggttggggaaagtccactctttcaactgcagtcggacaccgagagtctctcttttccggatcaaatggatatctaccatttgactgacgagattgaagctactagacgtgc

SEQ ID NO: 126424 - DNA, 457 bp, Arabidopsis thaliana columbia
  unsure (1)..(457): unsure at all n locations
caggagctcaccgggagggagcgtctatactagaggagccaggcctgaagaatcgcggccgctcagtcggaaaaaaacagagaagaaaaccctacataccaccaaaaaatataactgctctctctggcacgcctgcaaaaaaaccggcagcaacaataacggacaaaagagaaggcgcctttgatagagagggtgcnaanacagaaagaaccgctgacctctaaaagaaacgcagagatgagcgagggggcggtctctgtctcaaaagagagaggctgaagaacacgccaaaaaccatgcccaaacccatgaaaaaaaccaaagccctaccccccctctatcggagcaagggacccccacctgaggctctcccatccgaccaccaagagaaaaaagactcgacctctacatctaaaaagccaaaagaaacaggcctcagccccaaaaggggcccggt

SEQ ID NO: 126425 - DNA, 492 bp, Arabidopsis thaliana columbia
ccccccttgattgcggggggataccttagcttggtatccaattcgggggcgggaaatcttagattgggcattcattttcgaccttggttccacggaaggacctggatttttcaaatcttccggggccaaattcaccaaaggggtcaaagaatgacctaaccttttttggccagaaggagctggacaacaccagatggctttggaaatcacccagggttgtttgtgcatttactccggctgaaatccctgcaccttttaggcctgttatagttaaccctgggaggattcttgcccccgtacctgcggatcagatccagggtcaggctttggcagttctgcaagttctgaaggccatgtgaactgatacacaacctattgatttatgtactcgcagagattatgccaggtggctgatttctgccagcagcgcgttatcaagaaacacaccctaaaaggtgtctcctgctgtgtatattgagaatgtacctgagc

SEQ ID NO: 126426 - DNA, 510 bp, Arabidopsis thaliana columbia
  unsure (1)..(510): unsure at all n locations
nnnnnnnnnnnnnnnnnnnnnnnnnnnnnnnnnnnnnnnnnnnnnnnnnnnnnnnnnnnnnnnnnnnnnnnnncggccgcctaaagtgtaagtattagtaaaccacataacaaagattacaaaatgatacaattattgattcctgaacatcactgaccaataactgtaaattgtaattgggcccattccccaattttattnccccctcttttaacttttttttttgcagggggggaaaacccaaagatttcccagaaaaaaaggtttcaaaaaaaaaactggtacacttttaaaaggcttttagaaaccctttagaaagaaaaatttcccaaaaccccttttttttaaaatccctcgaaaacccttttttttttaccctttttgaggttcccccctagaaaatgggcccctcttgtttaaaaaatagagggagggagggggttttttttagccccctccacaaagaggggggggttttttttattttttccccaacaggggtgttttctt

SEQ ID NO: 126427 - DNA, 496 bp, Arabidopsis thaliana columbia
  unsure (1)..(496): unsure at all n locations
gaagctggatatcgagtgggggggggcgatctattagagggggaaacaatcctcctcatagatacaacggacgaacttggggcttgtattatgtgctgagccagaatcaacagatgggtgaaacgatgaactattcttgtatatgtctagaacgagctctgacgacaacagagtgcattccggaaatacgcagtgtcctcaattgcaggggggtacngcaggaaaagaggcaccagaaagggaagacagggacagaccgggggagagaggcggccaaggaactgaagaacagacccagcgggaaggcgcgaccagacgggaagcggagaagggcatcgaaacagaaacacagccgagcgagcgaggaacacgaagagaagaagccaggagggggagaggggacagcagagaagcagcgagaagcacacccggaaagagaggacgccgcgggaagagcgggaaagagccagaacgagccgcagagaaagaccagcag

SEQ ID NO: 126428 - DNA, 509 bp, Arabidopsis thaliana columbia
tggagctgaccgaggtggcggccgctctattctagaggatgccaaggcctgcaagaattcgcggccgcctaaagtgtaagtctttgtaaaccacataacacagattgcaaagtgatacacttatgaagtcttagcatcactgaccactgctgagaatgtaaggggcatcccattacaccacttatatttccctcctttgggaggctggaggcagaagagaggaaaaagacttgtgactgtacagcgttgaaccttatgagaggagcttgcccaagcttcatattgtacgactctttaagccaggtatcttgaaactgtaaggacctaacggaactcgttccctagcatcaaaattgttgtttgttaggtcctttcaagccatgaaaacaggggtagattttttcatatggcccaaggtggattgttctaaaagtgacctggcttatgtccttaaataggctgtgtaaccttaaacgtattttgcttaatttatctgatgaagagcactt

SEQ ID NO: 126429 - DNA, 428 bp, Arabidopsis thaliana columbia
cgaattgcggggcgcgggtttctaaaatggggaagaactagtcctgcagaaacaggcgactcagctggtcagggagcttggaacagggcattatcagccgggatctaaacccatgaagtatcaagccgaaatcccttacaagagcgttggaattacccgccacaaaggacatcgagtggattattatagacgacatttgttgaaagcaacgttgctctttttgtgccaaaaagaagagctctacaaaagacctttcgctgtgtggaggggaactgagttccacaaagcaaaccaagcaattgaactggagatccaacggggaaacgatacaatggctgggaatgcttccgaagccataggcaccctctactagcagagcgaagaaaggttcccaactcaaccctctgagtggcccgggacagaacctg

SEQ ID NO: 126430 - DNA, 519 bp, Arabidopsis thaliana columbia
  unsure (1)..(519): unsure at all n locations
nnnnnnnnnnnnnnnnnnnnnnnnnnnnnnnnnnnnnnnnnnnnnnnnnnnnnnnnnnnnnnnnnnnnnnnnnnnncggccgctacagcgttatcgatatgaacagataatgctctcaccgcagatgtcacagatgtaatggcctagaacagagatcaaacatgccagtgctattaacgtgagaagagtattaagcatcttccttcttcggctaaactggaggagttaacacgggagagttgacaaaccctgtggcttcaacgccagcatagagcccatgtgagtatggtttcaaccatgtgcagggaacagcgcacttacgctgacatgaatcaaggttttgatagatatggatgcatgcttcatgatgcatgtcacggcctaacttctgtaggagtctgacagtgccctttcctggggctgaagctatgtcggcaacagatgacccccgtctgatatgaaacagattcatagtaacggtcgttcgattggcagagaattgttgtgggcctctcaacg

SEQ ID NO: 126431 - DNA, 518 bp, Arabidopsis thaliana columbia
ccccccttgatgtcgacggtatccattagcttgatatccaattcccgggccccgccttttttatctggaaaaatgggcctacggattttccggccaccctggtgctctttttacctaaagaaggggggattaagcctctgccacctttgaagaaggaaaaatttttagtttctcagccaaccaaaagccttccttaagcctctccgtgccttccatctttctcattggctatggccgaccgcagccaaaatttacctgaccacctggccaaggctgctggacacccttcacctcgaggtgggaaccttcggtcagccataccacctctcaaaaggctgggcaatggtcctcgaccccatactgcacttctggatgcccatttccagagatatcaatccaacatgcaaagtcttcgtccttctagcacctcatatggaggggcgtacactgctgcattttctcagcttgtgttctcagctatctctaaagctcttagtgactcattggaattctttgga

SEQ ID NO: 126432 - DNA, 410 bp, Arabidopsis thaliana columbia
gcccccccttgattgcgacgggatcgattagcttgatatccaattcgcgggcggcgtatcttaactggggtagaacccacccttggtgaaaattggacccacccaaaaacccctccaaatgggcttggtttaaaaagccccaccttaaaaggcttaaccgatcaaaaaaaagccagttaaacaactttaggttggctaaagaggctaggtcatggtcaactattttaatccgacttctcgaacctaaggacacactcctctgtgaaaaggggaagcattttggccattccaagaggcactggaaccaccggtttcaccaccacctcctgggtacatgtggtcaataatgggtttgaaaagcctctcacattctttaatctggtttgcaaacaaataaccctaagaaaact

SEQ ID NO: 126433 - DNA, 469 bp, Arabidopsis thaliana columbia
cccccccttgatgtcgacggtatcgataagcttgatatccaattcgcgggcgctcgactcgggtcgtgaccagttttttctaactgaactatggcgacgggacagcttttttcttgaccacacaagctttggtctacaactattagcagcttcctggtcaacgaatgcttgatttcgactttctttggggacctgaaaccccttctggtgctggaatcattaattccgggtctgaaaggtttcaaaagctttttttccggccagaagaaatccgttttccttgtcatggaccccttggagcgcatttggcttggccttccaccagcgaaggtttcaccaaccttgcctcctttaggaagcgctgcggctacatccttggtgtgtaagaccacccactcttaaaagtggcggcatttatagctgaaggtgttccaaatcagactctacgcagtgtgttgcgtttgctcgc

SEQ ID NO: 126434 - DNA, 533 bp, Arabidopsis thaliana columbia
  unsure (1)..(533): unsure at all n locations
ggtannnnnnnnnnnnnnnnnnnnnnnnnnnnnnnnnnnnnnnnnnnnnnnnnnnnnnnnnnnnnnnnnnnnnnnnnnnnnnnnnnnnnnnnnnnnncggccgctacatgacaacaaaagagacagaagaagagcatatagatatgcattttttaagtaaacatctctcagaagaattttaaaaggctaattaattggaataataacaaaaataggattgaaatgagttttacttggtgtacaacacatcttcccatgggtgacgatacagtggctgcttcaatctcttctgatcaaacgtgtgcccgatcaaaccgatggagcgagcaagaacaaacagaccgttgagataaccgatctgaacaatctcgtcaatctcttgtttagtgaacatcccacttccagctagaaggtccaagaagagagatccaatggctccatcaacgttgagtacgaggttgtttgcctttgagagcgtgtatgtctncactgtcactgcgtactccatgtacttcactgatggggaagttgga

SEQ ID NO: 126435 - DNA, 180 bp, Arabidopsis thaliana columbia
aagcctgtatccaatcgcgggcgccctgatttaaccgggcccgcctgtcttgcagaattccaggacgcctcacaatggctctcttgtcacaaaggccttcgttctaagacttatacccacctccagagccaggaaaggcacatttggacacgttacaggggaccggcaaaggcctaccaa

SEQ ID NO: 126436 - DNA, 516 bp, Arabidopsis thaliana columbia
taaccctcctaaaaggaacaacgctggagctccaccgcggtggcggccgctctagtatactagtggatgccccgggctgcaagaattcgcggccgcctcatccctaccaacaagacaccagatgatcttctcgaattgcctcataaaacgttacatctcgaaaaagactttctgacacatgatatggtggattacagcatacgatacgtacgatatgtctcttacgtagatgatcaacacaccttcccatgagcgacgaaacaatgacacgttaaattctttttgagcactatcgcgcctggtgctgccgcaggtgctatcatgaacagctgtccgttagaaccaaccgtctgtacacttctagaacacttttaggcagtgaacatacaacctacatactttactgttgattatgaaagagccaagaacttcattaacgggaatacccatggtgcttgcccaccaaaactgtgagtgtccgcactgtcatagctactggatctacaccttgaggat

SEQ ID NO: 126437 - DNA, 440 bp, Arabidopsis thaliana columbia
agtgcaccgggagggagcgctctatactagaggaggcaagccctgaagaatcgcgggcgccaaagcgcaggacgagagagcactaacaacgagacacacggaacaacaaagaaccctgaaccccacaggcacgaaccgggaaaagaaggcccagccaaaaggggcggccccttccctaggggggaacaaagaacaagaagaccgaaggaaaaaaactcaaacctcggaccggggaagaaccacccaaaacaaagggcaccaacaacacggaccggcaccaagcgcgaaacgaaccagaactaggtcaaaagcagcggcggcccaaagaccaacaaaggccgcagacaaattacccagcacgcgaaccaagggagcggaaaggcacaagacgcaaacagaacggggaccgccaccacgagaaaacaccaccgggacggaca

SEQ ID NO: 126438 - DNA, 534 bp, Arabidopsis thaliana columbia
  unsure (1)..(534): unsure at all n locations
nnnnnnnnnnnnnnnnnnnnnnnnnnnnnnnnnnnnnnnnnnnnnnnnnnnnnnnnnnnnnnnnnnnnnnnnnnnnnnnnnnnnnnnnnnncggccgctttttttttttttttagtactaaagtttcataatctcttcccttctcatataacagatagacataaagacaagaagtttgtgtttgaagaagaaaacaatacaaagacataaagacaacaagtttgtgtttgaagaagaaaacaatacaaagacagcaagttccattaccagttgcagagatatatgtcttcaacatcaacaggatatatcaaattcaaccatcatgtaaggatctctagattgacggtagctagatggttaattcgaaaatacccaaatctagttccattatcagtttgagacatatgtctgcaacttcaacaagacatatcatactcctccatcatcaactaaggatcaaagctagctgggttgattcgagcaacaggaatgcatttaagtggatgagccatggtcagcgtcatttctccagta

SEQ ID NO: 126439 - DNA, 522 bp, Arabidopsis thaliana columbia
cccccccttcggttcgacggtatcgattagcttgatatcgaattcgcgggcgcgcttcgacctctctttcgactcctacttcggcttcagctgagcttgagaagagaaagcacaagctcaaacgtcttggtcagtctcccaattcctttttcatggtaatggaaatttgaaacctttcttcttcttttgaaccctttaagaacaaagtctctgggggtagaatctatggaactacttgactttgggaattggatggaaggtttgaatccgggggaaacctgggaaggcattttcctactttaggtcaacaaggcatttttttttttggggggggttctttggtaaatcattcctcctggagccaatggaggcccttttctttacctggaggggccttatgagaggtctaaatgcctggttgaagtggcaccggtggatacctcaattcaaggtggaggtaatggggtaataaaagggcttttaacggaaatggtggaaaaagccttggaatataaccataat

SEQ ID NO: 126440 - DNA, 473 bp, Arabidopsis thaliana columbia
aagcctggatccaatggggggccccctttttcacatgtgaaaccaccggtttcaagaaattccagacggttgataccggggccaaacataaaaggggacgcagggaacctgaagaacgaagggtgcggttttgcctaactagcccacatttgaaccatggggagcacgccgaaagtgccccccagagtttctatttccgcacggatggaaacgacatagaacatgttctctaaaccttaaaggagggactgtctgccttaggaaccacacaataggagcattctatcacggttgccaaaacaaaaaattacattctgcccaaacaaggaacacattcaaaggctcaacaaatccttagagaacataaccgttgtatcgaaagagactaatccgttttgcaaaaaagaatagtggcccgggctagaacaactctccggcaagaaagggatccttctttttccaaacaaaacact

SEQ ID NO: 126441 - DNA, 476 bp, Arabidopsis thaliana columbia
ataaccctccttaagaggaacaacgctggagctccaccgcggtggcggccgctctataactagtggatcccccggcctgcaagaattcgcggccgctccatatcttaacaccataacaacttataccaccgttcttactattgagtgctggattgataccacgagctgaaaacaatgagctgaaaattgtgcgacaagaacaaacaccggaaatcctccttagggccttggttctggcgagcacagacttattgatcataataatatggcagtgcctgagccgtatatagataactctaagaacctatggagcgtgccgcttcaataccttgagctcgacacatctcttcaaaaactttcaattggtcacaaatccgtaaaaatgaccaaagatcgagttcaattcatcaagcccttgttcttgagcttttatgtggaacaatctggaaacatagtatcgccttaactttaagcgt

SEQ ID NO: 126442 - DNA, 380 bp, Arabidopsis thaliana columbia
agcctggtttcgatgggggcgcgtttttaccaggggtgccatggtttttgaacaagaggacttaaaaacgggggccttcctggcatgagaagcaaagcacaatcccatttgcgggattgtggaagggctctggagaggaaggaaccttgggggagggaccaccgagcggtttctcttttaggggggtgaaaaacaagggcaggacgccaagacacgcaaggcgcgcagggacaggcccggcaaaggcaaaagcagaaaacggggcggggcacccagccgggagggaaaccacaagccggcggggggccggggccaacaaccggcaggcccggggaaacgcgggaaagaccaaccccggggggagaaagcggaaaaccagg

SEQ ID NO: 126443 - DNA, 531 bp, Arabidopsis thaliana columbia
  unsure (1)..(531): unsure at all n locations
agctgcaccgcggtggcggccgctctattctagaggatccccaggcttgcaagaattcgcggccgctccagaggcagcgaccttccggccgtaacacaagcacaggagcaaacaaggatggacgcatcaagggatgagggcctcatgggaaacagagacattgaccacggctaaggaagaggcacgnactccctccttagaagcggtaaaacacccaactaacaccgggacaggcaacaaattcccaagcgggaggtagccccttcgggccaaaacaggaagcccgccgggaaaaccaccagaaaccacaactacgggccacggaccggccccggggtgcggaactccagccgcgcagtaaaaagcccaccacaccgagtcgaagggtggacaacggcctaccaccagcagctagaggccaccgcaaagggactggcacccgtcacgccacaaaacccctaaacaacccgaggaccatgccagtcccccaacacccccgacatccaagggcctcggaccagcaccccggcg

SEQ ID NO: 126444 - DNA, 468 bp, Arabidopsis thaliana columbia
aaggctggaaccgatggggggccgcccattaacaatggtggcctaggttcaaacaaattctgggccagagagggcaataatttataacccaggccgtttattgtcctccacctacctactaaggaacacttttaacttccccttctcaaagccttcaaggaggctccctggaacccaggaccgctttctcttttcaggggggttaaagaacccaccagttccatggaagaccataaaagggtaacactgcctgccccaacccaaagccggcaacccctaatccgcacacttctttgccaagtacccggaactgggttaaagcaacaaaacaggacttggcacactctccacatctctattacctgggatgcatcacctgggaaccgcaaccacactccctatagctagaggagaaccctttataaccccactccaattttcgtctccacaattcttataaaacacggg

SEQ ID NO: 126445 - DNA, 186 bp, Arabidopsis thaliana columbia
  unsure (1)..(186): unsure at all n locations
tggagctgcacgnggtggcggccgctctctaactagaggatgcaacgccctgcaagaattcgcggccgcctcagactgatgtattttgtatcgggccttagatccgtgcggcccacaatgaacgagcgcattctatcctctccaatattagttttaacaagtgacatcgactgaacaggagaacag

SEQ ID NO: 126446 - DNA, 536 bp, Arabidopsis thaliana columbia
  unsure (1)..(536): unsure at all n locations
atggaggggcggcgactctttgcaacgggggtccgcttcggtcaaaaaaaagaacgacgaacgcgtaacttgcgtccctgtctcgcgagcagctatgttgctccttcctagaagagacacgaacaagcaagcctggtagaatgatcagagagtctggctagcagtggtcgacagtgcgtacaagaacccgcgagacggcttctttctttatagggagggtgagaccaggggagaccgagccagcacggaagcagggaagcgaaccgagaggccgccgggcgtgggcgaggggcaaggccgagacaacaccggaagagaaccgaagnagggtgggaggaggcgggcaagaccagagcgcgcgcgtgcaacgcgcctgcagggaagccgagagcgcaggcgccttggaggcgccagccacactcggaaacagcaggggggatctctgatgcggacgaaggcgaacgcctcgaaggcgctcgcgcgacttgggaccgattgatcactagaggcatggccaagacaaatactcggaacaa

SEQ ID NO: 126447 - DNA, 497 bp, Arabidopsis thaliana columbia
  unsure (1)..(497): unsure at all n locations
cccccccncgctgacaagggaaacaataagctagatatcgaattcgcggccgcgctttagaaatgctcatatgaccatgatgcaaggagtggaaagttcgcgtaacgacactcatgagaaagccatctcacatgcaaagtcgcaaccaattcaacaagatggcgccttatattcagataccgcctcttctaatgaatataatgcaggtcaaggtgatccatatgtagcggaatgcccaggcgaaacatggatattaccgaagggaagatgcatcacaggattgactgctgtgctagtgcatcatatccctgtggatgggaaaacagctatatctattttcagtggaaaattcgccaagtgcttccaagttactgatactctagccaatcaagctgatgataaggtcacggaggcaagattttcaactgattctttgcaaaagttgctgggatgatgcgcgagattagtctgtctataaagaaaaggggacagcagct

SEQ ID NO: 126448 - DNA, 504 bp, Arabidopsis thaliana columbia
  unsure (1)..(504): unsure at all n locations
ggagctgcaccgaggaggcggccgctctagatctagaggatcccccaggctgcaagaattcgcggccgcataagagtctgaaaaagacagacagacaaacaaaaaaatgcaccaggaacaagagaatgaagatcatgtacggacaaataaacggagaagatataatcaaacaaacacaggaggactcttatcctcctcgggaggggcgggcanaacagggagaaccagatgattgagagcctctggagatactgctaggagaatccaccgatcctctaaaggaagagcaagtagctttgggtaatggaggcggcgactctaatggggctgactctaaaaagcaagctggggatacacgaggactctgcagatcttggtggagcatttcgcaagaacactggttcctcagagcgaggaggcaatgggcagaaccagacggcgtggaatcggaaacaggggctgcgcctgcacggataaggccaacggacatggccctggggtctg

SEQ ID NO: 126449 - DNA, 508 bp, Arabidopsis thaliana columbia
  unsure (1)..(508): unsure at all n locations
aggagctgaccgaggtggcggccgctctagtactagaggatcccccaggcctgcaagaatcgaggccgncgaggcatcagactctctgataaaggaaaagcacaaggagaagaagcacaagaaggataaagaactgaaagaaggaaaagagaaaagggaaaaagaacaaaagcaaagacaaacataaggatcgctcctgagagcaaagaggaacataaagataggaaagacaaagatcgagataaagaaaaaagcagaacttcagaggacagaaaagctagctgggagttttgccaaacaccggggacagagaaaaacttgtaacaaatacccttgaagagtattggaaaccgaaagtctaaagttatacaggacctggaaagaaggttcgggaatgaaaaaactacagaaagtaaaagtccaacgaaaaactgattctccttggggaagttacagagaataacattccctgctcaattacctaaaaccacccggacaaaagtggacg

SEQ ID NO: 126450 - DNA, 480 bp, Arabidopsis thaliana columbia
aggctggaaaccgaatggggggcggcttccgttagaacctcactccaccggagaaagaaaaagaggggcgccaaatctcaaggacggagaaaaggacccagaaaccaccgaggagaaggcgaaggaataaggggaagcagggccaccacaggagggggaaaccaaggatcatgacagaaccggagaatggctttctaaaaaagggagaaaaggactccggctcacaggtccaaaacctaaccactgagagggcaggacacggttacccagagcacgtgagggaacttgcatcccaggggaatctacggcatatggacaacctataggggctggagataaaaggggggtagactcgagaggtgggcctgcacagctcttaaaggaaaaaagcaaagggccaaaccctcacagggccccggtgtgaactcacatcccaaagtggggcaaccggggtgactcctcagggaccaaggcagagta

SEQ ID NO: 126451 - DNA, 197 bp, Arabidopsis thaliana columbia
  unsure (1)..(197): unsure at all n locations
gctctatgttctagtaggatccccaaatacctgcagagaattcagcggccgccaaaattcaaaccaaaattgaaacacaaatctaacaaatgtagagagatacagagaagagtagtgattagtgtattcctatgttttatataagcaacgaacaagaagagagaacgagattttttctttaggggcgacccanaagc

SEQ ID NO: 126452 - DNA, 500 bp, Arabidopsis thaliana columbia
ccccccctggctgagaggggatacaaaggctgtaatcgatggcgggccgccaactatatcggattgatcctggtgcccactaactttggcggcggagtatggaaccacaaccgcgtgagaaacacatggttaagagaccaaggaaacagacccacgctatctaacgttgctttcaccgactccgagaggttgatcggtgacgcagttaaaaaaaggttttcttgaaccccgttaacaccgttttcacacgctaagaggttgatcggtcgtcgtttctctgacagctgtgtacagagagacatgaaattgtggccattcaagattcaagccgcacctgccgataagcctatgatctacgtcgaatacaagggtgaagagaaagagctcgcacctgaggagattccttccatggttcttattaagatgcgtgagattgctgaggctcaccttggtgacacaatcaagaacgccgttgttaccgtccacactacttaccgact

SEQ ID NO: 126453 - DNA, 552 bp, Arabidopsis thaliana columbia
  unsure (1)..(552): unsure at all n locations
nnnnnnnnnnnnnnnnnnnnnnnnnnnnnnnnnnnnnnnnnnnnnnnnnnnnnnnnnnnnnnnnnnnnnnnnnnnnnnnnnnnnnnnnnnnnnnnnnnnnnnnnnnnnnncggccgcggttcctgtatattttatttgttgagaaatgtccagttcatatacatttagaggttcctcatgagaaagccttcgaaagtgattcccggtccgaaagctaagcccagaccccactcttctccctctgtgcctttcttctcaagctcatctctgactttgtccattatgtagaagatggtgttgctgcttacgttcccataatccatcaacgcccttctgctgcattccagcttttccggcttcagcttcagctttgtctccagcccgctcaggatggctggtccaccaggatgaactgcccagaaaaggtcattcaactccaacgcaccagagccagcctttgccactagcttcttgcagaactcctccacgttgtcttcgatcttctgagggaggtctcttcctagcttgaaggttatgccctcttctgacagc

SEQ ID NO: 126454 - DNA, 510 bp, Arabidopsis thaliana columbia
ccccccctggatgaggggggaatcaataggctggatatcgaattcggggccgcggaaatggggtaggaaaacggcggattatggttaattcccctccaagggggggaataaacaacacatccaccacatttttgcttcacaattaaactgaaaaaaaaatgaagcacaccaaatcctgagaggccatagggttgaataaggaataggagccgagacttttaaacatattgctctcgtccttcaacagtttttactaataagtctcaaaatacagttcggccatagcttaacgatgcacggtaaagattctttccccatttttccttgacgtgtgtgctggggaattgagaggtacgtaacgtctcttgtgtctcatcaacaagtctacaacgtgggatgctcaggatgagagcaccttgatcggttgtggctgctgttgatgtgattctgaatccaccatcccaacgcctgtggatgccttcacttggatacagaaaatcaagttccacg

SEQ ID NO: 126455 - DNA, 481 bp, Arabidopsis thaliana columbia
  unsure (1)..(481): unsure at all n locations
tggagctcaccgcggtggcggccgctctattctagtggatcccccaggcctgcaagaattcgcggccgccgaagaagctcaagaagcgttaagtgttgatcgtcatgaatatgctcctgtcacatacgtctctgaaatggtctggtctcaagagttcatgaggcttgcaccgactttgnagctctagggccttctgagctatggngcgagacggatgcaaggtggattgggtgtaggaggaactggcggtaagaatggtcgcggcattttcaatataggcacagctacaataacgagagctgattaacattccaagaataagatctatttcaaggatgttgcctgatgtgacgaggctaaacaagacattatgggagttggacatttccttaagaccccaaagaagtctgaggatttgggcgctaaaattccgaaagggcacttttagtcggtgcgcctggaaccggaagacccttttagc

SEQ ID NO: 126456 - DNA, 511 bp, Arabidopsis thaliana columbia
tcgaatggggcggccggcgggtttttaacaggggggtgggagtctaataaagaaagaaaagggccgccattaggaggagaaattgatcccacacgcaagggggatctgggcctcccgacattgtatggagccacatctcccaaaccagacctcccggagcaagacagaagacgagcgaccgggaagcaggccgtttttttttgtggcgggggtaacccgaacagcccctatggccaactaggaacgcagaacccctatgggttccgactatgcacatgcgacacctcttgggtgtcctcgaacgaagcaccattatacgtcacttggtgcggtggaccaaaccggaagagcacagtacctcttacactctgacccgtttctaaaagagggcgccattaacggaggtcgaccagcgaccgatgcaaaacacaaaacgaccgggtctaaaaacaacggcgtcactaggcacacgtgtggattatggccggagaacaagagtattctctaactc

SEQ ID NO: 126457 - DNA, 276 bp, Arabidopsis thaliana columbia
  unsure (1)..(276): unsure at all n locations
ggggcggcgcttctactagaggagcaactccctgaagaaacgcggcccctttagagatcaaatgtcactccagaaaaaaacctacgagataacactgcacaaccagtgccaaacacatgggaactgcactatataattcactgcaaacagagaataagaacgttccttctttgggggggtgccggagananacgagacccaccgagaaaagaaaagccccggncgccngcggggagggggaccgacgaccagacaagagacgggggaagaacacaa

SEQ ID NO: 126458 - DNA, 522 bp, Arabidopsis thaliana columbia
  unsure (1)..(522): unsure at all n locations
nnnnnnnnnnnnnnnnnnnnnnnnnnnnnnnnnnnnnnnnnnnnnnnnnnnnnnnnnnnnnnnnnnnnnnnnnnnnnnnnnnnnnnnnnnncggccgcggaaagaaaaacccgaaaacaaactttcatttcttatttttatcttaataaagttacataccatctttcttcattgtctttgttataaaataatagtctgtgaacatttacgaaccatgttcttaccttggtaatctcttgaataatatttttaaactgaaacgcgcaatactattaaaacgtaaagtggagtataatgctaaaagagatcagggactcaccttatgatctcgggaaactgcccaaactctcaacaatagctcaaaaactgaattcagaaatgacctgcatcagatgaagcccttgatttgagagcgtttaacacaaaaactggcagaaataaacagaacaaagaaagtggtctcacatgacatcactgtcaagcggagaatctgaggtaagatctgtgatgtatagccacact

SEQ ID NO: 126459 - DNA, 221 bp, Arabidopsis thaliana columbia
ccccccgggtgagggaacaaggtggatccatggggccgttattctttagaaaaacccagagaaaccccgctcacacaaaaagaccagggtccaccacatggggaaaaccaccgggggactttttgagaaaaaaccaaggggaagcccaacctaaggttttatccggaccacacgggggaaggacctccacaaagccttccatggtgaggccccagagacct

SEQ ID NO: 126460 - DNA, 429 bp, Arabidopsis thaliana columbia
  unsure (1)..(429): unsure at all n locations
nnnnnnnnnnnnnnnnnnnnnnnnnnnnnnnnnnnnnnnnnnnnnnnnnnnnnnnnnnnnnnnnnnnnnnnnnnnnnnnnnnnnnnnncggccgccagaagttgaaaggttttaatgttcctttctccataaagacgtataactcggtcttgaattcttagactaccatcatatcaatgttgaaagacttggatagctagacagnttctctttctgtttagctgtactttctgaatgaggacgaaacacttctggtccatgaattgactcagtcatcagttttagatgaagcatttgagtggaacgcngtagagggtaagttagatctacatggtttgcacttgagctcatcgtatttgatattgctgcaatggattgatgaaaccagacttagatttaagcgaagataagtgtgtaattcctgcaaaa

SEQ ID NO: 126461 - DNA, 345 bp, Arabidopsis thaliana columbia
gcccccccttgactgcgaggggataactaagcttgatatccaattcgggggcgcagtagattcatcaaaataagccctgggttatcagaccacaacgcacattagaaaggattgaccaaccgtgcctttaaaaagaagaagccgaatctcagtttcccgattcttggaatctcttttgcaaaggcatagaaccttggtgggctggcttaccttcttcgcgaacttctttttgccattttattcccaatggtggaacccactgactgtgtaaagtcttggacagaatctcgggacttttgcgtcccttttttcggcggaccacggattccaaaagtaacaggttct

SEQ ID NO: 126462 - DNA, 501 bp, Arabidopsis thaliana columbia
  unsure (1)..(501): unsure at all n locations
cccccccgaattgtgggggganacaanagccaggcaatcgaatcgggggccgcatcttttacctcctggaggatccggaaattcggaggccacctgccgttattctcgtcggccatattattcggaggaggaggatctcccaaacccaacggcgcccttttggcctccactctgattccaaggtcccctcctctaaaatgggccgccactcctttttttttttcnggggggcaccaccgccccgggccgccgccgcaaacgaggaacggccctacaccctcagctgcctcggcggagacttctgcggaataagtacctctccctcctgttgctacggctccccctcctccgcctggggagaaggaaaaggcaatacctcctagaacttatgacccgactgtgctgggggagccgatggctgtggggaaagataagaagagaggggggcacaagccatggaatgctaggattgactatctgggaaaaccaaaccaggcgccc

SEQ ID NO: 126463 - DNA, 457 bp, Arabidopsis thaliana columbia
  unsure (1)..(457): unsure at all n locations
ctgcaccgcggaggcggncgctctcttactagaggatgccccagtctgcaagaattcgcgggcgctaagatacaaaaatacaactcaaatgaatatatctttccctccaatacgatcaaaagcttttatatacatatacaattggtacctagacacatagcccgcataaatccaaggatncttacccttctccanaggggccannnnagaagaacctgattccactgtggattggctcgcaacctaggggattagggtggaagttgtgcactttgctgagtcgcagacccggagagcgcgcaagatcaatccattgctgagttccaaagaagagttagctacctcaacaacaaaagaaaacatgtttacaagtagaggttgaaaagaaagttcgcagaaatgcatgctctattaaccaacattatcggatacaggtattcaagaagttcaaaatacc

SEQ ID NO: 126464 - DNA, 512 bp, Arabidopsis thaliana columbia
ccccccctctgggtcgacggtatcgataagcttgatatcgaattcgcggccgccttatatacactgcggagcgggagtcaacagtacacgaaggtactccaaatatgctgacgcattatgctatatagtgcgctgtatgtattatacatgaccaaaggtgattaagagaatcagtggtctgtcgcagccatccatggtaccagtagctgcactgtgaggttgtgtaaacgcaagccctcgatcatacatgcgatggatgctctctgtgtattcagacagagacttgacacgtatggctagagtcagcatcaccacatatcccatcttgagctagcattccagatcacttacaagtgtatgcgtcagtgttggacttagctcttgctttgccgagatgctgaacattgaccatatagagctacctggctctgctctgacgaacgagggcgacacagtagaattatctgaaaactcttgcacagtcatctgctcattttcgataactagcacat

SEQ ID NO: 126465 - DNA, 505 bp, Arabidopsis thaliana columbia
  unsure (1)..(505): unsure at all n locations
gctagctatcggatgcgcggccgccctgtatatgcaccgaacgaacgtcctagattataagcttctcagtccatgcatactcagatcggttagggctcgttgattctctttttgattacgaaagcttaagatctcttttcggaggattttggggttatccatctatggtggatcgcaaatcggncgtcctccaactgcngctctncgaanagaaangggaccagtgctgacagaagcccaacaccagcggcttacgcctactgacatttgngaaaatcttcagaaccatgacaagcctcatataccatcagaagtccccacccgacccggcaggggtccacttattttttcctgatacgaaagcacctgacatatttctagaaagaccggccatcacctggagggaggaagactcatgggaaaaacccttacacacgcctcctgaggagccccaagggacgaaagcatagatgcgcctccattgttacctacccaccatggggaa

SEQ ID NO: 126466 - DNA, 528 bp, Arabidopsis thaliana columbia
cccctcgagttcgacggtatcgctaagcttgatatcgaattcgcggccgcttgctctctatctaaagacactcagtgggactgctagtgttttctacccaacatctgctgctgacccgacgatgtaatcatagtagtgctgccatgctacggcagcgtgacactaactccgactgatacgctgtatgacctgatgtagtcacctgtctcaccatgagagagcccctatcattcgtgagcagactgatgatgaggtcgctgtaccgtatctcatgcgtaggctataggctatccacgttcggacacagtctgcacacatgacaatagactgtcgataaaccatcacacagactcggatgggaggtgaccatcaacctacccagctctgaccagaaagcaataactattcattgactggacatctataacgagtatacatgagcagctctattcgagctgattatgatcctaatggcagccttactacatctgttagagcggacatagctctagtcgcagctacgatgcg

SEQ ID NO: 126467 - DNA, 386 bp, Arabidopsis thaliana columbia
cctgatcgagacaaccagctgtatcgatcgggcgcctctacacagagagcccaccgagagagcgacgcgccaaagcgcgtgagaactctcttgttagacaccctatagacctgtcagggtcatagagactctacatccacggaggcgcagactcactagtcctagtcagatgacaccgtacgaaagttttctgacgagaggcagacacgcaggacatcttctgactgggctcagcttacgaccaccgtaacacaacgatgcgaccaacccgctgaagacgaacagagtgggatgaaccaacagccacgcgagacatgccggcaggtcaaaaatccaggcggggttaagacagacaacatcggctagccaagttgcagcggagcccc

SEQ ID NO: 126468 - DNA, 517 bp, Arabidopsis thaliana columbia
ccccccctcgacttcgacggtatcgataagcttgatatcgaattcgcggccgcttgatcctgaaaagatgaaagaaatgagaatgctgatgtttcctaatgaagatgaagaccgaagtgaggactttagagagcaaacttcccatcttatgacatccttgactaaacgaaatggaagaccttcgcagaaaattgctcaaagaaatagtcatcaagacccttcttcggtcgggcgcaaaacttcgcttgctttgctggagtataaccctggtaatgataaaagctccccaggtagtatcctgatggtacaacaaaataagaatttggcagtgagaaaggcgaaaacgggagggttcgagctggacattcagcatgtcacacccgtaactgattactattcccgcaatggtggtgatgcagcattattcatgggaatgatcgtccgagcaggttggggccccaatggcgttctttttcacactgttaagccaatatgtagctccagttcccagatggta

SEQ ID NO: 126469 - DNA, 531 bp, Arabidopsis thaliana columbia
  unsure (1)..(531): unsure at all n locations
cccctcngggtcgacggtatcgataagcttgatatcgaattcgcggccgccatcgaaccggtggactccgtcatcactctcgctagnagggtgcactggaggatcaattactgagaacgcccagagatttttctgggaaatttgcgttgaagctgctgcgaatggtaacggatcatacgcgaagaagttactgaagatactcataaatgaagttgagttatagaatggtgaagtattggatgaagtgtatgaagagtatgctctntacatgttaacttctaaggaagatatattggtgaaagaaaacataaggataaccaaattcatttcttttcttttccctgaaggttcgtacaaacacccgagttgtccaaggtcgaggaaattagttattccgctgcattgttcgttgaacatgcttgaaggagataccgggtgttccatctggccatcgagtctgtttctgtcagaatttgttttgtcatttccagagttattcgccaataaagcctgttttgaggttggttctgg

SEQ ID NO: 126470 - DNA, 500 bp, Arabidopsis thaliana columbia
  unsure (1)..(500): unsure at all n locations
gacggtatcgataagctagatatcgaattcgcggccgccttctatcacgaagaagaccttaacacagttatatatgcaacgcgccagatcgcgtgagacgcctctctattagccatcgctctatcttgcaagggtctcgagactctacagccattttactctgacttgctctctatattgagatgaacatacatagacaagctatccttagagagaggaatacacgtagaggaaatcttctcatcaggtttgattctacgtgattcatcgctcatccagagtgattaacagattaagaccgcttgaggaacatagcagacgttcgagtgtaaataacagcgcgacgactaggacactgccgagcaagcttaaaaatgcgagtggcgcggctaaagatcagacaccattagcctcgtcaatgctgctaacggagccaccgtatgcggcgatctcacgactctcgaagtggcgatcttganagctacgagccacgacgagga

SEQ ID NO: 126471 - DNA, 481 bp, Arabidopsis thaliana columbia
  unsure (1)..(481): unsure at all n locations
acacaggggagccaaatccagtagaaacaagggcgcccaagcgggngggaagccgccggacagaaacgcagcagcgcgaaaggatgaccagaacccagagagacaagacgaggccgaccacgccagaacgcggagaacaaaaaccgacagactcctccccacaagagagggaganagaaccacgaggaccacccagccaacgaaagagggaagcccccggggagaaagacgcgcccccgacagtgaagaacagagaccagccccccgcgaggaacagaccaagacggcgcgggaggagccaaaagaccccgaccccccaggccaaacgcccgacgcagcaaaaacaaagccaaggccggaggccccagacccagcacacagagcagccaccacgaaagacccccacggaagcccccggacggccggggaccaccaggacacggngaccgccggcaggccccagaggacccaaccccccacg

SEQ ID NO: 126472 - DNA, 184 bp, Arabidopsis thaliana columbia
ccccccctcgaggtcgacggtatagataagctagatatcgaattcgcggccgctttgtatcaacatgaagacactcgcacagctgtatatctaacgcagccagcacgtgtcatgacgcgctctattacacagctgtctatcactgaaccggcatcgtgactctacatccagtgatacacagacg

SEQ ID NO: 126473 - DNA, 378 bp, Arabidopsis thaliana columbia
tacaagtggttcatcgggccgctttacgatatacgccctttaagagcccctctcgcatgattaacttttgatagagacaggatcttcgattgaaaggtactgcttgctgtactcagatcagctttttcacgaggcagatagcgccatgtgaactactgtgttttgttacatgcactcactcgaccttaggatgcatctgtcctataccagagatatatgggtgaacattagctccgactcatgctgcattgctcggagaacatacgctgtgcactgaccgggcaccgctaggtcactgatagcttcgtcgccatcgctctggaagacctggacgacgctagttcaccactcagatagtggactccactgagagcctac

SEQ ID NO: 126474 - DNA, 502 bp, Arabidopsis thaliana columbia
  unsure (1)..(502): unsure at all n locations
cccggaactaaanggggggccgcccccttcacggagagggggaaaccccctncaaaacaaacgccgcccccaaaggcggggcgggtcggccacgaacaccaacaagaccgccggccgaccagcggagagagactccaccacaacaagccgggcgaccgacccgccggagcccacaccagcaaaaccaagaaaaggctgaacccgggggggcgggaaaggcaccgccgggcagaccccaaaaaaaacacccccaccacgacagcggacccagggcccaccgccaaaacaccacccccaccgcaaccagcgcaccacacgaccacacacacgcgccggccacccacgcagcccgcccccccaccccaagacccccccccacgcccacaagaccgcccccccccacagaacccaccagggcgaggagccccacagaacaagcaaccaccccccaccaacacacccacggccgcccaccacccccccagaacgccccccacccccc

SEQ ID NO: 126475 - DNA, 460 bp, Arabidopsis thaliana columbia
aagctaggtataccattggggggcgctggatatgacaggtgattatcacattcaaaggaataaagaccatggcaaccaaaggatcccacagctttattctcttttcgacaaaacaggctggcatcattatttttagtagaacaactttccttcccaagatgaatggtaagagagacccccattatctcgtttgctactatggaagagaaccaaaagggggtaccgggagcaccattctatgatgttccttgcacaaaaaatttaaaacctggaatccgggatggcaccaaaggccaagttttgcagcgaaagggaagaagaattccaattcggtcttgataaatacttcaacgagaatgttcttgtggggggggaaccgagtcggttcggacgtcaaaaagttatacgcctggaacttcgtttaaaaaaggaagttggcttcgtgattcggcctgagaag

SEQ ID NO: 126476 - DNA, 500 bp, Arabidopsis thaliana columbia
  unsure (1)..(500): unsure at all n locations
ccgggctcgacccacgccggtnccgttcgactggacgaagacaacatcttagatccgttctcttctggcgtatgggcacccttggacggacgaacatgatattcattttcgtaggaaaacttaatgtttccggaacgcccgttatgaactggaagcgcccttcgtgctcaactcgttgaaacctgcctggcctggatggaacatttgtaggttaaagtgcaaatggaggagattaggggttgaacaacaactgatcaatgacagtgataatagaaaataaaactgccccgtggcaccgtgtgtagagaccgagtggacagttaacgaggaggttaaggctgccgcagatggcaacaatggttcaggttaaggctgcaatgtcgattgctgtgtggactgtaccggcgctgaaggctgggactaggacggctgctgtcacgtttattaagatctctggttgaataatgagtaaaagttgtatcgtcgcagtagcttgagta

SEQ ID NO: 126477 - DNA, 297 bp, Arabidopsis thaliana columbia
  unsure (1)..(297): unsure at all n locations
gcccggtatcgaattgcggggccgccacgattacgggagcagcagctcccagtagacagagagacgtttaacctacagcccaaccttgtgtgggttgagcttatatttgacccccttttgataataatcgcctctccatgtagcaacaaagacactgttgctaaggcgagaatttttttttataccaggccagggagccccaaaacgccccgtcnggcaagcccccaccggaaagacgccaaccngcgggacaaagacgcaaaaacagcgcccaaggaaccaaccccccaggccaac

SEQ ID NO: 126478 - DNA, 508 bp, Arabidopsis thaliana columbia
cagtaccgggtcggaattcccggctcgacccacgcgtccgaatcgctgcccgctaggcagactgcatggatttcgtcttcgagagaaagcgtttagacgcaagtaatcaagtctgagttagtgattgttgtcaccgggacttcttaacagagttgaaccgcttctttccgttgtataggtgggaactggatgacaatctcacgcataatcatagaactttttttgcaactattgcatggatgatgcacttgagtctctcacgagcatgagcttggaactcactgtcatgataatacagaggcggtatgattgttgcaggagcgctgttcaaaccatgaacgtacagttttttactctgagatgtgactagccaaaagaggcgcagaaagctagaggtcgttttaacaaatgagtcaacacaaatgaatgatgcaatgattatattgaatcagctattcagctcttgtgcagtgtaacatggctttggaaaactggtggatggtttgta

SEQ ID NO: 126479 - DNA, 485 bp, Arabidopsis thaliana columbia
  unsure (1)..(485): unsure at all n locations
aagctagatatccagattcgggacgccagttgtaacgacaaaatacatttttttttttttagcctacgagaggaaagcaataaatacagttgcgcgaaacaactcaaaatagaccacacactgtaacaacaaatggagaaaccaatttgcaaaaatacacccaaaaaattgaaacgcggaaaacacacccatcgtcataataaacagtaatgaatatgaccccaggacacaagataaacccgctgaaccataagtacaagcggctcgtcaggtgtctgcgtcgataggggcaccgtctctagcctgcgagatccggtttgcatagatgggcactagacgaacctgcgtgctgtttagaccttccaaatacggcaaaaatgctttcccaagcattatatatatgtctactagacagaacaccactgtcttgcggacatncgcgctttggctccaaatgcttcaaaaaccggaggcaaaaagacgac

SEQ ID NO: 126480 - DNA, 503 bp, Arabidopsis thaliana columbia
tatcgattagcttgatatccaattcccgggccgggattttaactgaacacatccgtttggggctctgaatctctatcccggggattcccatccggaattggttttttttcaattttaatccagccggtaacctttcttggaaccacccgaaaacgagtgggtctttttaaacaaaccgtgaaaaggccgaagccgggaaagatttaacctccaggaccgtgggaagaaccgcttcacttagtggtgggccatcctttgaccactataagggcaaaccttaaaagccacccgattcaagcaccaggccaccttccaaggaccaccggggcaatcgaggcggttaaccaaaccgtggtttcggaaggacccaaaggttggtataaaggtatggaacctccactggcaaccgtggctgcctcaaaggcggtttggtccactgagagaggccaaatggaaggcctgctaaggtctaaacctggagttcctttgaccataagtcaaca

SEQ ID NO: 126481 - DNA, 391 bp, Arabidopsis thaliana columbia
tcagctgttgacgggcgtcatagtagaaccattgtagagacaaaggtactttctgctaaggcaaaatgtgggatcttgctcgtgacttgctagacttgcctaaacaggtaagtaatcgtctatgataagagtttgtgtatgtcattcacttcacctactctttttgtgcatgattggtgcaaacacccactgttgcattcacttctcttacaatgagctagtagcttcctctaaggtatgcagaaatctcatggcatccccatagcgtgtttctcccagcacattcgaaagtcgtctgcacaggctaaccacgtacttgtacttgatcatcagctcacgttcccttgattggaagagcttaaacgtctttctattcgttctctccagccgc

SEQ ID NO: 126482 - DNA, 504 bp, Arabidopsis thaliana columbia
acaacaagcagattccaatgggggccgcctaccatatctattactatctctatatgatatagatgtaaaaggcacctctctccttgtcccataaccgaacataacccgactaaaccgggactgtaccgaaagtctcaagagtgtagtatagaacacataatagaaacactgggaggtatccctatcatgatagacgtggtgaatccgagacagaacacaacagaggagcaaacagtgcgctcaaagtaaagctatgttgaatcaccgtccatctgctctgcttgcttctagctgcagctctagtgaactagactctgtctaccttaattgcaccagatattgcgagatatgtgtggtacgtatggagtaatatcttttgccgagaatattcaccatttgaacacagcagaaactataggctcccattagcccaatacctgttgatcattgccagactttggagtagcggatctgagcactacctagctatgcatcatctcaagt

SEQ ID NO: 126483 - DNA, 510 bp, Arabidopsis thaliana columbia
ccccccctctgttacggaggtctacataagcttgatatcgaattcgcgggcgcccaaacctttgattcattgctgctggtctctgctgctttatcagagagcatcatcatgtacggaagagatccatggggaggtccattggagataacactgcagattccgccaccgacgatgatcgtagtcggaatttaaacgatttggatcgtgcggctctttcatgttcactagatgagacgcagcagagttggttacttggtccaacggagcataagaagaagaagtacgtcgatctcggttgtattatcgttagccgcaagatcttcgactggactgttggtactcttgatgccgacgcgttactcgccggattcattaccttgatgcgtaaaactgtgccgcggcatcatcctaagacttcgccgccggataattatactatagctctacacaagctcttaagttcttcaatgctcagaaatctgggaaattgccaaagcataataacgtgtc

SEQ ID NO: 126484 - DNA, 487 bp, Arabidopsis thaliana columbia
  unsure (1)..(487): unsure at all n locations
gaatcgagagcgcggccgcgccagtgagcgagaggagcccagcccccagaaagagagggaggagagagcacaagaggagggcgagagcagacacagggaagacgcgcagggcgcgatacacaccgggagagagcgccaacagacgcgagagcgcgagccggaacgacaacgatctgggacgagcggggnaaagcccctcgtacngaggtggcgacgcagaagagccgaaacgacganacaaaggacaccaagaggaggggggccggggaccacccacggcgaacggagaacgccagacgacgacccacagcaggaaggccacaaggccgaggcgcggaccccgaagaaaagggggcacgagggcccaaccacgcccagcggcccacccaggcaacaaagcggggccccaaggcgggggcgcaccccaggggaaccccacggacgaagccagacagacacgacagggcaacgcacgagacccggcaag

SEQ ID NO: 126485 - DNA, 381 bp, Arabidopsis thaliana columbia
tttttttttgtaaacaatttaccatatacaaaatggatgcaaatgtcgattttcataaggagggctaaacacgcaaagctcactttacgactgtaagtgagatgtgtgtcagactagacagagaccacaagtatttttgtggagtgttgctcgtttgatgggttcttcgtgagtagtgacgctcattgaagaaggtccactacgagtgcacattatgctatgttcgggtttggtttcgtcaagttaacaatttgaatcatcttagcacccggtggtgcatttgccggatcgaagctcttatgatgcacaaattggggtatttgtttcataacccacaacaagcgggttccaaggattcttcccaacttgtattcagctgca

SEQ ID NO: 126486 - DNA, 533 bp, Arabidopsis thaliana columbia
cccccctcgaggtcgacggtatcgctaagcttgatatcgaattcgcggccgcttcgattctccattatcttccttctaaatgccttccctaatgttatctgataagaaagaggagaagaagatgaagaagaagatggctttggataccccagagcttgattctaagaaggggaagaaggagcagaagctgaaactatctgattcggatgaagaagagtctgtagaagaagaagagtaagaagaaggataagaagcgtaaggcttccgaggaggaggatgaagtgaagagcgattcaagctcggagaagaagaagagcagcaagaaggttaagttgggcgttgaggatgttgaagttgataaccctaatgctgtttctaagtttcggatttctgcgcctttgagggagaagcttaaggcgaatggtattgaagctcttttcccgattcaggcttccacgtttgatatggttctcgatggtgctgatttagttggacgggctcgtactggtcagggtaaaacattggcttttgtg

SEQ ID NO: 126487 - DNA, 425 bp, Arabidopsis thaliana columbia
  unsure (1)..(425): unsure at all n locations
gggggccggggggcgcccaaacttttcgagagggggcggggaagagggcgnccaaaaaaaaaaaaaggacggcccccnccacaggggagagagagaagagcccgccaaaagcgcacgagcgaagccgaacaacaccggacccaaacggcgaaagcgccgggggaaagagcaaagcacaaacaagcgcacccgaaaacaataccggggagcgggggaaaaaaaaactccctcaggaggggagcgcggacaagaaagaggagccgaacagcaaaaaaaaaagccagacgggcgggggggggaggaggacccacaccccaaaaaacaaacaagcgagagacccagaaaccaccggccaccgcacacacgagaaccgggagaaacggagcagggcgcgacaacgagagaaaaaccaccgggcagcagag

SEQ ID NO: 126488 - DNA, 514 bp, Arabidopsis thaliana columbia
ccccccctcggtggacgaggtatacgatagcctgatatcgaattcgcgggccgggcccttcaagctggttttttgggcttctttggtttttttggtccgaaagatgccaaagtgaatggctgcttattattcttcaagggccccaggccttttgggtgcttcctttaccgaccaattcaattccaaccttggttcttcctggttagaattcagaaaagattttagctaagggaacctagcaattcaagcccaacccgttgcaatttcaagccttacagtaccaaaatccgtggccggcaggaaaccgtggaggaaaggaattgtggaggccactggaccctcgtcggggttaggtctagccacggttaaggctctagctgagacagggaaatggaccgtgatattggcgtgcaaagacttccttaaagccgagagagctgctaaatccgtagggatgcctaaagacagctacacagtgatgcattaagacttagcctcgttggacagcgtgaga

SEQ ID NO: 126489 - DNA, 397 bp, Arabidopsis thaliana columbia
agctagatatcggattgcgggccgctctgttttatatgcgattgataatcgactcacgaaaggatataagctaagctactaagagagtgaggctgacaaagagatagtacagacgaaaacgaccacgtcagacgaccatagacccagagagagagaacaccagagtgggagcaggtgacacaggatcattgattctttcgggattaccaaccgtcaagcgtggtctgatgacacactgacttctaaatcagtagtaatgttgctgatggaggaattggtggagtcgatgatggtgtgggtggcctgccggaggacttggtgccggcgctggaccataacagaggcctccctagaccgttgaaacgatatcggagccttgttctaagcctgcggagat

SEQ ID NO: 126490 - DNA, 490 bp, Arabidopsis thaliana columbia
ccaacacgagctagcgtccgatcgcggccgcctttacaatgatgtgccacccgtgccctgagaatgatttgacagcagagactatcaatatccgtcaccagctacgtttattgctggagcgaagctatacaagcaggctttctacacatcgagtatcggacagaaacggaccactctcctatacatatacatctccttgtttgacaggaatcggatacaagattcagacccatactgatgccggtggcgtagagtgcggcgccactagaatcctcggtatcgctaggaccttaggtggcacgatgttcatcctatgatactgcaccagcagtatctctggccgacacagtaacccagcagtgacagtagggctcttactgccacttgaagtgacgatacctaggaccctattgttcatagacgctcactgtttggctgccaatagaagagtccgttttgtcaaagccttcctaagctcttactacaccct

SEQ ID NO: 126491 - DNA, 339 bp, Arabidopsis thaliana columbia
cccctgatcgcggatgtagtgttcgatcgggcgcacgctttaaggtatgtacgttggggtgagtttggagaactgcgtcagcctttgcagttcgctcaaccaagaggaggagagtgtacgtcaaggcgcttgttagtagtcgtgaacacgttacgaaggaatggaaagggaacattacctccgtgggagatagttgcgcaagtatgctgctgcatcttgagcattggtcatggaatatactaatacaacactaggtggtatggtagttctggcaagggctatactcttatacatattaagctgctcagtcagcatagcaagaaaacattggtgtctaga

SEQ ID NO: 126492 - DNA, 472 bp, Arabidopsis thaliana columbia
agctggttcgattcggggccgcaattttctaggatatggccggcatcttagattaaggggggtgaaaaatggttacctggggggatcgaggaatttttcacaagggagctggccggggtgatataaccaagggcgtaaaaggtaccgtgtggttgcaacgtcgtttacaggggttgggaggtgtagtaaactccattcgaggaatggccggaagagggtttattggagattctaggacgtttaccttctgaacaaaagagaagtgctagccctagagttaccaagcatgggctaaatctttggagtagtatcagtaggagtgaagtgaatgagccatcagttcatgatgtgaaggagggtgaagggtttttgtctaggagttcggaggggaagaaggcgacggatttgaggatggcgccgatcgcggttgtgacgtccagtcggggtgggttggggaagctacaaattcgtg

SEQ ID NO: 126493 - DNA, 436 bp, Arabidopsis thaliana columbia
  unsure (1)..(436): unsure at all n locations
cccctcggttcgacggtatcgctaagcttgatatcgaattcgcggccgccctagagacccttttgctttcgttcgcttcttcaatccgccatggatcttgaggctgagatcgccatacagttgatcgcagagaacatgggtgtcttcagagtctactcactgagtgaaatgataagcacgagactgttgagaggcagatcattcagtctgagacagagctctgagatctgtgagtatgctcatcagccatatccagcgaagctaagagaagctgtcagagaggctgccaagaggagctgagatgttgcagtagcaataaaagagaccttgatgtgtgttataggcatgttgtgctggtagtccacaattggagacagattcttttcttagtggcaggtnatgatcgacaatccaaagtatgagagggagcaaagac

SEQ ID NO: 126494 - DNA, 114 bp, Arabidopsis thaliana columbia
atcgaattgcgggggccgcaaatctatatcccaagggagaataaggacaagggaacgatattaaccagccactttgattaaaccggcaccaaccttatatagcttaccaaagat

SEQ ID NO: 126495 - DNA, 171 bp, Arabidopsis thaliana columbia
gctagcgtccgatgcgggcgggactgttgatatcatcttattatacacgtctgacagcctggccgatctatactggagactctctttactccgccaggacttaagcacttctatgtcttaacactatcaaacataaggaatggggccctggaaaaaatatccaataaccaa

SEQ ID NO: 126496 - DNA, 540 bp, Arabidopsis thaliana columbia
  unsure (1)..(540): unsure at all n locations
cccccctcgaggtcgacggtataactaagcttgatatcgaattcgcggccgcatccggagcaactggttcggtcaccacctccactactacagctccaatccttaaccaagtctccacgtcagagcaacgcggagaacaacaaccgaagaagcaaaaagaagcttgtcgtatcatcaatcgtcttagccatctcacttatcctcgccgccgcgatcttcgtcttagtcagatcacgtctcaagttaaaccaatcagtcccaggcctagctcgtacaccgagtcaagcaatctctaaagcttgtgagttaactcgtttccccgagttatgcgttgactcactcatggactctccccggctcactcgccgcttnctgctctaaagatctcatccacgtgactgtgaacatgacgctncaccacttcagccacgctctctactcctctgcttccctctccttcgtcgacatgccgccacgtgctcgctcagcttacgactcttgcgtcgagctacttgacgattccgttgacgcgctatcacg

SEQ ID NO: 126497 - DNA, 515 bp, Arabidopsis thaliana columbia
cccctggttaggagggtatacataagctagatatcgaattcgcggccgccttactgtggctcttcattacattttcaatactccacaagacaagattctttgggatgttggtcatcagtcttatcctcataagattcttactgggagaagaggaaagatgcctacaatgaggcaaaccaatggtctctctggtttcaccaaacgaggagagagtgatcatgattgctttggtactgcacacagctcagccacaatatctgctgggttaggaatggcggtaggaagggatttgaggggaagaacacaatgtggttgctgtgattggcgatggtgcgatgacggcaggacaggcttatgaagccatgaacaacgccggatatctagactctgatatgattgtgattcttaatgacaacaagcaagtctcattacctacagctactttggatggaccaagtccacctgttggggcattgagcagcgctcttagtcggttacagcctaccccggctcta

SEQ ID NO: 126498 - DNA, 492 bp, Arabidopsis thaliana columbia
  unsure (1)..(492): unsure at all n locations
agctccgaatcgaanncgcggccgcgggctgtgtccctataatgagattctggagtacaagatggatcctcagaaggctggggagcacttctcttctgctcatagaagggcccgcgatcaacagagagagacagaatcacaacaagcgggggacgatcctgtggaagctcctttagtacaggaagagaattcctcttaacgggggtgacaaggaaagcaaggaccncccaccggaaaagggccccccgaaacagcggcggcgcagaaaggaaaccgaaccggcgaccaggggaacaagccaaggcaccgacggccaggaagacccagccaaccgaccccacccccggccgagagcccacaaccagccacgggccgcgacaccaccggccaaagcccacaacccaacccccgaaaacacgcaagcccccggcgccccgcccaaccgcacccggaggcccccgcgaacccccgccccgcagaaacccccgcgcc

SEQ ID NO: 126499 - DNA, 518 bp, Arabidopsis thaliana columbia
cccctcggttcgacggtatcgctaagcttgatatcgaattcgcggccgccgtttatcaacttcgccagctatccaaatcaaaatttctttacttgccaaactacaaagctgtggtggaggccatattacgctgttaaattagcctacaatagccttgcaggaaaaccattgcaaaaccgattcaatagtttgaggtacacgaaacgttcattcagataatcatcctcattaccatcactatattgattggcatcttgttccggctcgtgtttccaagatctaccaaggccgccttcgtcctctaatcttctcatcttggagctcgaagcaccaaccctagaagagtaaacccctgaatctttatgttctatcactgatacagttgatctccgccttacagttacccttgaaggtactggaaagtgttcaatctcatcagaagatcttccttccctggcccttttcttcctcaagttcaacctcatgggtaggggcagatagctagcggtcccattgtc

SEQ ID NO: 126500 - DNA, 491 bp, Arabidopsis thaliana columbia
gcttgatatcgaattcgcgggccgcaagaagtgaagtatcaactatatacgatttaacgaggtagattctgggattggtatgaaacacagcttcaattatggccccccagggttctaagatatacttttaaacttttttaccacggcaaagttttttaaccaaccctggttttaagttaagtgccagcaagcttttttttgacatggggaaagatgtccccggtaagattttggttggacacgggcattggatatttttcgggcagcttccagcgagctggttgttattgtttgggcatcctttcccatagaatcattggcttttgggaaacctttttaataagagatgttccgttgaatcctccgctagtcaaaaaactaacagtggatccttccgaccaaggatatagacattgcaggcgaccaatctttgtccagccccaactagtttccaatgagataccattgaaacatatgaagttaccgtatag

SEQ ID NO: 126501 - DNA, 494 bp, Arabidopsis thaliana columbia
  unsure (1)..(494): unsure at all n locations
gaccacgcgtccgagaccatgcggtggaagcagatcaagccatagtactctcacagaaggagatgctagttctacgatgaacggcgacatggcattgccgcatactgataagtcttctttgccggaggctctntagtagcctggaggatgtcaagaggctctctactgcacagatcatgcgcagcagctagtctgngagagatctcatcccttacttcgcactcgggagaggcctgactcaatctctagagaggcgcttggagagttatcacacatgctaatgacaccactgagacttatctgctggctgcgaaggcgatcagcctctaccattctaaggtacagganactgacagcagcacatgtggacagaaaagcgagacacagtgagcctaagcaggcgcttctgttggatgcatgganaccaggatcgattggatacaaaagattgtggagggcctgcattgcattgccagatgatgttgatcctactg

SEQ ID NO: 126502 - DNA, 466 bp, Arabidopsis thaliana columbia
ggcagacacgagccagacgtccaatgcgagcacgagtttcattgaaatgggaggtaaggcagctgacagacagagcagagacgcggagtgaagagagagagctagaccgccaaccggtgaagcatggataaacggcgctccgagcatgcgcacaaagacgcgacgagcgagtcgtagtgacacaggcaacggcttctgaccttgtagacggccaccaacacccgctgagctacagagcaagagcagcgaagactacaagtggggaaggagatgggccagtggaatgccggatcggacaaccatctgagtcctaaagaatcaatagcccaacggaacagttggacctacaggaagaagagaacaaaacgctaagggcagcctaacacacgaaagcactggagctgcagatctcgataaacaggttcggggacagcggaagactactacaactctagcctcaagagga

SEQ ID NO: 126503 - DNA, 390 bp, Arabidopsis thaliana columbia
agcttgatatcgaattcgcggccgcgaagactatcccatggagctccattggatgatgctcaccatttagtgctttgactagctgctgcgagtcttgaagctacacaaggttttttgatcccaaatctgctgcgtgttggatagcgagagagaaagcccatgcttttgccaataagggaaaactggagttcttgcttcagctttatgatgggactcccaatgggtcgaatggttcacaaaaacccaacccaaaccaggctggtagggcttttcttttcaagaagcctttggagaaccttggattcgggcttaatccatctttgaaggagattttcctggaattcacaacctaaaattccaaggttggattctaacttcttacccttcttg

SEQ ID NO: 126504 - DNA, 244 bp, Arabidopsis thaliana columbia
cgacacgagcacggcgtccgttcgcggccgcaggatctacgcgcaggaaccctagacacccaccgacccacggtcaccgactgccaactgcagccgcagacgggcctcagtcaggacagagcccccggcgataaagcggcaccagagccgacgcccgctctacaggagaaactctgtccgcagcgacgggggaggacaacaagcacggcaccaacccagacacaaccgcgaagaggactccaga

SEQ ID NO: 126505 - DNA, 469 bp, Arabidopsis thaliana columbia
  unsure (1)..(469): unsure at all n locations
ggatggcctgcatgagctagacatccaattcgcggccgctaactgtgatcatacgcagtaaagctactgtaccattaagtgggaagcgtactttcaacagtacgacgccccaagatctatccatgaacaagcggagcgtgaatcgacgagttcgtcgtagttatcttatgcacaaacctatatctgcacnaccgtcgttccatactatgatttttttttgttgcataggaccagcgtagtaagttctaagcatcatgatacttgaccatagaacgtgatcctgacgtcctaccgatcacttgagtctgcgttaatctgtgctcctgcttcatctcgcacgggacatcatcaggatggacctcgaggacatgcgaatgcgatccttgcccgacacttttccatcatcgaagacgcccaaacctgtgcgctgctgatcgtccaagcctgtgagccactactcacgttgttg

SEQ ID NO: 126506 - DNA, 188 bp, Arabidopsis thaliana columbia
gcgcacgcggtcgggaccagacacgaggcatcacgggagcgaagcgccgaaggccaagggccgagacttggttaaaggggcggaaagggagaaggggacgggacaaagccggagagcgagaggaccgaaagcggcccaagaaacgggaaacaggacagagaaacgggaagaaacccgagaggaaaacg

SEQ ID NO: 126507 - DNA, 474 bp, Arabidopsis thaliana columbia
catccaattcacggccccaattttttctaccccgcgtgtacttcttttctcgttcttccttttaattttccttccaatttcttggaaggaaatgggtattactccggcaaccaaaggccggaacctcggttgggtggcatctcaatgatgaggagaatgagggcggatggaaaatgggcacttttgtcgttgcggcagaaaaaccaaagggggccaagtcattagaagtatttaagtctttttttcgtaactcgattggcgcgttcaccatcctccgaacgaaagtccccatctttgatatttggaaattctggggatctttactagacttcccagttcgttttgtgcttcgtggattcgctagctcaaacagatcgagctaggggagcctatacctatctattcaatcgaattttagggaatcgattggcgatctgggcgagagtaattccagagagatcaaggctactagcc

SEQ ID NO: 126508 - DNA, 601 bp, Arabidopsis thaliana columbia
gtacggtgggggtgggggggaggggctggggggggactgggggggactcggggccccgatctctggggatccgggggtagcccacgcgttcagaatgcgcagaattacgcccttggtagtaagcctgtgaccgctgcattgaacttttactcgagaggttttacaaggctggcgaggacattaagggcaaatgctcaaacccgtgaagtatggatcatggaaacacggatactggcagaaagaactgaggtggacctaaagcatcatgtatggtagatggtttttttttgatcgttgcgagggagatgttatatctcgaagggcttgttgtcgagtatgccaagaagctaggtagcatcggacaaaatgaatgttacaggatacttatgtctatgacataggtaggataagctgatatttgggaagatgggatacacagacatgagttgggctttagctagggtggatttaagcgaatagcgtcacagagatatcaaagaaatgaatactggcgagtctgtactaaggatttgcttgaggaagggtggttaggaccatacgctcttcaagaacggatcgaggctctagcttgctatggatg

SEQ ID NO: 126509 - DNA, 520 bp, Arabidopsis thaliana columbia
  unsure (1)..(520): unsure at all n locations
cgccccccctcgatttcgacggtatcgctaagcttgatatcgaattcgcggccgcatttagtcttcttccatttacatttacacattccctcaggttattcatacatctttcatttactttgaatacatcctgcgatcccatcaatctaagagcttcctctcaggtacatgcggtaccatcaatctatgagcttcttatatttctctctccatacccttgaaatctcatcacattatatctacatccatttcctttcttagctcctattctttcactactcatagctctcaggagtttctacacccttattatatacaacagagctcgagttctgaaggttcttcagtctgtccctccacatcgctgcatcgatgtacctttcctctttagacgccaaatccatattcctcactaatttaagctcttccgataaaggatctggtccatcgggagcgctgtcaaggataacattgaaaacaggctntgcgctctgcggtctgcctncataaccaattttga

SEQ ID NO: 126510 - DNA, 512 bp, Arabidopsis thaliana columbia
gccccccctcggtttcgacggtatagcataagcttgatatcgaattcgcggccgcaaaacaccacaaaatgggcttctttaaaaaagcccaacataaaaagtcttaacagatcaaaaaaaagcaagtaaaagagatagagataggagaaagagagaggtcaatgtccaacaaattagtcgacctcctcgatcttaggtccagcaccgcctgaagcagggggagctttatcgtccataccagaggcacctggaccaccggcttcaccaccagctccttggtacatcttggcaatgattgggttgcagatgctctccaattccttcatcttgtcttcgaactcatcagcctcagccaactggttaccctcgagccattgaatcgcctgctcaatagaatcctcgatcttcttcttgtctgcagccgggagcttctcaccaatcttctcgtcttggatggtgttcctcatgttgtaagcgtagttctcgagagcgttcttggcttcaccttcttc

SEQ ID NO: 126511 - DNA, 495 bp, Arabidopsis thaliana columbia
ccgacacgagccagacgtccgattcgcggccgcaaagaactacaacagagagaagagtcctatgttctgcttagtatcataagactacttgactaagagctaactgatgatagattcatgtaagcaatcccatttaacctgatgcaacacaaaatctgctccaggaactcctacggtatattccccggaagtgagagtccaacatcatataacacagttcttgagccacgcctaaacatgcttcacatactttccgggatatataactgaatctatgcatatcaatatcactctcaaggtaattgccacccgagtagaactcgtgctgaggacgtgatatcacaggttatgcgctataagcatgcatgagttgatgctctgacccattcaacagaagatcgtctacattcgcaacacgagccaatatcttgaaccgtgctctagagggtacatgcgtgtcagatgagtaggctctaacttacataacctcatgat

SEQ ID NO: 126512 - DNA, 514 bp, Arabidopsis thaliana columbia
ggccacggccccccctcggtgtcgacggtatcgataagcttgatatcgaattcgcggccgcaaagtatcttacaaagttacaagttacaacaaccatggaacacatacaaagaagaatcctaaacaaaccctaaaattcacacacataacaataaaagcttctaaaaaaccagcaaaacaaatctatgagataatttggggattggattcaaattttaaacgcctgctattgcgttgaaatcttgataacgagacattgcgcctttgaactcgtgttcttctggtttgtgagagctcaagctatgcggaatgtatgctctgaaaatctcctctaggtctggactctgcttcagctcacggcaagctacctcgagagctgtgtgttcgaaccctccgtagaatttctggcggcacacatatccgaagatgagagaggtgataatgagagggatcacaagggccgtgtagaagaatgtcttggctcctaagtagccaaacattaccacttggaata

SEQ ID NO: 126513 - DNA, 503 bp, Arabidopsis thaliana columbia
ggccacggccccccctcgatgtcgacggtatcgataagcttgatatcgaattcgcggccgcgggcaatgtacaacgtgggattagccggactaacgtattggtcaccgaacgtgaacatattccgagatccaagatggggaagagggcaagagactccaggagaagatccattgctcgctagtaagtatgcttcagggtacgttaagggtcttcaagagactgacggtgtcgattctaaccgtctcaaagtcgccgcctgctgcaaacactataccgcttacgatgtcgataattggaaaggcgtagaacgttacagtttcaacgccgtggtgactcaacaagatatggatgatacgtatcaaccaccgttcaagagttgtgtggttgatgggaatgtggcgagtgttatgtgttcttacaatcaagttaacggcaaaccgacatgcgctgatccagatctgctctctggtgttatccgcggtgaatggaaattaaatgggta

SEQ ID NO: 126514 - DNA, 481 bp, Arabidopsis thaliana columbia
ccacgcgtccgattcgcggacttgagaatcttggaagagcagccacatacgctcaacaatcagtcgagggatgacacactcgaacgatgctggcaggaacactgagtaccagtgtttcagcgtcgaacagggcagtaactacttcgacagttctagaggtcgggtggagtgatcacggccctacacacccttgttctctacatgggttggggataacgacgaagcatcatcagtagaagaacccactgggacaagaggctcaggccacactctgatgagacagacgatctgatggaatacctcgacaacgcctcgttggacaccccactaaaaaatgaagctatgctagcagcagatgctgctgctcggacttgagaagaggaaaacccactgcagctgtgaacatagatgagatcaatctcctgctggaagagagacttttcgaagtgaaccaatgggaccttagtttgtaacaatacca

SEQ ID NO: 126515 - DNA, 487 bp, Arabidopsis thaliana columbia
atgcacgtaccggatggggattgccgggtcgacccacgcgtccgattcggggccgcaattatgtttttaggacacaagtgctagtgttcctcacttgcacggacagagctctaagaaatcaagaaagagatgtcacgtctctctttgggttagacttacgagggacgatgctgtctctctctagtgcatggaaccatgaccaccatgctgctgtggaggcttttgtctccctagacattgatgcatggagcttgaagatggtggtgtcatgtaaagagcgggacaacgaccgaacattcccgatgagcctgagtcctactagagggaccaatccagcatgtggctgctgatgatgctagaggtggctaacacctgctgcttgggatggcatgggattgccggcatatgtagtctgaacggatggtggagggattggaccctgtgggttggccatggagctgactctgcttctataagttgtcgcctt

SEQ ID NO: 126516 - DNA, 494 bp, Arabidopsis thaliana columbia
  unsure (1)..(494): unsure at all n locations
taccggtctggnattcccgggctcgaccacgcgtccgcaagaacgtgatgtcataatcatgtcatgtgtgcgtgcttctaatcacggagttggcttcgttgctgatatccggcagatgaatgttgctctcacccgtgcgaaaagggctatatgggtgatgggaaatgcatctgctctgatgaagtgcgaggattgggcagcattgatcactgacgttatgctaggaattgtttatggagatggagtctcttaccaaggatttccccgttccaaaggtacctagctttatccccaaagcacctaatgctagaggtttcagatcaggtgggccaagaaccagatccatcgatatgcacccctgatccaggtcanggacaccatcagaagacgacatgaagctgagcacancaacatttcaagaatgggaatctcgaagggagactcatttgatgattctgacccgnccgggatagatatagagatgcttggcacat

SEQ ID NO: 126517 - DNA, 489 bp, Arabidopsis thaliana columbia
  unsure (1)..(489): unsure at all n locations
gcagtaccggttcgggattcccgactcgaccacgcgtccgatgcagatgtgcgtgagagcactatgtgcaagtcatctacgctactaggctgctntgtctgcctagacgactgatggagcttgcgtcgggtcgaataagcgttactgaagtcatcatcactctctgcgaaactggctgattgctcatcagcagatcctgaagtatctggtatgtatcgcccatcttgaaggtgtcgctttggtaattgagttaagctaaacatgacagaangatctgatcttcttatttgatatnccacgcgagaagttcgctcgtggagatctaggctctaattatgtggctacaacgattacagccagcaagccattagccatgctaattcggtcaagtagagacatggctttgctatctgtgcagcaattactatagttgaaggacattctgctggatgcagtgcgacacaaggccgtgatccacgattgcatgca

SEQ ID NO: 126518 - DNA, 512 bp, Arabidopsis thaliana columbia
tgcaggtaccggttccggattcccgcgtcgacccacgcgtccgctttgtcagacgaggaaaagatcgacttgattgagagcagtcctaccaaagtgtttggcatggatccagtcaccagacaggttgtagtggttgatcctgaagcatacacttacgatgaagaagtgatcaagaaagctgaagcaatggggaaaccgggactcattgagatcagtccgattatgacagttttatattcactgttgagtccacaggtgcagtgaaggcttcccaactggtactaaatgccattgatcttctgaagcagaagcttgatgcagtccgtctctcagatgacaccgtagaagcggatgatcagtttggtgaactcggtgcccatatgcgtggaggatgaactcaagtgattaattcgagctctttgttatacctgtttgtttcaggttttgagtttcttctggagcagactgatattaaccgtagtggcactgtcttgtttgataacatgtgaagt

SEQ ID NO: 126519 - DNA, 533 bp, Arabidopsis thaliana columbia
  unsure (1)..(533): unsure at all n locations
ggtacgcccgcaggtaccggtcctgaattcccgggccgacccacgcgtccgaggtaactcagcttgatctacaccgttacttccatgctcttggcgctggagttattgaggaggtccgtgtccaacgagacaaaggctttggtttcgtgagatataacactcatcccgaagctgctcttgctattcagatgggtaacactcagccttacctctttaacagacagataaagtgctcatggggaaacaagccaactccaccaggtacagcctcaaacccacttcccccacctgccccagctccagttcctggtctatctgcagctgatctcctaaactatgagaggcaattggcacttagcaagatggcaagtgtgaatgcgttaatgcatcaacagggtcaacaccctctaaggcaggctcatggaataaatgccgctggagcaactgcagccatgtatgatggtggctntcagaatgtagccgccgcacagcaactcatgtactatcagtaataaacctcagttcgtggcgcc

SEQ ID NO: 126520 - DNA, 506 bp, Arabidopsis thaliana columbia
gattccgggcgtcgccccacgcgttccgaatggacagcgctttttgatcccccttcaaacccggagggcttatgaaggagaagactattccttacaccggaagggaccggaagacctgcaggctagacaagtccaagaatcgtggcctttgtctccaccttaagtgttatttccatggatgaaaaccaaatggctgcaaaccttgtcatgaccggacctcttgctggtagccatcaacgctggctatatgcagacttacattggaggagtctcatgcccttacatatgcaccaggaggctcaaccacggtgtcttattggttggctatggagcggcaggttacgctccggctaggttcaaggagaagccttactggatcatcaagaactcgtggggagagacttggggtgaaaatggtttctacaaaatctgcaaaggccgtaacatttgtggtgttgacagtatggtctccactgttgcagccaccgtctcaaccaccgcccatt

SEQ ID NO: 126521 - DNA, 372 bp, Arabidopsis thaliana columbia
cgtatgaatgataaatggttgtacccaaagtttgtttcatccctaagcttgaacttcctctttgcactgagggtcctgaagcctgccgtactaccccaagatttagtggagaggctgatgaagtgatgtatggacacacatgtgctgtgatgcatttgttgcgggatctatcgcactagcatgatcttcctgttcagacaagagcactgaaaagctctatgttgcgatgctgcgggcataacccgtaagtgaagcgcaatcccgccttccaccaagagctgactgagctctctcaagccgcgttacatcatacatccatatagaacgttgtcccaacgattcgcagctgctttgtgtgaaaatgggatatga

SEQ ID NO: 126522 - DNA, 517 bp, Arabidopsis thaliana columbia
  unsure (1)..(517): unsure at all n locations
gcaggtaccggtctggaattcccggctcgacccacgcgtccggagccttaggagcttaggacagtgtagagtcgattggtctcagacggatcaagcttatgtccttaaatccgatatccccgtggtggggaaaaataacgtgcaggtgtacgtggacattaacggaagagtgatggagattagtggccaatggaacagcaacaagaaagcggcgaccaacatttattggagaagcggccggtggtgggaacatggctatgtccgccgtctcgagcttcctagcgatgccgacgccaaatactctgaagctttcctctctaacaacgacgattactctntcttagagatccgaatccctaagataaattctaagaacaagttttaatctgatcatgtcgccttgacgagttttaactttagattcttttcgtaattntgttttctttagttaactattattatagatatgaaattctgtggtagagacacaatggatgaatgatatgttatatataca

SEQ ID NO: 126523 - DNA, 512 bp, Arabidopsis thaliana columbia
gcaggtaccggttcaggattcccgggtcgacccacgcgtccggccaaacacttggtcagccgacaccgacgtaccccgccggtgttggcggcggcggcggtggaaggaaaaaaggcgttggcgtgaggacgtggttggtacttaactcgtcagggcaatcggagccgaaggaagaagggaaacactccatcatgcggcgaacgggattaccggcgcgtgatcttaggattctcgatccactgttgtcgtatccatctactgttttaggtagagagagagcgattgtcatcaatttggagcatatcaaggcaatcatcactgctcaagaagttttgttgcttaattccaaggatccttcggtctcaccctttattgatgagttgcagaggcggattctctgtcaccatcacgccactaaacctcaggaggagcagaactctgggggagagcctcatacgagggtagatcctgcccaaggagaagctggaacggaacaatcttctggggatcaa

SEQ ID NO: 126524 - DNA, 471 bp, Arabidopsis thaliana columbia
  unsure (1)..(471): unsure at all n locations
gcaggtaccggtttggaattcccggctcgacccacgcgtccgcgcttctcccccacctcccacacattactaggctcatcaaattcaacaaaatttccccattattcaagttttcttttaaaaaatgaaataaaggaagggtcaaagtcaaagagaagaagaagtgaaccaaataaggatcgtggcgtggaaatcagaaacaaaacatctctaacaacgatcctctatcacttcctcttcttcaatgtcgctcatcttccacttgtgcatcattatctttgcgtcttcgtcaagtcaaattgtttccaagacccttttagatcgtatcatactcctctttgttcccttttgttgttaagtgaaaaaatgggttttggtaatttaattggtgtgcatacattttctattntgttattcttccgttaatgtaatgaaagagttgttagcatataaaacaaagttcagtttctt

SEQ ID NO: 126525 - DNA, 507 bp, Arabidopsis thaliana columbia
gcagtaccggtctcggattcccggctcgacccacgcgtccgaccaaacacacaaaatatggccatcccctaaagaaactgaagctcaagaaccctctgaatctatcagaagatctcaccaataaagggttttgagaggttcaagtttctctttatgggatggccccaaacacaagagtactcacaaaaggtaagaagaagaagagatctcttggagattattattgtgaatgttcgtgtgtgggtgttgtgtaaatgatcatcatcatcatcatcatcattatccaatatcataattatcaatatggtgatgatgatgatgatgaggattgtgtgtgaatggagcgatgaagattgcatgaaggttgatgaagacaagcttgatgtgtcttttgttatccctcgtttgggcaacttcgatcctttggcaagcttcggttcccctcggaatcagcagattatgattactatagctcttatatgtttatgttccgtgtttactttgttt

SEQ ID NO: 126526 - DNA, 494 bp, Arabidopsis thaliana columbia
tccgggctcgacccacgccttccggagaagtttggcaaaaccttccttccttggatggtaccaggggtggcttttaacaacaataaacctaatgctttcgccattccatggccgaagctgagccggttaaagatagctaaccaccgagtcagcacagaaggagtcctcagaatcttatcgggctgggtttttctggagtccttggatcttaaaggctgttgggacgtgcaacttgataccaggtttttcaaagagaagtttccggatatgaaagtgttaggtccacgcgtgatcggattctatgatatgataaatgattgggaggattgctgctcagattacttctcagatgggtctgattacttggcttgggagttttttgaagatggtgtaatgggagagttctatgaggatgagtttgagcatggttgggacgataatttttatgcggaaaacgcagttttagacatggaaccgcatatttggccaccatc

SEQ ID NO: 126527 - DNA, 371 bp, Arabidopsis thaliana columbia
ccccacgagagcagggagaggagaacagcccaaggagaggggagcgccacagacgggcgacagagaaaatgacccaacagggcgcgaacaccgacgaaggcgaggaccaaaagcgaggcggaaggaggccctcccctgtggagccggggagccagcaccgcgggcggaacagacgagcaaaaaaaaaaacccccccccacggggaggggggggggaggcccccccaccacgacaaaacaaagggacgcacgcgggcaaacaaacacaacgacggcgggcgagaagaagccacgccagaacgagagcggagcacgagagccccccggccgagcacgagggacacacgggcacgccagcgacggggcgccagg

SEQ ID NO: 126528 - DNA, 495 bp, Arabidopsis thaliana columbia
  unsure (1)..(495): unsure at all n locations
aattcccgggctcgacccacgcgtnccgcgagacagagagagagatagaaaaaaaaaaaaaaaaaaaagttaagggtccaataaggcctttttccgtttcctgaccctttttggaattggaattccaattggaattccaattccctattttaatgaattggcttttaattctttccattccaatcctcctttgaaaattccattctttttaatattttcctgggggattcctaaaatatttaaaaccgaaaaagggaaatttttgaaagagaaagcatccttccatcgatggccgttataaccgacaaggaacctatggtggatccttttttggtcgaggctcttcaaacccctcgtcatcgtctcaccattttgcgtatggagctggatatacagaagttctttcaaagtccagagcagcaacattatgagttccagcctttgcctacatcttatcttcgtcttattgctcaccgtgttgctcagcattacggg

SEQ ID NO: 126529 - DNA, 247 bp, Arabidopsis thaliana columbia
  unsure (1)..(247): unsure at all n locations
aaaaggagcggcacaaaaggccgagaaggcggcgcaccccaagaagacggagggacacgcggacgcccaaaaaagcaaacgaggacgcacacagcgcgcggcccccctccaaaaagagggaggcgaaancncacaacccagaaagaaagaagcaaaaaaagccacgcgggagagggcgggggggggggcgccccccaaaaccaaaaaaggaaccgagaaaagagaacgcacggaaaggagaagccca

SEQ ID NO: 126530 - DNA, 424 bp, Arabidopsis thaliana columbia
  unsure (1)..(424): unsure at all n locations
tggacgcagtccgttcggattcggctcgacacgcgtcgagagtgaaacagcttcttcgagctgatggaacacagctatgaacctgctagttgagagagaacaaccttgccgtacctactgaccagctgattccgtgtgagagcgagacttcatctggagaagatttggagaaattttgggtcgagtgatccatggagggtgtagtgagatgacatgatggatgatctgtgagatgatttcggagaaaacgctgtattcttcactatccagatcatgacccaaaaggagcagtcctcatccanaaacgacgatctcattcgattctgagacggatactttcaggcgacataataaatcttttataatgtatttggtgttaaattggtagtatgaatgaacaggttcaatgtaagtaatctgtgtt

SEQ ID NO: 126531 - DNA, 520 bp, Arabidopsis thaliana columbia
  unsure (1)..(520): unsure at all n locations
nnnnnnnnnnnnnnnnnnnnnnnnnnnnnnnnnnnnnnnnnnnnnnnnnnnnnnnnnnnnnnnnnnnnnnnnnnnnnnnnnnnnnnnnnnncggccgcaaaaaggattcatttgaaacgaagaggacgaanactctctntacacaaatgttttttgctttccatctttatataataaacattacaatgcaatgccactctttanacccaaacctcagtgtccgttcgatggcctgaagtccctatagccgttgattccagacaaattcgggtttgatgaatctaaatcaaagtaagagtaagtagctgttgctgatgctgatacatcgtcttggttcctcatagccggtaaagagaaatccatatttgccatctgccattgcgattgtgtttgcccattaccatatggcgaggaagaagcagaatgtggcatgtattcaccgtaagactggtgaaatccatcatcactgtaactcctagacctgctagagatcccgagatccgcaccgccatgatatgag

SEQ ID NO: 126532 - DNA, 529 bp, Arabidopsis thaliana columbia
  unsure (1)..(529): unsure at all n locations
cnnnnnnnnnnnnnnnnnnnnnnnnnnnnnnnnnnnnnnnnnnnnnnnnnnnnnnnnnnnnnnnnnnnnnnnnnnnnnnnnnnnnnnnnnnnnnnnnnnncggccgccacattatatataatatatacattcatcaggaaacaatcaagcgtaaacgaaaacatggtcgaagacaatatattaatatgggttattgaacctgacacagaacgacgcggaaactgagattctaaaactgtgataagaaccctaataatatgacatatatataatggggtcagacgaagcctgaattgatatgccaacgattgtatctataaccaattactattgcaacacgaacttgactatgaggctgactctaatgctcgtaacacgttattgatgcatggcctctatagtggatcaatggccgtacatgtcaaagccaacgatataacatggacgaactgtgagctgatgcactgatgcgtgaatgagtgacctcgatccacctgtctagatggacatacgagtacgaatatctggc

SEQ ID NO: 126533 - DNA, 515 bp, Arabidopsis thaliana columbia
  unsure (1)..(515): unsure at all n locations
nnnnnnnnnnnnnnnnnnnnnnnnnnnnnnnnnnnnnnnnnnnnnnnnnnnnnnnnnnnnnnnnnnnnnnnnnnnnnnnnnnnnnnnnnnnnnnnnnncggccgccaaaagtcaatacaattttcctttaaccaacttaaaaagtaaactaaaccaagtcggttatggaaaccagaccagctaataaaagcgaaattgtgtatgtaaatggtgtaaagaagaggaatcaaagatcagcttttccaggatagcgagggaaaggaataacgtctctgatgttatcaagtccagtagcgaagagaatcatacgttcgaagccaagtccaaacccacaatgcttcactgttccataacggcgcaagtctaggtaccactcatatggctctattggaagacccatctcctcaatcctctttttgatgacatcatatcgttcttccctttggcttccaccaatgagttctccaacctttggaacgaggacatccatggcagcaactgtcttctcatcatcg

SEQ ID NO: 126534 - DNA, 511 bp, Arabidopsis thaliana columbia
ccagctctcaaacaaccctctctagaggaaagcataaagctgcgagctccgaccgcggtggcggacgctctagaactagaggacttcccgggctgcaggaattcgcggccgcgtaattataggcccaaatatagcataaacatcatgggccaacaaacaatacatatatcaatctcttgaacaagcataattcacataataatgatagcatagattcattaaaaccctcaagagtagtaacttatgcgtctctgtcccttttacattcagctggcataaccggaaacctagtccggtcggtacagtagttgtagatggtccacttcatacgaacccatttgagacgacgccattgatcagcgtcaaagtaacagaactctttctgatcccaccacatgcagccttgtgtggcacagtacttggcttacactgaagcttggcaaccatctatgtggaatactttgtaagatgcaacgaaaggtgcattggcccaattggtcttctctaaacc

SEQ ID NO: 126535 - DNA, 120 bp, Arabidopsis thaliana columbia
  unsure (1)..(120): unsure at all n locations
cggccagcaagaaaacgcgggcgccaacagccagcaacgacacagagcagaccaggaaagaagagcaacacagngaaggacncaccgcccccgagagcaaacaaggaagcacacgggaca

SEQ ID NO: 126536 - DNA, 550 bp, Arabidopsis thaliana columbia
  unsure (1)..(550): unsure at all n locations
atgatactccnnnnnnnnnnnnnnnnnnnnnnnnnnnnnnnnnnnnnnnnnnnnnnnnnnnnnnnnnnnnnnnnnnnnnnnnnnnnnnnnnnnnnnnnnnnnncggccgcgaaaatacaaaacatgaagaaaaaatcgaccactaaaaaacctgcaagacattgtctcgtacatggtacgatctanaccanaccanaccaaacaaaaccaaaccggaaatcaagatcaccaaaccaacacattcccatagctacattatgcactgtacaatctaacaaagattactcagctntctttaagtcactcctcttttgaagttgaatctgtttgacacgaaccattagcttgacgatctgagtaaggtctaatgaaagatcgtctccaccaaacctcanaagctctctgaagattcggacatccatctcctccgtttagaaaactcccgagccacgacagtaaaatgctctgctgatcttccaatggtagtgtcagtatcgtccgaccaattccttcctccactagtttaccatcaaacgatctgcaaccatgt

SEQ ID NO: 126537 - DNA, 533 bp, Arabidopsis thaliana columbia
ccagctcagcaataacccttactaaaggggaccaaagctggagcttcaccgggggggggggcggtttaaaactagtggatcccccgggctggaggaattcgcgggcggcaaaaattccttcaagaccccaccgccaccaaccccaagaggagactttaaaccctggagccgttaaccaaccgaggggaattaaggtgaatccggttattcaaaggggggtaactattattaaaagaatcctaaaatcttcattattatttgggtattggcgccaactgggcttccaatttggggaggtgaacaaccagtttttcctgggaacccacttttttttggacggtccttttggattccaaaggtggggccagttcttattccaaagggattagatcctggttaattagtggggaccttaaccttatttacaatgggttaattcccaaggatggcttggtaggggccatcaccggccgggaggtattcactgggatagtcaagctcaaactcttcaaatccaggcaaggtgggttttc

SEQ ID NO: 126538 - DNA, 187 bp, Arabidopsis thaliana columbia
gagctccaccgcggaggcggccgctctttactagaggacccccgggctgcaagaatacgcggccgccgagagaagagggaaccctacaacatgagacacaaagggcacagacagcatacgagaagacgaatgatctcaacgcatacctaaaacagaccggcgcctaatgccgcacggcctggaaaag

SEQ ID NO: 126539 - DNA, 516 bp, Arabidopsis thaliana columbia
cagctacaaacaaccctcattaaagggaagcataagctggatctgcgaccgcggtggcggatcgctctagaactacgtggctcccccgggctgcaggaattcgcggccgcctgattctcggcctcaacatcttgtatagccagtggggcactatacaactcgctaatcagtctctggaccgatgatcatccactagtttatgactgcgactgtttttaaaaacacgtgatatttttgacaaagcactgtctatccctgatacattacatgtgcatgtacacgaagctctatagcgaacggatcgaactggaaggatacagtattctgcatacgaacgaccgtagatacaacgcgctttgccatacttacaactgcagctttcagattgatcctcccacacgctaccgattatacacacagatccgccttcaccttggttataccaccatgtatgacgatcactttctataaatcaactgactgctgcgtagaacctctttggattatttagaccga

SEQ ID NO: 126540 - DNA, 518 bp, Arabidopsis thaliana columbia
  unsure (1)..(518): unsure at all n locations
cnnnnnnnnnnnnnnnnnnnnnnnnnnnnnnnnnnnnnnnnnnnnnnnnnnnnnnnnnnnnnnnnnnnnnnnnnnnnnnnnnnnnnnnnnnnnnnnnnnncggccgctaaatgttaatggtattaaaaattattcaccttgtttgttattcttatttctgcaaaaccagacaacaattcagtaatcaaaaggacacatacgtaagttgaaattggaaagagttcttcaccaaagctaacttgatcctcacgaacgtctcctaaaatagcaatcttcagctgaagaacaacacacgcctcctaataaactcgttgtctttctcacatacacaaaaccaaatttagcaaaatggttattattacctttctccctcctttcggaaattgccaccaccaatcaaacaatctaccttcttcttcattcatcattcacttctcagaattttgagaattttgaattgagaattgcgagagagatctcattctccctctcgcaattctccgtcccctcgaatccaa

SEQ ID NO: 126541 - DNA, 342 bp, Arabidopsis thaliana columbia
agcgtccgtgaccggaataggcgccccacaatgggagacacaaacaaagaagactcgtagtacctttgcacaaggttgtgctgagccacaaagactgggactcggcgaccaaggccgatttttatcaaaggggcccgaacgggctaaacgtaggcacttacggggccccagccaggggcagacgaaggcaataaggcagccgaaagaaaacgaactcggatcttgttcaagatgaagcgtcgtaacccaaaatatctaggaacaaagaccaatagtgggaagagtggctacagattggacaaccctaacccgcgccaaagagggaatggaaaaccccctatc

SEQ ID NO: 126542 - DNA, 614 bp, Arabidopsis thaliana columbia
  unsure (1)..(614): unsure at all n locations
nnnnnnnnnnnnnnnnnnnnnnnnnnnnnnnnnnnnnnnnnnnnnnnnnnnnnnnnnnnnnnnnnnnnnnnnnnnnnnnnnnnnnnnncggccgctttcttttgaattttaatcacatattctccacacacgaaaacaacccccaataccaaaacaaagcaaaaacacaacgcacattctgtgagaaatttcaagatttacattaataanataaaccaaaacctaagatttatattttatatttagaagattgttgggtnntcccgcgcaaaaatagaccaagaaataaaacgatttnntttttttagcngtttctttcgctntggggatnnttggggattttcaaaaagatnnncagacccntttnntatttgggagtttnntggaanccctggtannngagcacnttgtncttncttttncttggnnnaagtctgggtnntgtcngatttgtggaatcacaantnnctttccncggtttcaccccacccttanaagaatcggttatcaccgggttcatcgggtgatccaatcttccgtgtcttagagacgatcacagcatagcttncttcggtgggtgggtcanactgagctccgtagctcacatcagcacc

SEQ ID NO: 126543 - DNA, 546 bp, Arabidopsis thaliana columbia
ccagctcatcatacgactcactatagggaaagctggtacgcctgcaggtaccggtccggaattgctgggtcagacccacgcgtccggagactgtaataataggcgcactgctattgccatcaactgtgtgagccacatctacgagtgtataggatcgcatgagacataaataagtcttcttaacggaggaggcatacatgcttatcatgatatacggaggatcgccatattgtatctgaagagttagaaatattcatatcattcctacagggcaagacatccaaatgaccagtgagattggtcataacgacgatgattatgccgtataggttcttgttcatgaagctgctacttctatcatagacacctctggaaatagagctcctccatcgagttcttacggatgcattctatgaagcttgtcatggaatgctctgagcaaactactgttgttaacctaagacatgagactctcgattatcgttgacgaatagcattcaattgagtacactcactgtgtcctacattgttgagtagtattctgtt

SEQ ID NO: 126544 - DNA, 527 bp, Arabidopsis thaliana columbia
cagcttatacgactcactaggggagctggtcgcctgcagtaccggtccggaattccgggtcgaccacgcgtccggagatgtaataagaggagcagatatagagcgatcatcattgtgagagtcatctacggtggtggagaaccaccagatgcatacatcaacgcctgttagcggcggtggtagagaagagtatcaagatatacgtgtcttagcatagagtgtggagagaattagtcatatgccaatgatcagctcacgtcgagtctgtcaactgagcatactgtgaggtcacgagtacgatgatcttgccgtagtagtggctttacggtagctgatccttctatcgtttctagccctgaaactggatctgctcgctcgagttactcctcttgtagatctatgaacttcgtatcggtatactctgaggtatcatgttgctttgagctgatgatggacattccgttggtggttgacgaagagatttaacattggtatactcaatgggttcttaggttatgggcgttggt

SEQ ID NO: 126545 - DNA, 540 bp, Arabidopsis thaliana columbia
cagctccaataaccctcctaaaggggaacaaaagctgggagctccaccgcgggggggggccggttcttaaactagtggattccccgggctggaaggattcccgggccgggggaagggattccgcactttctttaagttcctggtacccaacccacttcaaccaaattttttcctaatcccttcttcggtcctcctcctcctcctcctccttaaaatggtggaaattccattcgaacctttgaattcgctttcttttccgtcctttggtggcggaccggtttgggggtttttaattggaccattcccaatcttgccctgagttccacaatcagtttctttaaaccctaggttttacacaagcattctgtttctccaaattatcgcagactctttcgttctattctttgtagttttgtaaaaggtatttcggtagatttagggtttgtctgtgtctagttttcgagatcgagagagatttgtgatgaatactaacagaggaagatatccaccgggtgttggaacgggtcgtggtgcgcctcc

SEQ ID NO: 126546 - DNA, 487 bp, Arabidopsis thaliana columbia
  unsure (1)..(487): unsure at all n locations
annnnnnnnnnnnnnnnnnnnnnnnnnnnnnnnnnnnnnnnnnnnnnnnnnnnnnnnnnnnnnnnnnnnnnnnnnnnnnnnnnnnnnnncggccgccacttcttctgcttcaaaagttattcagactaaagcatactttaatcaaaagacagagacactgtctagaaccacacctctaatactttttctctttgttataatccgaactggagactatctttacgttagcctttcgttttcaatgatctcattgtcctcctcaatagtgcaccaactgtgacgtgttaatcaatagagacccatgttgcaggacatgttaaaatcctgtccaacatgcatgtgaagtcctctaacctcaaccatgacactcttgttctcttgttcatgttccaaaccaatcacgtaggtatgctccttcgagctaacctcaatcgtctttgtcagtggacttgcattgatgtgaatctcagacactggaactgctcct

SEQ ID NO: 126547 - DNA, 491 bp, Arabidopsis thaliana columbia
aattgaccctcactaaaggggaacaaaagcctggagcttcaccccggtggcggggcgctttaataactagtggattccccgggctggaagaattcgcgggccgcgttttttacgaaacatatcttatttgggtaaaagcggaaccacacccaaaaatgcattggccctggttttatccataaaaaaggactaccctgccggcgattttcggtagacgcctctttctaaagacgtgcttttggttaccactaatttaaatccatccgtataaccaccacttggcttttgctttttgccccaaaaggattgtttacaacggttgaaggccccgttggatccgaccctgggattccctataatattgccatttggttcccgggtctttttggcaggcattaatcaataagggttctgaatcagaatgcgccttagccggatcttaaacggaaactggttcgagatggaacctgaagttcaagatcttgagggga

SEQ ID NO: 126548 - DNA, 507 bp, Arabidopsis thaliana columbia
  unsure (1)..(507): unsure at all n locations
nnnnnnnnnnnnnnnnnnnnnnnnnnnnnnnnnnnnnnnnnnnnnnnnnnnnnnnnnnnnnnnnnnnnnnnnnnnnnnnnnnnnnnnnnnnncggccgctatctttcttccggttgcagaaccaagtttcgactctagacttccttctctcctgaaacacgagagagctgaaatgaagagaaaatgtaggatttggttgcctaaacagctcgcatcaactgatgatttgagtcacagtctattgtttgggtggttcgtttgccattcctcttcttgtcttgacgttgttgtgtccttcatctctgatgagagctccttgtccaatgccggatctaagctccaagatgtactccgtgaaacaaatgagaagatgccctcaactttacgggacaaggcagcatttacactccttggtcgttatgatataagccgtaatgctaatggaaacgtatcaaagattataagagacaaagatatgtcccgcaaggctggagcttatgttaggcc

SEQ ID NO: 126549 - DNA, 524 bp, Arabidopsis thaliana columbia
  unsure (1)..(524): unsure at all n locations
cnnnnnnnnnnnnnnnnnnnnnnnnnnnnnnnnnnnnnnnnnnnnnnnnnnnnnnnnnnnnnnnnnnnnnnnnnnnnnnnnnnnnnnnnnnnnnnnncggccgcggaagatatgtataatcttctgtctgtaaaaacctatacgcctaagcttgagaagctaatctttacatgtaaagattttgtacaaaaagaaaaaaagagttaaaaatcatcagcacggtggatctcgcccataatgcgattgctagtgactntgaaaccaagaagagctggatcgatctgcctccctttcttccctttcttcttcccgccaccacctttgcttccttctgttacatcatttgactctgccgccaccttcttcatgctattactcttcttcaacatctcactgaacgatgtcgcctctgacgttgaccctttgtttcccgctgctcctgattcccgtctcacaccgccttcaattccactatacgaacttgctgctgtcctgctagctgtgtcagagatacgctctatcaa

SEQ ID NO: 126550 - DNA, 507 bp, Arabidopsis thaliana columbia
  unsure (1)..(507): unsure at all n locations
nnnnnnnnnnnnnnnnnnnnnnnnnnnnnnnnnnnnnnnnnnnnnnnnnnnnnnnnnnnnnnnnnnnnnnnnnnnnnnnnnnnnnnnnnnncggccgcggaactttacataatatcaaaatgattacaaagatggtaaatgaagacttcaaagatttgaaaggtcaaaaaagaagaagaagaagaagaaaactacgaatctctatagtttgttgctcctcatcagacaaaatccaagaccaaacaaaagcatcatcatcaagctttacacatgcatggagtgagaggattttcccaaagatcatagttagggaaagtttcttcaggtaaaccggttcgtgtttgatgggttacaactacatcttccacaaaagttgcccatcccatgntaggatccccaaatgatttcgacatcaaccctttatccggtttgattgatttctggcgatgccccatatatctacgcgctccgatgatcnagttttgcaagtttccaccgtgtgtcatc

SEQ ID NO: 126551 - DNA, 170 bp, Arabidopsis thaliana columbia
  unsure (1)..(170): unsure at all n locations
tcgctctagtaactaccaggactgcccgtgctgcaagaatccgcggccgcctacttcaatcttttagagagaggaacacgnagaagtcttgtcgacacggattctctctgtgaactgccgtccaaagctctgagtctttgcccggtattatatggctttggtagcaaaga

SEQ ID NO: 126552 - DNA, 527 bp, Arabidopsis thaliana columbia
  unsure (1)..(527): unsure at all n locations
nnnnnnnnnnnnnnnnnnnnnnnnnnnnnnnnnnnnnnnnnnnnnnnnnnnnnnnnnnnnnnnnnnnnnnnnnnnnnnnnnnnnnnnncggccgccaaaatcactgactggccatatgagatggtttttgtgcatagatgagaatcctggaacatgctatacttgtatattatacaaaggcacaatgtacaatgagtcagataataagagtcactctttcgctctatcttgnctccctgttccatagatcatacacagcatgtgcaaccactgacactgaaacctgactaagagtcaaggcaaccaagagaccaaaactggaagactcantttcgcatctcctgcaatcaaagaaatgaactggtaacctcgggatcaagtctcagcgaaaggaaaaggagtgttattgggtgaagaatggttacagttagtcacatgttggtttccctgagcggtttcagacagactgaactgcatgtcatgtgtttcagaccatccaggctcatatgtctcaggganaccgattt

SEQ ID NO: 126553 - DNA, 133 bp, Arabidopsis thaliana columbia
  unsure (1)..(133): unsure at all n locations
acacccacctaaggggactaccgcggagcgcacccggtggcggcgncgagaacacaggagccccgggctgcaggaaaacgcggccgccagaccaaagagacccctgagaaaagcaacatggacacagaacagc

SEQ ID NO: 126554 - DNA, 153 bp, Arabidopsis thaliana columbia
gcgcggccgcggggcggcgctcgagacacaggcgcccggctggagaagcgcggcgcggcaggctgagctagctagaagaagaccgactcagcgcacacacggagggtgtagctgacgttggagcgacaagagggtctatcagaccaaagagag

SEQ ID NO: 126555 - DNA, 476 bp, Arabidopsis thaliana columbia
  unsure (1)..(476): unsure at all n locations
ctcaggcgtcccgtcctggatgaatgaaggaggccgctgcgtcgtgttgctgcctcagcttgagatgaaggaacacgtgctctaccgtcaaaaacagggatgttttttagcctgatttctggggcggaaaaaaagggtcttatcagaccaggaaagatttcgtggatagaggggtcaagcggaaaccccaggaggcgggggaacaccacacaggcagcngccaaaggcgacgagccnaccaacacaaagcccagcaacccagaccccggagagaaggacgcgggcgcaaacccgggggaggggaagngggaccaaccagacccaaacaaaggaacgaaagggacgagcgccaaagggggagaccaaagggcgaaaccaccaaagggcaccggccccagcccagcccggaacccgggaccaccgcagaacccccgagaaacacacgggaccaggacaacggaaaggacccgggcgca

SEQ ID NO: 126556 - DNA, 266 bp, Arabidopsis thaliana columbia
agctcccgcgtgggggcgcttatactagggaccccggctgcagaatcggggcgctttttagttttattcatgtctcacaacgagacaactcgatgccatgcacagcaaacccagcacttgtgaattcaagagacgtagtcgtacagctaatttatgagagacatggattcccgattgacaaagcacatttttccgcgtctcgctggattggatgtacagacagacctttattgagtttgaacatgaagcacttgctttttcaggag

SEQ ID NO: 126557 - DNA, 402 bp, Arabidopsis thaliana columbia
  unsure (1)..(402): unsure at all n locations
actcctagggacaagctgactcacgggggcggcgttaacagggatcccggctgagatcgggcgtttttgatttaatacttctcacacaacaccccatccaacaagcaaaccacccattgagatcaatactatatacaactatttttaaattgttccaataacaatactttttgtcttctgattggatcaagatcaactttattgatttgacctgagagcacttcttttcttggagtctggttgtcgattgtgatcacaatctntcccggttcacccaccttaaaagaatcggttatcaccggttcatcggttgatccaatcttccgtgtcttagagacgatcacagcatagcttccttcggtggttggctcanactgagctccgtagctcacatcagcaccc

SEQ ID NO: 126558 - DNA, 405 bp, Arabidopsis thaliana columbia
  unsure (1)..(405): unsure at all n locations
cccaccggggggggggcccctataaccagggggggcccgggccgaaaaaaacggagcgccagaccgcgccagaaacggcggcaacgaggccaagcagccaaaccccagcccagacccgcacgaaagcgaccgggcggggaacgacgcgcagcgccagaacaaggcccaaagaaataggtgaataacggggggacaccnccaaagcccagcaccccggaaaaacaccaaaccccaggacgacggagccggggaagcccaagaacgaaaacgcgagccacacgcccccgcgcaagccaggccgaaaccaccaggggggaaccgaaccggacggcgagggacgaccacagccacaagcggcgcagagggcagagacaaagagaaacggaaaaaacgaggaaccccaaa

SEQ ID NO: 126559 - DNA, 526 bp, Arabidopsis thaliana columbia
  unsure (1)..(526): unsure at all n locations
cnnnnnnnnnnnnnnnnnnnnnnnnnnnnnnnnnnnnnnnnnnnnnnnnnnnnnnnnnnnnnnnnnnnnnnnnnnnnnnnnnnnnnnnnnnnnnnnnnnnncggccgcgattcctctctctctagctctctttctctatatttctcccacgtgctccgtctctgttatgttctatcttcaacgaccaaactgaatctagttctttggatttcgaacatattttagtacttaagcagtattctagtgatggtctatctccaatctgtttacaataaggcgacttgaaagaagcaattttgaaaggactatataccaaagaccatcccttgtagcaaactagcaattggtcattagggttcatatgagaggtctgagactaagaagcagagtttttatgcccatttacttttgaattctcataacgagaagtgaaagaaaaatccctttttcgcctcttgattcctcggtttctatggatagaatcagtcacttagctgacgaaatcttatcgaagattttgtctttt

SEQ ID NO: 126560 - DNA, 530 bp, Arabidopsis thaliana columbia
atgatcttcagctctctacgactcacttagggaaagctggtacgcctgcaggtaccggtccggaattcccgggtcgacccacgcgtccgctagtaatctcaagaaccaaaccgtcgctgagaaacctgatcatcatgggtccgggtcagaagaaaaagaagagagagtttcgggtcaagaaatgaatccgacccggatgttatacgggttaccagttggagatccgaatggtgcgagttttagttcgttgttggcgtcgaatatgcagatgggtgggcttgtttacgagtccgggtcgcgttggttaccaggtatggatttgggtttgggttcggtacggaggagtgatgacacgtggactgacttagctatgaacagaatggagaagaattgaagaggcgaagggtaatttggtcaatttgacatagatgtcttttttttagtcatctcatagtcaaacataacaacaaatgatgtcggtccatttagcgctgtagtcattttttttcactttgtttttcgtcattttc

SEQ ID NO: 126561 - DNA, 531 bp, Arabidopsis thaliana columbia
cagctctatacgactcactattagggaagctggtacgcctgcaggtacccggtccggaattccggggtcgacccacgcgtccgtggttaagcagctggagcagttgaaagcagaggagaagatattgaagaaacagaggaaagaagagaaggctaaagccaaagccatgaagaagatgactgaaatggactctgaatcatcttcttcgtctgaatcaagtgatagtgattgtgataaaggcaaagttgtggacatgagctctttaagaaacaaggctaaaccggttcttgagccgttacaaccagaagccacagtagcaacccttcctaggatccaagaggatgcaatttcttgcaagaacaccagtgaagcattgcagattgctctacaaacatccacaatttttccttcaatggccaatcctggacagacattgaagacggtagaagcggtttcagtggttggattaccattgaatagagtagaagtgtgtatgggaggggaagtgtaagagatcaggaggagctttgt

SEQ ID NO: 126562 - DNA, 512 bp, Arabidopsis thaliana columbia
acgactcacttaaggggaagctgcgtccgctggcgggtccgggccggaattcccgggtcgacccaagccttcgggttattacccttaccatttcttttttttacggttcttaaacattcttttttttttttttttattacctgggtggaacctttggtggattggccttggagcggtaccgaaaaccagaaacccttagcgggggagaaaccgaccttccgacaaaggccactttggtattattctttggcttttaccaaccaattttttggtcttttcaccgatccaaacgaccaaacccaccccaccatggacctaccttccttcttaaccgctcttaagcaggaattttcttcggatgaccaatacgccgtcgtttcagaaacctccaccgtcgaagactcgttttcttcatgtgtttcctcaaaggaggaagaagtggaagatgacagcaaggagaaagtgatgcagcatctttgggaagcttccgatgacgaaacttgggatcccta

SEQ ID NO: 126563 - DNA, 519 bp, Arabidopsis thaliana columbia
gctctaaacgactcacctagggagagcatagggacgcctgctgcgccgcggtgcgggagatcgctgtagtaagtaccaggctgtccgcgggctgcaggaattcgcggccgcctaattcttacacggatatgcctcatgatataggatgaaactgaaagtcgttgtagaagattatgtatatgagatcgagttagtcctgagactaaagagtcttatggtgcacaccacattctcttggacgaacaccaggcaccaactacaccgagacagatgtgaaggttggatattgacatctggtatcttaagctcacgatgtatgcatgggcacggagctatttcatgagaagagctgtgcagactcgtaccgtaatgagacaaatctgcatgaggttgtttagcgactctgaaccatgcgttgcaaactgggggaagtgacccgagaggttgatcctgatgagcgagcatcaacatactccaacgtgggcaggtgcactagaaaacaagtggctggtgtactgt

SEQ ID NO: 126564 - DNA, 443 bp, Arabidopsis thaliana columbia
agctcaccggggggggggcgctctagatcagtgggagccccggtcctgaggaaatcgcgggccccctactcctactcttccttctttctcctgaactgatacgaatcctcactcttttttctctacaccaatgggatttccaaaacctcaacctttttttcgaaaaccggaactagccgtctattatttcgagcacaaaccccccaaagcctcactttggataataaaatggctcccctaatggaaatggcttggatgggtatcagccagactcgcgaaaggtcagcaagcgactccgcccgttccacaccagctactccagaaactctcaaattcttaaaagcttaaatcttttttcgcactttgaaggccctgcgcaccgctttgaccggagaggaggaaaaaaggcgcgcctggacgacaatgagggattgctatcaacc

SEQ ID NO: 126565 - DNA, 497 bp, Arabidopsis thaliana columbia
gccgccgcaccggggggggaatccccgttttcacacaggcgcccgtgtcctgtaggaattggcggccgctcgattcgctaaccagtttaaaagcccgaagagtgggtcccattagggctaactagcagcctatggtttcaaccagtgctacaatcaacaacaacagcaacaacaaacacgaccaaagcattcctccctgaagaggctaaccccaagacccgccccaaccggccgacgctacaaagggacccaggctgccgcagcgcgacagggcacaacaaacccccccaaaaggggccccgaaacacaaaaccacagcccgccaagaaaaacgcacagacaagaaaaaacccggcaaacaccaaaaaagacgggccaggacacaacccccaacaccaccgggggaaaaaaaggaacgagacacacaccacccccccagcaaccagcagaaacacacaaacgccaaaggaacccccccagaaacggcaaacaaccac

SEQ ID NO: 126566 - DNA, 364 bp, Arabidopsis thaliana columbia
ggagccgcaccgggggggggggccgcccaaaaccaaggggacccccgggccggaagaaatccccggccgccacaaccacaaacaccaaataacggcggaacacggccaacccgaaacgcaggtggccaaccacccaatgcgcgccaccacggcccacaccggcagcccgagcgacaagcccggcccccaaaccctggaataagggtgcgcgaaaaccggagggcgagggaagcccaacaacgaggccagaacacaggaagggccaccgggaacaggcaagccccaagagcgagcgcggaagagccaaagaaccaccacaccgcgggaagggcggacgcaccccccggaagagaaccaccggacc

SEQ ID NO: 126567 - DNA, 480 bp, Arabidopsis thaliana columbia
  unsure (1)..(480): unsure at all n locations
ggggngggggccgcgcaatacaaggggagccaagccccgaagaaacgcggccgccaaaaaagagagaggaacagacaaggcccgagccccgccaaaggacgccaggagccaagcacagccaacaagagccaagaagcgagaacacaccgcccgggcacggcgggccttcctccttaggggggggagagacaaaaaggcgacacaaaaaaaaaaaagaacaacgaaacgggcgcgcgagcccaccgagggacaccggaaacacaggcaacacgcagcgccacagacccacggaggagcgcagggaccaccggaaagaccaggccgccaagaagaaaggaagagcgcggacaaaccccaggcccacaagcccaccccacgcgacccacacaagacccccggccccacgccccagacacgcaccacaacgcaaaaccagacacgcacagcaggaacccgagccccggagacacaaaacaggaa

SEQ ID NO: 126568 - DNA, 499 bp, Arabidopsis thaliana columbia
  unsure (1)..(499): unsure at all n locations
aacgggggggggggcgctccaaaaccaagggggcgccccgggccggaagaaatcgggggccggcgcaaaagcaagggcggacctttcctccaaccccttaagaaaaagggaagaacacgggggaccgaacgggcagaaggcgaagacccaaccgggccgcacccaacaagggccaaggccaacatgtcctcccaaagggggcccgggacggggggacccaacggggcaaaaaaaaccagggaaacgcggggaaccgaaagagccaagaaacagggggagaacgcccaaaacccaccaacccaagggcccggccggagacaccgcggaaccggggcccccggaccaggggaccaggaaggcaaaaccgggggacacccaaaaagccgggagaggccggcgagcgcaacccacacagccccnaaggaagccggcgcgaacgggcggacaagccgcacaacaccgcccaaccaagaaaaacccccgaccccagaaaaaggac

SEQ ID NO: 126569 - DNA, 518 bp, Arabidopsis thaliana columbia
aggggaccaaagctggagcttcaacgggggggggggcggtttagaactaggggaaccccgggctggaagaattcgggggcggcttttaaggccttccccaggaccggagaattttttttaatttggaggaatttcctttcaatttggcaagaaccaaccaaggatatggcatggcaaaaatctttaagggcattatttttttaatttaataatccatggccaggattaagagttccaccagttggatccatacatacatagaacctccttgggccatattcttttggtggtggcggttccacaaaatcttaacccatctggtgaggaaggatggtggcctgtggcaatctcattttctgagagcatctgatgtgagaagtcccatctgttcagtaggatggttcattggtggattctggctccacacattactcagggtggatggtaactctagttgctccaatatcagttcattttccactgatcctgagattaactcatctgtctcaccaatcact

SEQ ID NO: 126570 - DNA, 504 bp, Arabidopsis thaliana columbia
  unsure (1)..(504): unsure at all n locations
agctgcaccgcggagggggacgctctagttacagtggatgccccggtctgcaggaattcgcggccgcgaagcaaggacgtattatctcaaatggaaaatacgagacaccccaaataaatggaaacttcaaactttctttgaacaaattactcaaacaaaaaacacatttaaaccaagggcccaaatttcctacgttggaggatgaaaangaaacagagagatttccaagagacagttccttggcttttaagtaaaatgtttgatttggtggatcaagtctcataatctacctcctcctccttttcaacatgatacttaccttcctcatcaggaggggcactcttggtactggtggtattcagcgacccaaatatttattattgttcttaacttccagaaactccatttcggccattccttttctcgggtaccaatgcagaaacgctttacgcctaaacctaagccggaacccggtcactcactcttccgaacctttattgaatc

SEQ ID NO: 126571 - DNA, 268 bp, Arabidopsis thaliana columbia
gaccccaacgaggcccgcaagaaaaaagccacaacggggggggggggaaaccccccaaagagacgcggcgccgcacaagcccacgagccagcaccgccccccagaccccaccagccacgccccgacccagaagaccaagaccagaagcggaacaaccacaaccagagcccgcacaagaaccgagccgacaaaccaaaccggggacgaacagagagggaaaccgcagcaagacaaagacgcggaacggagcgggccagaggaacaaagg

SEQ ID NO: 126572 - DNA, 243 bp, Arabidopsis thaliana columbia
tgaaccgggggggggaccgctgtgtacaaggggcgccccgggccggaaggaatccgggggccgctaaaaaccgggaattgttgtcactatgtgtatgttgattacgagtcttaagacctcaccaccgcccaaacgaaaagattttaacgaacaaaaacagggtcaaaaaaaaaagaacccaccttcataattgggggcgggcccgggaaaaaacaaacctcccaacgggaaaaaagaaaaaat

SEQ ID NO: 126573 - DNA, 450 bp, Arabidopsis thaliana columbia
  unsure (1)..(450): unsure at all n locations
aagaaacccgaaagagcggacacccccgccaaaaaaaaggcccagcccccgcaccgcggcgaggagcgcagcacacaaagcgggggaccgagagacggccaacaagagactttttcctccgggggggggagcaacccaaagcggcgcccaagccggaaacaaaacacccaccacaancgggcggggggggaaaccccacaacaaaaacaaacaaaccccacaggagcccagcccgcccacacgccgcccacagacgcgaacccaccgacaacaccagcgacccacagccgagacgcccgagcaaagaaaaagaacccggaggagcacacgccccaaaagacacccccgccgccacccagacacgccccgcgcggacccgccaccgcacgcagaaaacaacaccggacagcgacaccggggaccacgggcgaagaagaaccaccccacaac

SEQ ID NO: 126574 - DNA, 542 bp, Arabidopsis thaliana columbia
agctcgaaataacccttacttaaggggaccaaagctggagcttcaacgggggggggggcggttttgaactaggggattccccgggctggaagaattcgggggcggcttccaccaccaaaaccacccccaattcccaaaccaaggcaaaaccccacccccttttggggattccaaatttccttattaattaccaacttaatttatttatttaaaattggtttcccccaattaccaaattaccatttttttggttttttccttggattgggatttaaaggatcagacctttaatggagttttgaacctgaagagcactttcttcttcttggaagtctggttgtcgatggtgatcacaatctttcccggttcacccaccttaaaggaatcggttatcaccggttcatcggttgatccaatcttccgtgtcttagagacgatcacagcatagcttccttcggtggttggctcaaactgagctccgtagctcacatcagcacccaaaaccctaagctcccatgaaagcgtgcaagcctcagaagcag

SEQ ID NO: 126575 - DNA, 533 bp, Arabidopsis thaliana columbia
taacccttactaaaggggaccaacgccggagcttcccgggggggggggccgtttaaaaccaatggattcccccggcctgaagaatttccgggccgaattaagaatcgaggaaaagaccactccaacggtggaatcctggtttaactggaaagagtttttaatttctgatcggctgttttgcgatggcaaccaaagagaaaacggaggaaagttgcttattcaaagccgtggaacctccaataccgaaggaaagccctagacagcaccgaatgaaactggaggtgcacggtgaggttcttcaccgaatccaggattccaattacaaagaagctaattcccctggttttgaggatctcctctggcttcacttcaatcgccttcctgctcgatatgctttggatgtaaatgttgaaagagcagaagatgtacttactcatcagagatggttgaaattggctgaagatcctgctactagacctgttttcgaagttcgttgtgtgcaggtttctcccacattgaatggaaattctggt

SEQ ID NO: 126576 - DNA, 543 bp, Arabidopsis thaliana columbia
  unsure (1)..(543): unsure at all n locations
ggctcacnnnnnnnnnnnnnnnnnnnnnnnnnnnnnnnnnnnnnnnnnnnnnnnnnnnnnnnnnnnnnnnnnnnnnnnnnnnnnnnnnnnnnnnnnnnnncggccggcttgcaacttatttatttataggaaaagaagctggaacattatagagcaatcaaattacgtgaaccccaaatggagaaacggtaccacgaccattaagatttatttgggatgactggcgaccattatgaattggttatgccttattaaccaccattatggaaaccaccatgggacctcttacggtatgggtaccggcagaaccaaattaaattggcgaccaagggaccttccgagcaaccgcggttgcctgtaccagggccattaaaggatggtttttggttaactgccttaaaatccagaccattaggcgggacctggtggctaagctaaaatccgggacctgcgactccctttgatttgtatgtagagtttggcgtgccgacgttggtccacgttctgttgaagtcacagagaggtactaatcggtcctgacat

SEQ ID NO: 126577 - DNA, 153 bp, Arabidopsis thaliana columbia
ggagcctccccggggggggggccctttaattacaaggggttccccgggccggaagaaatccccggccgccattccccaaaaatctttgaattcttcaaacattttatcagaatcaccgacgagattccgagcccggcagggagagttggacca

SEQ ID NO: 126578 - DNA, 483 bp, Arabidopsis thaliana columbia
gggggccgccataacaggggggcaccgccctgaagaaaaagcggcccgccccgacaggagcgacacaagcacagcacaaggactgggccaacgaagaccaccagagcgaaacctcgaagccgccgacaaaggtggcagcgccggcaacggccacccacccgggggccccccctccccaggggggggggcaagccaaacgcgcccccagcgcgaaaaaacaacacagccccccaggcgggggcgacaacgacacccccgggggagggccccgcccgaagacaccagcggcaagcgccgcccacgcaaccccgccgccgccgacccccgacaccgcagcgacgcccccgccccgcgacacccccacgcccacccaggggaccgacgcgccacagccccccgggccggcccgaggcccagccccggagacaaaacgcacggcgggcccaccagcaagccaccgccgcaacaagccaccgcagtaca

SEQ ID NO: 126579 - DNA, 485 bp, Arabidopsis thaliana columbia
  unsure (1)..(485): unsure at all n locations
ggagcnccaccgcgggggcggacgctctataactagaggcgccaccgcgctgcaagaaatcgcggccgccacaggacgagacccgatatacacccatcaccaaacggacaccgcgacaccgacccatcgcagcaggacacgcccacaagacggggccactagaccgaccagaaaaagacgcggaaaccgatgctcctaacgggggggggaaacccaacgaaagcacgaacgacaaaggggacacccgaaccgaaccagggcgccccacgacggaaacacccgccacacacgcccccgcgacgaacccgacgacgagcgcccccacaaacggcggggaccacgagagacggggcacggcccggagcagcgcaaccaacagcacccacgacagcaccagccagggccaaggaaacaggagacacccgcacagcagacggcaccgaaagcgacaaacggaagggcgggacccccccagaccgaacgga

SEQ ID NO: 126580 - DNA, 505 bp, Arabidopsis thaliana columbia
taaccctcacttaaggggaccaaacgccggagcttcaacgggggggcggggcggtttaaaactaagggattccccgggctggaagaattcgggggccgaattacttttggggtggaagaatggaaccacaaccgggtggaaaccatggttatggaccagggaaccagaccaacgcattctaacgtggttttaaccgattccaaaaggtggaccggggacgcttttaaaaataaggaggccatgaaccccgttaccaccgttttgaacgttaggaggtggatcgggcgcggttcctctgacagttctgttaagagtgacatgaaattgtggccattcaggattcaggccgaacctgccgataagccattgatctacgtcgaatacaagggtgaagagaaagagttcgcagctgaggagatttcttccatggttcttattaagatgcgtgagattgctgaggctaaccttgttgtcacaatcaagaccgccgttgttaccgttccag

SEQ ID NO: 126581 - DNA, 501 bp, Arabidopsis thaliana columbia
  unsure (1)..(501): unsure at all n locations
ggagcgccaccggggggggggccgctctattttaggggacccccggcctgcaggaatccgcggccgcctctgagcaatgggctttttccttgtgaaaagcttggaataccagctagacatggatacttcatttgatggaagagcaaagatgagggggagacttgttattcgcctacggttacagagttgttgnaaagggggggaacccgccaggagaccgaaaatggaggcaacaaaagggcccagcanagagggcaaagaaagcgctttgggggggcaccaccaagacgcaaaacccgacnggggaccaagccaagcgaaggagaggccggagcacccagagagagcccgcgccaaagagccagagggggccaagagagggcaacacacccgcggaagacaaaccacaaggggcaagcaaaggcccagccgcggacaaagaaaccccggcagacggccgaacccggggagccaccgcgaacggggacgcgcaaaggagac

SEQ ID NO: 126582 - DNA, 218 bp, Arabidopsis thaliana columbia
  unsure (1)..(218): unsure at all n locations
gagcgccaccgcgggggggggcgctctagattcagaggggcccagggctgcagaaaacgcggcccgcgggaancaacacagatgaaacaacccaaagaaggaccacaacaaaagacaacaggaaggagagaacccacagggcggaagacccgggacggccgagagaagtgtgattaaagagttgggacaacnggcaagaccgaaaacgacgcagaaac

SEQ ID NO: 126583 - DNA, 535 bp, Arabidopsis thaliana columbia
  unsure (1)..(535): unsure at all n locations
gggggggggggggccaccaattaaacaggggggcccaaggccccaaaaaaaaangggcgccgataacccggggggccacaaaggcgccacacagaaacagccaccaggaaacaccggcaagcacacccgacaaaccaacgaccagagccgacaaagacccaccgcggacgccgcggcgcgcgttcctaaaaaaggggggggggcccgccccacacgggcgcaacgacacaaaacaaaaacagcaccaccgaggggggggggcggggcacaccaccaccaaaaacaccccgcccgcgcagccggagaagggcccgcgcaggaccaaggggagcgcaccccgcaacgcacaaccccgcggcagggacggcaggcacccgcgacggagcgcggggccgcccccgcacgcccacacccccagcagcggacgcagggccgacagacacgacgagcgcacgcgaggcgcgcgccgccaccgacgcgaccccacaaaacgcccacaccccgagagcgcgcacgcgcacaaccgaggcgcagg

SEQ ID NO: 126584 - DNA, 543 bp, Arabidopsis thaliana columbia
aattaacccttaattaaggggaccaaagcttgagcttcaacgggggggggggcggtttaaaactaagggattccccgggcttgaagaattcgggggccgttattaccttattatggaggttaccatggagaagaagtattatattttccaatttccaagggtccatttggatttttggaatcctataaaaggttggccatgttctttttttgccaccattgtaatgttaattatagaacttttttagtttccagcctaattgggttttttaacttgggtcattacctatgcacaaaagcttaatataaaaccacattcacatgcatgttgttatatctctggaccagatgcgaccagaggtataaggccacgcaatacttgggctgataattggtgagcctcaaagatctctccgtccaaattccacacactctcttccccaaatgatgtaaacgtgaaagctcgcgtcttgtgatattccacaaactcgaagttcaaaggttctccacctctttttgcaagctcggttaggtgccataagta

SEQ ID NO: 126585 - DNA, 516 bp, Arabidopsis thaliana columbia
cagctcgcaataaccctcataagggacaaaagctgtagctccaccggggggcgggcgctctagaactagtggatccccgggctgcagaatttccgggccgagcttaatcggccaggggaattccaacttctatgatccaattgttagtaatctcggctttcaccatatggtttcttgtgatggggtttagctggggggggatcagaaaggggggaagctctgttttgtcccatttctctatttaggggttaacaccacttttgatactttcaagtctaacccgccggtaaaaactccgtttgggctattcttaattaatctcgagaggttaaatgtgggggagaagatgaatcttttgtcaattctccgatgaatgattctcgattcgtctcgctacccgcgggtcctcgccatttctgcggattccgtgaggataatcatgaggttgagtgttggggaactctaattcctctttgattcaaaaggtccttgatttaaagcaatagctccgtctga

SEQ ID NO: 126586 - DNA, 542 bp, Arabidopsis thaliana columbia
ccagctctatacgaccctctctaagggactgagctggctgctcaccgcggtgggcggatcgctctagaactagaggatcccccgggctggaggaattcgcggccggttaaaatcaaggtggcagttttttgattaaaacggaattgtgggtagctaaccacattgctcattacctgcagaatgccgtatacatgtatattccaacaaggggatactgaaaacgttatgcattttggaaaagacatacatttcgttgaaaagggagtcatctttaataactcggagatttgtgtacactccgaagaaaactatttttataatcatgggtcactatcccacctcaaacacttaatgaccctgacgctggaaagaaacctgagcatcccagacgagttattttgtctgtctagcgtgcaaccgtagattaatacggcacttgtctggctatgctaggacgctcatgacggcctccatcagttctgtcttgatggatcacactttggcttgtgtctctgcgccatcttttgcaaagatgggttggt

SEQ ID NO: 126587 - DNA, 549 bp, Arabidopsis thaliana columbia
ttcagctcgcaataacccttacttaaggggaccaaagctggagcttcaacgggggggggggcggtctagaactaggggatcccccgggctggaaggattcgggggcgggaacccacttcaattttttttaacataattaagtaatttaattggaccattttaccacacttttttggggagtttaagttccaataaaccaaaaatcttaatctggttataccttggaggactttaagctaggaggctccttggaagggcattaccagggtatcgaaaatagcattctgtccaaacgtcttcctgaatctctcaagcaattctcctccatcatttgcctgagctgcgcaatcagccgcttcctttgccattccaatacgagcataagcctcgcctctttccacaagatcagacagtttggggatgtattttagagcttccgctttctcatctgcatcaatgcatgcctccacaaatggacgaaaccccattggtggtctcttttccttcgaaaacttttcaagcgctgcccagtctttgattgtagcgaga

SEQ ID NO: 126588 - DNA, 535 bp, Arabidopsis thaliana columbia
taaccctcattttaggggaccaaagctggagcttcaccgggggggggggcgctttagatctaggggattccccgggcttgaagaattcgggggccgcaaaaaattaaggagttattgaaaccaggcaggccttcaaattggggccattccaggaaggaaaaggaaaaaaaaacctggggaccaaaccaggaaatggtggaattccaaccccttaaggcttttttttaggagggtaggagagaaggttattagtcgacttcttaattctgggaaccggcacctccggaggagggaggaacatcctggtccattcttcctgcagttggaccaccagtttcaccgcctgggaacatcttggttatgatcgggtggcaaatactctcgagctctttcatctggtcctcaaatccatcacactctgctagctgattcgtttctagccatacaatggctgctacaatggagtcttcaatcttcttctggacatctccagcaagcttctcgccaatcttctaatcacggatggtgttcctca

SEQ ID NO: 126589 - DNA, 536 bp, Arabidopsis thaliana columbia
ccggggggggggacgcccgagtaccaccaggaggcccaggcccggaagaaaacgcgggccggacaaaagccggacaaacaaaaggaaaaagcgcaaaaacccaaaaccacaaacaacaaacagcaggtcgagacacggcccaaccgccaacaagacaagccaccccccccaaccgcgagggagggccccctcccaaaaggggggacacaggcaccaccacacgggcccccgaaaaaaagccaccgccaaggggggggcaaagccaccagggcaacaaaaaacgggcaccgaccccaaggcaacacgcgcccccaaccacaacgagagaaccgggggcacaacccgcgcccggaaacccacgccgcaaaaacgacaacaccgcgggcgaacggaccccgaacggggacgcgccacgcgcccccgggcacgggcgcccccccaaccaaacccaaagaaaacgacccacaccccgccacgccacaaagccagaggccccccaccgaccgccccgccggcccacccccggccccgcccga

SEQ ID NO: 126590 - DNA, 513 bp, Arabidopsis thaliana columbia
  unsure (1)..(513): unsure at all n locations
gggagctccaccgnggggggggccgctctattttagtggatcccccgttctgcaggaattcgcggccgccaaaaaagtaaaaaacattcaggggatgtcgagagaaaagtcttcacactccggcataccatatgagtattaataaaacaagacctaattaagtatcgcgagagttgcaccccttgggagattgtttagtttcgagattgtgcagaagctaaaagcggggcttcgaactcaaatagaggagtcatagcttccttcaaacccttcctatttctgatatcaaccaccaaaactgaagcctgagtacctgcctcaagaggggcccaagacatcattccccacagatcaaccacacactgtgggaatgcctgtcccgagggtgatgccataagccgccttgtgaatccgaaagacttcaaacaaagccggtatgtcttcatggtgtacaaggagggtcctgacctttgcatctcctcgaacaccacgccccagctctgaatcaacacc

SEQ ID NO: 126591 - DNA, 464 bp, Arabidopsis thaliana columbia
  unsure (1)..(464): unsure at all n locations
ggggcgccaccggggggggggccgntctgatttaggggagcccccgtgctgcaggaatacgcggccgccatacaccctgacactttaattcctcatacgaggaaaagaccatcaccagcgcgtatgcgtgtatacaaaccagcctattattggagagataaagaccacacggagggacaggcgaagcggggcttcctttttaggggtttgcccccacgggcaaacacacaaagggaggaggaaagccgccccgcagagacggaggggggagaaaacacggcagaacggggccacgaggaggaggagcagcgcacacaccgccggggagcaaggggggcccaaagggaccagccgggancgaggcacaccccacaaagacgaagcaggcccgaccagaggacgggggaggccgacacacgcgcacagagagagggacaacacgggggacccccgggggagggcgc

SEQ ID NO: 126592 - DNA, 534 bp, Arabidopsis thaliana columbia
  unsure (1)..(534): unsure at all n locations
atacccttaattaaggggaccaaaggctggagctccaccgggggggcggccgttctagactagtggatcccccggcctgcaggaattcgcggccgcgtggaagagggcgtaagtaagaatgttttatcaattaataatatcatatcatatatctatgagagacccaaaaaaaaatgaaattacaatgaaaggaagatcgagttcttacttctttggtgaatatttgcacactcttttgatccattgcccttcttttatgttatctgnggccttctcgaggagtaatgcttcgtatactaattacacataacaaacctctaatcctcatctcatttccttgctctgtccaagtcaaatctcttcctatttctctttctcggctattgcgaattcagtggaagagtgggcattcctttcgcgtgttggctctccatttccagtagcatcaacgacttttgcctctggtatctgtttctctttgctgctagcgatgttaaatcgtgaggaggggcaaagtcataatcatgtcttcct

SEQ ID NO: 126593 - DNA, 515 bp, Arabidopsis thaliana columbia
ttaataagggaccaaccctgaagctccaccgggggggcggccgttctaaactagtgaatcccccggcctgaaggaattcgcggccgcaaaaaaaaaaaaaaaacaaaaaagctaactagaaatcgaaaagcaagccaaaaaaaagaccaaaaaaacatagaataaagaaaaataaaaagcggccgggaatttgcggccccgttgaaccagttatgtaaaaggttttcccaggaccccaacatctaaattttagttaaccatacctaaagatagttttgagccttatgacaatgccaacctataggtgcttcttactacggcttaaaaggaaccttaatggggatgggaactaccaagtttttaagaatgaaggcttcataacttaacttttaagggccaaagcactctaatccatagggtaaggtatcggattcaccaccaatccaaataataagagatctatttcttgcttctcgaaaaaaatctgacatcccattttgcacaggaaaaacttc

SEQ ID NO: 126594 - DNA, 523 bp, Arabidopsis thaliana columbia
aggggaacaaacgcctggcaggctgcaccccggggggggccgctctaatccagggggtgccccgggctggaagaattcgcggcccgcaaaaacccacctcaaaataaccctccattaatccgttcggttccgcgcggttgaggggcggggtccgtttaagctggatccttttttcccgcggtccaattggaaaaattccgggaaccttgtgttcggagtaccggtaatccccggatttcaacggggggtaggctaccaggtccttatggcccgccggaggggtggttaattcgaacctaacccttggccggccggaggacgtgaacctctgcctcctgaagccgcaagcccttccgacctcctttttctggccgtgggcggttccagcttaaccttctttcccttaaggtttaagaagttagggttggtaagcgttcttcccttctccttttttggacgctctggaaccgcttttttctggagggagagttttcctttagctctccaaatttgccttttttga

SEQ ID NO: 126595 - DNA, 540 bp, Arabidopsis thaliana columbia
gccaccgccccgcggaggcggccgctcgataacagaggcggcccgcgcgctgaggaaaacgcggccgccacggcacagcacggttcgaccccgacgggacgcgaccaccaaacgccccctgacactcaactccaccaaccaccccagcagaacaagccacacccaaagcggccccacagacgccacagcccactccctctcagagggggggaaaacgaaccgaccagaaccccgagcgatacaaaaaagacagaccccacgtcccgcgcaccaagagccaaaatcacgaaccacagagccgaacccgcaaagaactcaagacaccggcaacccagaccacggaaccccgggacaaaacgcaccagcgggcgggaagcggcccacccaaaaacacccgcgcgcccccgaaaagccggagcacgaaaaacagccaaccgggaggcaaacagcgcaaaaccctccacggacgaccgacaacagacacccaaaaacccaaaaccgggcccaacacaacggggcccggacggaacaagccgcaaa

SEQ ID NO: 126596 - DNA, 543 bp, Arabidopsis thaliana columbia
  unsure (1)..(543): unsure at all n locations
nnnnnnnnnnnnnnnnnnnnnnnnnnnnnnnnnnnnnnnnnnnnnnnnnnnnnnnnnnnnnnnnnnnnnnnnccacgcgtccgataacaagaggatttcgtgaactctcactatatggggttgtcttcagcaccgtgacctgctgttatcgtaagacctggacctgtctggcgtccatgaagtccttatgtcatctcagttgcgaactcacttacagatctctgtgtttgctgtacagtcattgccttatactacatacgcgagtgctggaagttgacctatatatgcccttcgctgtattagatggtgcattgtaaggcctcttcgtcaggataaagcatatattccctgaccagtagatattgatgctaaagataaaagctacgctgctggcctcaattatactaaattcgttaatcgcctaaagcttcttcacactatattcagcaggatatcttcgcactctgatatttgacacatatatcggctggttatacctcaggtccctacagaggaaaccagatacatagctcagaggtgatc

SEQ ID NO: 126597 - DNA, 513 bp, Arabidopsis thaliana columbia
gcatgacgcgcctgctaggtacgcggtgcggaatcgctgtagtatgataccacgcgtccgcggactgcaggaatacgtgggcgcgagatgagagatgatcttgctcctaccacaggacacactgtcggtgagctatacatactgttctgcatcagggcactgactatcaagaatgttcatactggtacgtttcatctcttgcgacttctatgcggtgtcagtctcccatcaaagtgctacgattgatggagtgtgccttctatataacctatctttcgttagagctgataacacgcttactatgcagctgagttgagctgactgctacggttctatgagactctacagtgtatacgatccagatgtggtcgcggtactagataccactacattgcgggcgaggttctcgaacacaaccgatgtcttgacacggaccatacaggttgatgccaccatatgagctgctgcttctgctgacaacttggtggagaagttcactgtatacagacacag

SEQ ID NO: 126598 - DNA, 431 bp, Arabidopsis thaliana columbia
  unsure (1)..(431): unsure at all n locations
cctcataagggacaaagctgagctcaccgggtggcggccgcctagactagtgatccccggctgaggaatccgggcgacagtcttgatcgagatctttgcgcgagagaatcactctgattgagtctgactatctctgaggaggtgaggctgaatcatgaacaactggtagaggtgaatttagctgattgatcttgatcatctggatcatatactatangatgacaaaagactatagttgttagagagactaagatgagatatcctcatagcagcagctgtacgaagatctgtttcctgctcatatgtgtccgagagaagacagtttatcctgaagagctcagatggtgatgaacatcactgctactatctcatcctgaagctcttgatctacctactttataaaccacacacattcagcatcttgattgatc

SEQ ID NO: 126599 - DNA, 354 bp, Arabidopsis thaliana columbia
  unsure (1)..(354): unsure at all n locations
accgggggggggccgcccaaaaccaagggggccccgagccggaggaaacgcggccgccataaagggcgaatcccagggcggccagacaaacgaccaaaacgcgcagggaacaggcacccagacacccggcgaaaaccagaacccccgacccaaaacaaacagccttntttgacggggacgggacccccccaaaacaagcaaacccaagagaaaagacccaccaaccgggggagcagacagagccaggccagacaagggagggccccacaccggaacgacacacagaggaccaggacgccgaacgacccccgagaaccaagggccccgagacgaccaacgcccaagaacccgcaa

SEQ ID NO: 126600 - DNA, 536 bp, Arabidopsis thaliana columbia
ataaccctatttaagggaccaaaccctgaagctccaccgggggggcggccgttctagaactagtggatcccccggcctgcaggaattcgcggccgcaatttctgaaacaaagatggataaaagatgatccaactgtgaacctggcgggcggcaaaatgcagacagtcacttcctcttgctgttcccaatactgaggagctcaaggctctggagggtattgtcacgagcggctctcgttggtgcagcttttgtggctactgaggaggacgaaggagcgaactgggtcctcagagttgtagaagaccgatcattgtttgggatgagtctgcttaatcgattctctgtgaaatcagctgaggaagtggctcgaacacttgacccagcaattgcttttcttgacgaactcaggttcctagataaagagtttggtctctcctggttttgcgtgtccttggatgcaagaacattctctgaggttcttggtctactagactgatcagcttgaacgccggttcctgagccatttcttctggtgt

SEQ ID NO: 126601 - DNA, 496 bp, Arabidopsis thaliana columbia
  unsure (1)..(496): unsure at all n locations
agatctccagctcgcaataaccctcataagggaacaaagctgagctcacgggtggcgcgtctagactagggatcccggctgcagaattcggggcggcggcgtttaatacatattctcacaccgaaaacaccccataccaacaagcaaacacaccacatttggattcaaatactataatacaactattatattaattgttcccaatacaaatacatttttttgcttcttncttggatttggatttcaaagatcagaccttntattgagttttgaacctgtagagcactttcttcttcttgggaagttctggttgtcgatttgtgatcacaatctttcccggttcacccaccttaaaagaatcggttatcaccggttcatcggttgatccaatcttccgtgtcttagagacgatcacagcatagcttccttcggtggttggctcaaactgagctccgtagctcacatcagcacccaaaaccctaagctcccatgaaag

SEQ ID NO: 126602 - DNA, 506 bp, Arabidopsis thaliana columbia
  unsure (1)..(506): unsure at all n locations
accggggggggggccgntcaatacaaggggagccccgggcctgaagaaatacgcggccgccagaaaccgagaccattaaggcaaaagacgggaaccacccacaagcattcggcacaccaaaaagggggataacggcgattagaacattcatgagcaacaacataacggaccagacctttctttttgaaggggggaggcganaaagaaacgaaggcccaaacaaaaacacagaaagaccgaggagaggagcccaaagaaaagaccagagccaccaagagacgcgaaaccacaagaaaaaacgggaaacgaacccagagcgcacccacgcgagacgcccaagcgcaggccgcaaaaaccggagaacgaggcgcacagccaaggcccacccaaaggggggaaagccacgggcaaagagcggacaggagacaccgacagagaacgcccaaagaaccccaccgacagcaagccacagaacccagccacacggccgcccggaaggcccggaa

SEQ ID NO: 126603 - DNA, 536 bp, Arabidopsis thaliana columbia
cagctctatacgactcacattagggaaagctggtacgcctgctaggataccggtcgcggaattgctggagtcagacaccacgcgtcccggacctggaggaattctatgccgtctttcgctctatggttgtctctccggctcaggccactatggtctgtcctttcaacggacttaagaactccgatgacttaccagccacacagcaggctaacaacgacattacttccatctcatgcaacggcggaagagttaactgcatgcaggtgtgtgctccacatgtaaagaagaagtgtgagactctctattaccttcctgaccttaccgagtacgaataggctaaggaagttgactaccttatccacaacaagtgaattccttacgttgaattcgagttggagcacggatttgtgaaccgtgagcacgtgaactcacccggatactatgatggacggtactgaacaacgtggtagcttcccttgataggatgcaccgactccgctcaagtgctgaaggatgaggaagagtgcaagaaggat

SEQ ID NO: 126604 - DNA, 480 bp, Arabidopsis thaliana columbia
ctcaccgcgggggcggacgctctagatctagaggagcccgagtcctgaggaattcgcggccgcctgaagcctgttactctaaaacgtgacatgtacatgcacagaagagttaacagaatcctctggattcttcttctcagataacagatcaattaacctaaaaatctggaaccgggaaaagatcattcttgcaggatccgaacccggcaccatgacgcaaagagaaaagcttgacggagacggcaccgccttcccttccaggctcttagctgaaacgggcactcaaaacctctacagtgctctgtaggcaaaaaatggtgtagcgagaaccggatcggaacagaccgtcggtgatccatgctcactcaagcttcccgtcgaaaatatccaaatctttagccaaaactctagcctggacccgaggtcagggaaccccagttagactgggcctcggaccttcctgaccccgggaccatcccc

SEQ ID NO: 126605 - DNA, 543 bp, Arabidopsis thaliana columbia
  unsure (1)..(543): unsure at all n locations
ccagctccctacgactcactatagggaaagcatgctacgcctgcaggtacccggtccggaattgccggagtacagaccacgcgtccggggatcttgaagaaatagggagcgtcctgaactcaaacgtggactccgacaatatccagctcacttaagggtcgagggtggctgcttctggcaaagctaggctctttcacatccagtcggcttacttatgctaacgacattcacggatttttttagcaccgtcagggctgaatccgatctttaaaattgagatggagcctctaaccctggttgatgtatgtcatacggtatagacgatcgcatgcacttggcttattcaatctaaatgngtacataacaaacctggctttttcaaggggcttaattcgttttccaagcttatggagttcgcattctaaagatcaagcttttagttacggattgaagtcaaattcaccgtatgtagtccgataaagatgaaaatcgagctgtggttagtctttatggatgccgagctcgttgaatcgaaacactcat

SEQ ID NO: 126606 - DNA, 525 bp, Arabidopsis thaliana columbia
  unsure (1)..(525): unsure at all n locations
acgggggggggggcgcccgaaatccaccagggggccccgggccggaagaaaaagggggccgccgaaacccgggaaaacatcccccacaccaaggagaaaggaccacgaaaacgccacctgggagaggggaaagcgacccccaggacaaaccacccgcaaggcaagcaaccagaaggaggggccccgcctcctccaaaaaggggggggcggncgcccgacaaccgccggacggcgacaaaaaaaggaccagacccgggggggaggggngggagaaccccgaaaagaaggacccgcccccccggagaggcccacggaacccgacggcagaccagaaaaggacgcacggggacaccgaacccggagagggaanaccgagggccacggggcggcaacggcggaggccccaacgcaccccgggacgaaagaaaagagcaccaccggcgcaacaaaaccagcgcgggagccggacccacaccaacccgacacgaagccaacaaacagncccccaaccccggagggcaagcc

SEQ ID NO: 126607 - DNA, 475 bp, Arabidopsis thaliana columbia
cggggggggacgccggagttcaccaggcgtccccgggctgtaagaaatagcgggcggcggaaattttaagaaaaataactaaaacatcaaagggccaataaggtgtggcctaatggtacttcttaacaaacccatctaccaagggaagggttaagcattttacaacgggattcacacttgctattaaggtgggggggggaaaaccaggcggaggatattaaggcttaataataccccaattaataaaaagccaggcaacaatgaaaaatcacccttcacggggaaatcctcctcgggaggttaaccctttggaagaagcacccagctaaatgcgaaacaaggatttggaccggacctccggtttgtgataagaaaagcttagacaaaactcggtggtaccacgtgagaactatggttctcccttcttttgcgccctctgaaaggctgcccggaagccgccagactgaagggctca

SEQ ID NO: 126608 - DNA, 171 bp, Arabidopsis thaliana columbia
cagctcaacacctcttagggagccgctgtgctacggggggacgttagaactgagtccctgctgagaatttggggcggaaccaagtggcctcaaacacggcaggcgcgctcgtagctgtccctgattcacacttcagtcgatgcgctggatattgtccggggaacatctaat

SEQ ID NO: 126609 - DNA, 179 bp, Arabidopsis thaliana columbia
ggggcggggacgcccgagaacaccagggcgcccccaggcccgaggaaaaagggggccgccagacccaaggcgcccaaggaaaacacggccagggcgccccccagaaacagcacacggcagccaaccacaacccagccgggaaggccggacccacaaaaggcaacaggggaacccccaaa

SEQ ID NO: 126610 - DNA, 522 bp, Arabidopsis thaliana columbia
tacccttattaggggacaacccggggctcacgggggggggggcgctttaaaactaagggattccccgggctggaagaatccgggggccgaaaaaattccaaaccaccagccgaataataatatatttggcaacacacaatttaatacctcaggctaacttggccagccaaaggccaaaggattttataatggaggaataagacgataaaatctttgttagaccatttcataagctcaaggttttggctcctgcctgtccacagagatcctaaagggccaacgagaaatggccaaagctcctgaggacttaatatatctataactgggcagctaacaggttcagcagcaccaaagtccttggttgcaatgagtttccatgtaacagtgtctgacttgttaggtgcattggcctttaagtgtgggattgaaacagaactgaagctagatgatgatgaggagactgggatgttggggacatcagctcgtaggactgtaacgttatgattaggggctctagtaatg

SEQ ID NO: 126611 - DNA, 511 bp, Arabidopsis thaliana columbia
  unsure (1)..(511): unsure at all n locations
gggagccgaccgcgggggcggccgctctattttaggggagcccccgggctggaggaatccgcggccgcctttcatatacacacataggggaaacaccatccacatgagacaggacaagatcttattttgatgtgatcaaccccaattcatcaaccatatgaaccaaattcaagctgataatcgattttttttttttgcaagatgagcgcgaggaagaacacagcgcggctacgaggaaaggacnccggaacactccgcactaaaggggccctgaacccgagaccggaacctgcaccggaaactcccatcgctcgttgacaagctaattttttattcggccttgcagaactttcatgaaaccagacgaagacttggggtctttttttattgcctcttgaaactttttgagagggtttatatggatttagaggnctaactcttcctcgcagtaggtttccttgggataactcaacccattgagacaatcttgccatgcacctgggaacaaaca

SEQ ID NO: 126612 - DNA, 427 bp, Arabidopsis thaliana columbia
  unsure (1)..(427): unsure at all n locations
gccccaaaaaaagggccggcccaggggaacgacaccccaccaggccgaggaaacggaaacaaaacacgcgggagaaacccaaggccgaaacacggcaaagagcccacccacgcgagaggaccnatttttcgcgggggggagagcaggacacgaaaaaccaagaaaaaaccccccgacccagggaagcaaggcaaaaacacacaaaaccccccccaccgaaaaaaaaaaaagaccaaccaacggcccccaccccgaggggcccccaaggagcacagccccacccacacccccaccgccccgggggggccccgccaaagaaaagcccacgaaaacccccacagcggccccacaacaagcgccaacaaaacccgcacccacaaggcagaaaccccccaccacgcgcaacaacccggacggacccgccaaa

SEQ ID NO: 126613 - DNA, 561 bp, Arabidopsis thaliana columbia
  unsure (1)..(561): unsure at all n locations
gcccgcggaaccggngcggaaccccgggatgacccacggcgccgagaccggccaggaacaaaagccgcgcgaaagaagacgacgataaggccagaggacgagcaagagacccagaaacaccgacagtggcaccccagaaaaggaggcaaaaggggacggagcccgggaaacgcgcgggaccagaagccaaaaaaaagttcctttgngagcgggggggggcagcaaacaaacggagggggccaggcactacgcaaagagagcagggagcgcgaaacaagaagaacggaggcncggcccggcagcgaaagacacaaccacccgcaacccgggaggacccacaagaaggcgggaaaacgcaacacgncgggggagagggaggcggaacaccccaagacagccgccgagaaaaaccgcccgccaaaagacaggagcgagagagagagacggacaaccacgaacccaacccgcgcggagcgcgacacaaaaagggggaccggaacacaacacaaaacaccaacccacagcacgggagggggcccccgcgcgggaaccgcaacggac

SEQ ID NO: 126614 - DNA, 489 bp, Arabidopsis thaliana columbia
  unsure (1)..(489): unsure at all n locations
cccggggggggggccgtctattttaggggacccctgtcctgagaaattcgcggccgcaatcaagggcagagacaccagctgatttgagtaaaaggttcacagatgattcaatcaaaaaggctttatctcagttgcaattaactctatgagagaaccaaggcagaaactatcatatttttcttgttagagaggggacancnccagcacacaccggaaccaagagaacaccgcggaaaacgaagacgggcacaagccaagcctcagggccccganangcaacccccacaacaaagcccccccgcagaccagcagagcgaccgcaacangcgacagaggcaagaaaaccaccggacaagcgagcgcaaaaacacgcnacgnccaccggacaccccccaagaccccagacccccgcccaccgcagggcaccacagncgaacacagagacgaacnccccaacagcaaaaacacgccccaccgacaaagaagaac

SEQ ID NO: 126615 - DNA, 514 bp, Arabidopsis thaliana columbia
  unsure (1)..(514): unsure at all n locations
nnnnnnnnnnnnnnnnnnnnnnnnnnnnnnnnnnnnnnnnnnnnnnnnnnnnnnnnnnnnnnnnnnnnnnnnnnnnnnnnnnnnnncggccgcccacactcctgttgccattaaagttttaagacctgatgctgctcaaggaaaaaaacaatttcaacaagaagtaagattttatctattttctattttggtttatgcttttgcgaaatcattctttttttngtcttattttataggttgaggttctatgttccataaggcatcctcacatgggtcttctccttggtgcatgtcctgaatatgggatgttggtttacgagttcatggaaaatgggagcttagaggatagactttttcgtactggaaactctccaccgctttcgtggaggaaacgttttgaaatagcggcggagattgctaccgcactctcattccttcatcaagctaagccagaacctttagttcaccgcgacctaaaaccagccaatatactcttagacaaaactacgtgagc

SEQ ID NO: 126616 - DNA, 537 bp, Arabidopsis thaliana columbia
  unsure (1)..(537): unsure at all n locations
nnnnnnnnnnnnnnnnnnnnnnnnnnnnnnnnnnnnnnnnnnnnnnnnnnnnnnnnnnnnnnnnnnnnnnnnnnnnnnnnnnnnnnnnntcgcgggcggaccataaaaagacttcaagagatctttggaagaagggaaaaaataccttccttaaaaggaccggttccaggcttcgacttccacttcacaacattattttctacttattaaagaaccttttattttttactattttatacccggaacctttttaaggtttaacttattataactaataaataataataaaatgaatattaggggggagggaggaggctatttttttaaggggccaccaaattccttaaaaaatggcttttttattatctaatctaaaacccatcatccaatttggttttcaagtttccaccattggaccccaatcctgttcggttggcagcaaaggggtggtgggttatttggttggtttaagagttcccagcgctggccattgaaggatttgatgcagacttggcgtcctttgcatctgatccttcc

SEQ ID NO: 126617 - DNA, 549 bp, Arabidopsis thaliana columbia
  unsure (1)..(549): unsure at all n locations
nnnnnnnnnnnnnnnnnnnnnnnnnnnnnnnnnnnnnnnnnnnnnnnnnnnnnnnnnnnnnnnnnnnnnnnnnnnnnnnnnnnnnnnnnnnnnnnnnnncggccgccgagcaaccgaaaaaacggaaacgcatcaggatacattttgcagctggtctcttaaatggttcataaagagtcaagtataaaaagtaaacacccgagctgtttctgtatctatccacacagatttcaacttctcttatttcatcgtctatcattactgtctccaccgcttccaccaccgtactgtgtggagtttccgttccaaaaagcgtttccatcaccaaacggagcctcatcttcattgtgattcaacgtatggatgttacttccaatccgagaagtggttggtctcctattcctaacgttgctcctaccttctgatggatcttgaaaggacgtccctacttgccccagattgtttctcacctccgtatttggtcttgtttgacgttctggaacagagcttgatgcgttggcagtaccaccgccanaatatgaaaacggg

SEQ ID NO: 126618 - DNA, 524 bp, Arabidopsis thaliana columbia
cggggccgcaccgggggggggcccccggttctcccggggggcccggtccggaagaaataccgggccgccaccacacgcaaaattcctttgtaaaaccccaacttgggtcaaggagagacgaaccacccggggctaatgaattcgccaaaggcgaaaccccgggtctggcggaaacgagaaaccccccttcctccttaaggggtgtggcgaagggaaagcgcggatatattacacacgggcccttaacgcggggggaggggctccagaccgggacaacaggggccccccgaaaggcgcacccttttgtaggccgcaaggggagcggcgtggacggaccccgtccccctcgggtgcggcatacacccacccggccacacgacccgcaaactcgcccctccagagcgcccccccaacagcccccgccagtgacgggcgccatcatggcaacgcagccggtccctttctccatccaacggcgccaaccccgcacggcttccagcgttcgcgcgtgaggctccctcgga

SEQ ID NO: 126619 - DNA, 534 bp, Arabidopsis thaliana columbia
  unsure (1)..(534): unsure at all n locations
cccccctcngggtcgacgggatcgataagcttggatatcgaattcgggggcggcttggctttacatagaggatcaaagtttctgggggttctattttattaccaccatcttttttttaagaatggttttggaagaaacctttcatttggtggaccagctttgaccaactattacaattcccatacccatcccagaattaaaagaaagggtttgaccacgtttttttccaattccgctaaggccaggttggtttgcgtaacctcaacggggtagttttcccgaaggttcgaccagaaactcatggtaccagttaaccaaaccggaggaggctaacctttccatcagggtgtctgacccaatcatgtaaaccggattggcccgtaatagagggcccaccaccatgttaaaaggcaggtccttggatgacattagctcggtttccattctggtggaaaggctaataggcatgtcgaaggctctgttcccaacaatcaagcgacttgtgctgatgaccgtttatagcatctgcacaaa

SEQ ID NO: 126620 - DNA, 500 bp, Arabidopsis thaliana columbia
ttttggggggattggggtccgggcccccccttgagggcggcgggattggttaggctggttttggattcgggggcgggaatttcgggttcttaggtttgggttagaatttaatcccgattccggagaccctgaaatggaaccatttaaaacctgaccgagtccgggcaattccaaggtttttaacttacgttttggtgggttcaatggttttactgggttggactggcctttactacggtttttggttggttccgggatccagaaggtccgaggagtccgagggatctattacccgcgttcgcaccggattcggatcctggaggaatcgagatatggggctggcagggagccgtttcgaagttcctaaaggggttcggatatgtgattcgagacactcggagtggataccgtgtttggatcggacccttaattaccagttgaaattgaacctcattttatcgttaatggagcactatgagcatcattgtcctccatcagac

SEQ ID NO: 126621 - DNA, 543 bp, Arabidopsis thaliana columbia
ccccccctcgagtgcgacggcatagataagcttgatatcgaattcgcggccgcgtctttgtactacacattttgtaatccactatatgcttatgctgcattatactctttgcttatagagcaaataaggagtttactggacagaaaacgtaacgtacacattaagaagtggtcagagaatttgatcacacttgaggtcgtgtctggacgacatacagctttctttctctgatcacaccttcaatggcctgtgcagttacatagagtttctcaatggcatctccagcgcgtgcaatgtctgagagaacactttttctggaagctcaagtcagtgatcagaggatctggtgtgtaatccagcacgacttggtctttctcgtccattggtacactgtcggagaggcctgcacctgcattaccttcaagatcttctccattggaatcagatctgaagatgaatgaacggcttatgaacaggccaatcgggttgcttgggtagcccaacaccagaggccaatcaagggtgtttttcttgcacatgaaa

SEQ ID NO: 126622 - DNA, 463 bp, Arabidopsis thaliana columbia
ccctcgagtcgcgggtcgaaagcatgtatgaattcggggcgcgttttgactacaacatttgcatcacttatgctatgctgtattatactcttgctatagagaataagagttacctggacaaaacgtacggacacattaagaagtggtcagagaatttgtcacacttttgtcctgtgtatggacgacatagagcttcccgtctctgatcacaccttaaatgtcctgtgcagtttcatagagtttctcattggattcccagcgcgtgcaatgtttgagagaaccttttttttggagcttaagtcagtgattagaggatctggtgtgtaatcgagcacgacttggtctttctcgtacattggttccactgcggaggagcgctggacctggataacctttaagatcttctccatgggaatagatcctgaaatgatggaccgccttatgacagccccatcggtttggt

SEQ ID NO: 126623 - DNA, 503 bp, Arabidopsis thaliana columbia
agcttgatatcgaattcgcggccgccgattatcttcgatctagatccgattgcgaaagaaccaggttcgtgtgctcggtactggagctgcaagacaaatcggatatgctcttggacctaagattgcaaggggtatcatgcttggtgctgaccaacctggtatccttcacatgttggataatccttcagctgctggtgctttgaacggtggtaagaaggaattgaacgatgctgcttttccttttcttaaagggggtggtgctacaactgaagccggtgaaggatggactggaatcaatggtggttgtactggtggaggtttccccaagaaagaaagtatggagaggaaagaatggatgttccacaaaggttccatttaccaatctcaagctggttgcttggagaaaccttcccgttctaaccggaagggtcttggtggtggcaaaccggtaaaaaacaacagaatgatccctaatgaatttgcaccaatcaacccctgaaaag

SEQ ID NO: 126624 - DNA, 241 bp, Arabidopsis thaliana columbia
gcaggaacgaatcgggccgccgtacccccaccagacccaggcaaagaccagtcggggccgtccggagcggagacaacgatagcccggaccaaaatggagggaataagctggggctaaccaaccggtaccctccttaggtggaaaggcctccagcggtggaagcttgaaccggggtaaaaagggagtggaccgaggcggaatcccctctcctaaaaggggcggtgccaccaccggaagccgt

SEQ ID NO: 126625 - DNA, 534 bp, Arabidopsis thaliana columbia
gccccccctcgagttcgacggtatcgataagcttgatatcgaattcgcggccgccgataatctccgatctagatccgatggcgaaagaaccagttcgtgtgctcgttactggagctgcaggacaaatcggatatgctcttgtacctatgattgcaaggggtatcatgcttggtgctgaccaacctgttatcctccacatgttggatattcctccagctgctgaagctttgaacggtgttaagatggagttgatcgatgctgctttccctcttcttaaaggtgttgttgctacaactgatgccgttgagggatgtactggagtcaatgttgctgttatggttggtggtttcccgaggaaagaaggtatggagaggaaggatgtgatgtccaagaatgtttccatctacaagtctcaggctgctgccttggagaagcatgccgctcctaactgcaaggttcttgttgtggccaacccggcaaacaccaacgcattgatcctcaaggaatttgcaccatcaatccctgaaaagaaca

SEQ ID NO: 126626 - DNA, 439 bp, Arabidopsis thaliana columbia
  unsure (1)..(439): unsure at all n locations
nnnnnnnnnnnnnnnnnnnnnnnnnnnnnnnnnnnnnnnnnnnnnnnnnnnnnnnnnnnnnnnnnnnnnnnnnnngcggccgccgataatctccgatctagatccgatggcgaaagaacccagttcgtgtgctcgttactggagctgcaggacaaatcggatatgctcttgtacctatgatggcaaggggtatcatgctttggtgctgaccaaccttgttatccctccacatgtttggatatttcctccagctgctgaaagctttgaacggtgttaaagatggagttgatcgatgctgcttttcctcttctttaagggtgttgttgctacaactgatgcccggtgagggatgtactggaggtaaatgttgcttgtatgggtggtgggtttcccgggaaaagaaggtttgagaaggaagatgtgatggccaaagattgtt

SEQ ID NO: 126627 - DNA, 526 bp, Arabidopsis thaliana columbia
cgccccccctcgatttcgacggtatcgataagcttgatatcgaattcgcggccgcgaatgatatgagaggttcttggtacaagagtgtttcctctgtttttggtctcagaccacggatcagagggttgttattcttcattggtggtgttgtggctctagttactattttagcaccattgacatctaattcgtatgaatcttcgtcaaggtcgacacttgggccgtacatttataggaactataggaggataaaggagccagctgctggtgattatcttgatctgagggctctttctttaggggctagtttaaaagagtttcctttttggggtaaagaaagagaaaggtatgtgccttggtataacataactgggaatttgcttgctgggcttcaagagggtgaagaggtagatccaccatgccaggttgaaagaaaaaaggaaagatgggtaggtccgcctccgagagaatataaataccacttaggtggccacttggtagagatatcatatggagtgggaacggg

SEQ ID NO: 126628 - DNA, 507 bp, Arabidopsis thaliana columbia
  unsure (1)..(507): unsure at all n locations
cccccggggnagaggggaaggaaaagcaggttccggaaggggggacagccgcggaaaccaaacaaaccggcaggacaagaagcaccgtagaagccgggaaggaccacgcccaaaaggaaacgggggccaacccccgggccaggaaagccgggcgcacccggcggaaaaaggaaagcgaagggaaaacgcttcatggggggggggggacaacccggggggaacccagggcaaaaaaagaaggggaacagggggggggggggcaccccccgagaaacgagggnccgccacacaaaggcacaagcaaccaccgcgcccagaacccggaagaanaccccaaagaaggacaaacacgcggacagggggcggggcccccaacagcacccagcgggggggcaccaccaaagggccgcagggccaaccacggaacggcgcaaaagaaaacgcaccccacagagggaacccacccgcccaaccgcagcgcaacacacagaagcaccaagacgcgga

SEQ ID NO: 126629 - DNA, 514 bp, Arabidopsis thaliana columbia
  unsure (1)..(514): unsure at all n locations
gaagcaaggtttcggggggggcgggggaggcccctancaaaaaaaaaaagcacagcccaaggaggggggccagttttcaaagcagcccaccgggcaacgcccccaaaaaaaagcgaggggccgcatccaccacaaacaaaagagggggagggggccccgaggccaacgagacgcaagcaaccacgatgacagatttccctcgcataaaaggacgtggggggaaaccacaccaaaagggagaacaagacgagagaaaaaaaaaagaggcgacccgcacggcggcgggggggggcaggcgcgaccacaacaaaaagaaagaacaacgaccgccancacaaaaaccagacacgcccgcgagaaccacagcaacaacaagcagacgcacgggaccgcgacggagggaacaaccaagaggaggagaaacgggaggacgcagaagccgacacaggcggaagaggcacgnacgcccgcgcgcgggacggcccaccacaacggggacagacacacaaaaaaa

SEQ ID NO: 126630 - DNA, 245 bp, Arabidopsis thaliana columbia
cccccccgacggtcaacacgggatcccactaagcattttattcccaaattcggcgcgcctctttaaataaacacatcacagggagccagaaagaagcgggcaccctacttaattcctctaccctctttacctaaaaatacccataaagaaacaaggagaacaccaatataccataaaacacaaaacacacactttacatatctctcaaaacacttggcctccatatgggtgcaatatattttttt

SEQ ID NO: 126631 - DNA, 519 bp, Arabidopsis thaliana columbia
atgccggggtcgaccacgcctccgaatcgcgggcggcttgcgtggcctcggcagcggcttttttgaatcaagaggggcccgcacaatttggggtttccttcttatggcagcctccgcaaggtgggaccttcttttttggaggttctggagaccaggcgaagcggttcattttccacagaagtttcggtccttgcttaaaaggttatttttaatgggcctaatttcgatcctgaattggagacctggagctccggagtcagcgctccaggggttgcgatagataacactatctgcaaagagtgccctcttgcctaggtgggcggtctgatcgagcgtggactactacttgaagtggagcaaggcctaaccgatctcgatctaactatcactaaagcttttctgtctcgtgagggcggctggatcatggacgaatcccgtgtaaccgatcaacaaggaaacccggttactgatagcaaagccatctgtgacatcgagacggtgttgggaccaacgggtcat

SEQ ID NO: 126632 - DNA, 497 bp, Arabidopsis thaliana columbia
agcctggtcctttagaggggccgcccttgcggccgtttttttgccctgggtctggctgtttggaaccctatggggctttccacaaatctgtgtctggggttttttagccgactccacaatttcagagcttgttttttggaagttcttggagaacaaggagaaacttatcctgactttcccactattaactcctcgagttcgtttcttaaaatgggctaaaggttaatgagccccttattgccgagacctgagtacggtgaccttggggctccagaaatcattccctccagggtgtcacctataagatagaaactacccgggtaaggaagggcacttctggtaagggggggacagtcctgaacgagactctgcgaattctactttgatggttgtggcaaaggccttaccgcgaatctcgatcttccttatcacttaaagctgtgtttatggtccttgatgggggtagggttcatgggaccgtattgcatgatgacccg

SEQ ID NO: 126633 - DNA, 527 bp, Arabidopsis thaliana columbia
  unsure (1)..(527): unsure at all n locations
gccgaaccgaanccgcggccgcgggaaccatccagcagggaaagcgtggcaacccaagaaaaggggcgcccccagacagaggaaccgcggccagcagcgggagccaacacccccaccgccagccaaacacacacacccacgaggcgcaaccagaggccgcacaccggccagcaaacgcaggcccacaacaacggtttttttacccgaggcaaccgcccccgaacagagacgcgcggcggaaaccaggccacccaaaccacccgaccgagacccgcccagcacaacacgccccccacaagcccggcgaggacccgagaacgacacgccaccacaacaaagagaccaacgcccacccggagagacacaccaccccagccagaggagaccaccgaccggcccgaccaccccgccaacggccaaacaacgacccccgccgcgcacagaaaacaccacacaagcaacacgccacgcaaaccaagaacaacaccacaccaagcacgaccccaacggccaccgcaaaaacggcg

SEQ ID NO: 126634 - DNA, 499 bp, Arabidopsis thaliana columbia
  unsure (1)..(499): unsure at all n locations
ctatagggcgactgngtgccgggcccccctcgagtcgcggttcgatagcttgattcgattcgggccgctttgcctttttggtctctcccttctccggagagatctgctctctctatctatctctcaatctgtaagaagaagattcccacttcagtaaaagccctaactttacttgggaaagttcttcatctatcatccttcaatcgtatcatccatggctgatcacaaaccctagattcctctactcctcctcctactcaatccgatgatctatctcactcccactctacttcctctactacttcagctttttcttcctcagatccatcactcttgaggtctctctccttaagtcgactcaacgccggagctcctgagttcgttcctggtcgaactactcctccgttgcctcaacctccgaggatgattatcccgcctcctccgccgcacggtatgcttcatatgtatcaccaccagcctccttttcatactccagttc

SEQ ID NO: 126635 - DNA, 517 bp, Arabidopsis thaliana columbia
cccctcgggggtcggccgggttcgataaagcttggatatccgaacttccgcgggaccgccctgtggggttaagtaccccccaggaacaaaccatgtagtggtaaaatcctttttgtcttcttttccacaattttctttttgcaaaatttgatgagtggtccaatcttttagtggagaggaacattttgggggttttaggagctttttttattgacgggacattagaaccactcggtgctacccactttctgagcttaccatgtctcctttctctatagacctgtctgaagaaaaccatttccaacaatattcccaagatgtacaactggtgggtttcagtttgaaaacccgcgggggccgtaacccggccttataagcggctgtcccaagggagaatgcagaatagggttttccctccgatgagggtgaaaattgggcggcaccggtaagtaagttcaaagggcacatctcccgtaggttgggccagagatattcccaacccgaaggagccgggttt

SEQ ID NO: 126636 - DNA, 509 bp, Arabidopsis thaliana columbia
ggctggaatcgaatccggggccgctaaaattccccgggtgttgaccgggttccaatattgaaaagcagaaacctaaaccgtatatccttttggttcaaacaaccaacgtaagcattatttaaggggactctccacaaagctttttaggaatcgcgctagaacctcccactctcagcaccagcaaaatggataatagtaacattcaccacgcgggattttcttgcggcgaccgactcagggagagcggtttcaggctaatcgagagtgcccacaatatacccttggcctccaaaggcttaaatgagctcagtggtagcctgcattaggaacagaagaggtgggcgctggatcttctgtatgaggaccggagatttcttcaggaccacttccgatcaccgctcgtagacaccaccattgttgaagactatattcaccacagagagattgtgtcgaaccaatgactccgcttccatggcgctgaactcaaaaccagagtctccttgaacaga

SEQ ID NO: 126637 - DNA, 474 bp, Arabidopsis thaliana columbia
cccctcgaggtcgacgggatcgataagcttgatttcgaattcgcggccgctcaaaatggaccgggtgctgagccggtttaccattgtggaaaacagaaaacctaaaccgctctcccttttgggccaacaaaccacttcaaccttatttaaagggacccttcaccaagcttatcaagaaaacgagccaggatccctcattttccggagcggaaagaaggaccattgtcacccttaccaaccggggttttcctggagccgaccgcccagggaaagccgattttagcttattcggaggtgccccaaaaaaccctttggcttccaaggcgtaaatgggaactgggggaaccccccttaaggaccaaagaatgtaggccctgattcttgtattgaggaccggaaattttttagggtcccttccacccaccctctagcccccacaagggtcgaacactatatcccccacacaaagattgt

SEQ ID NO: 126638 - DNA, 541 bp, Arabidopsis thaliana columbia
  unsure (1)..(541): unsure at all n locations
gcctgcaggtaccggtcctggattcccgngtcgaccacgcgtccgatacaacgcgcactgatgtttctcatacagcgcatgctcatcggtagactctcacagcgaattggaggtgatcagaggccgatatttatgtaggtcggagagactatgcgttgtatagaccaggcgtaagttacggagatactacaggtggtgccatttttgtgcacgatatgcgtcgattctcaaactcttgatagacgcgggagttctttagcttgtcatgggcattctcggcatgancagatgtctatgagcacgtgctcagtgcagatacatgcagtgtctgtgtgttactgctagtggcncatcggatcgaggagctaatcatactgaaagcattcactgttactgatcagtacgcatttggagttcacatgctggaggtagcctgagagaagagaccggatcacccgttctggtctagagaactatgacgtatgagcagctgcctatgtgcgtgctggaatacagtccttacacttaaggctactgacct

SEQ ID NO: 126639 - DNA, 473 bp, Arabidopsis thaliana columbia
  unsure (1)..(473): unsure at all n locations
nnnnnnnnnnnnnnnnnnnnnnnnnnnnnnnnnnnnnnnnnnnnnnnnnnnnnnnnnnnnnnnnncttttttttttttttttttataaaagaaaaggtagcatggaacccaaatctggtgcaaaacgttgtgaagaatatactgacgagagcagtgtgtgttttgggaatttgcatagactacgctgattctcattggcagaacgagattatgcagatttttgtagactgggttcgacaatcgtggacgcgcatgatgatacttccttgtctcattggtacgtgaataggcgaccatttggtcgtggagcttaaccatagcactgatgatcttctggaagcaatacgaccatcttgacagcggggtagggcttctctggatctgagctatgtgcatatagttcttaccggctattgtgtgtccaaactgatgatctgatgagtgacaagcttaaggatagaggcagagcgatg

SEQ ID NO: 126640 - DNA, 505 bp, Arabidopsis thaliana columbia
gaaaaaaagacggcttttggtttaacctcgagcctctccgtgaaggggaaaaaacacgccgcaatctcagcctcagcaacggggatagcccttctggcctccgggaccgaatcgtttttttagccgatgccgccggccgaatcagccgcggtataagaaatcaaccaaagaaacctagtttttttagccggccgccgctatggacattccctcgttctgttaatccttacgtaacccgaagaaaaccaaccccggagccgccggaggagacccttgagttcctcgtaaccgaagatggattaccacgccacagatagatctcgccggatatacatgcaaagatttcggaatggacccgaccaaaagaagcaaaccaaggtaaaaaaagagcctaggagtcctcaaacctatgcaagagctagatggagacgattttagatacccatcccaaaatccaacaaacctaaaatgctcctcaatgcaacgccgcctgagataacatctt

SEQ ID NO: 126641 - DNA, 504 bp, Arabidopsis thaliana columbia
  unsure (1)..(504): unsure at all n locations
cggggccgcccaaaagattgcaagggggcgggttccggaaaaaccccgggaccgggaggcgccgggcgggaccccaggccaaggcgcatagaacggggcgcccccggagaagccaaaagccacgggcctacaaacgccaacaaaaaaagccaccaaggaccaacatacgggaccagcgggcggctttttttcccgggggagaagagcccccacgacggggcacccaaaaggaacccaaaacggagnccagacagccgacgaagacaaaaaccagccgccaacaccgaagagagaaaccacacagaacgcgcatcagggaagagctccaaccaaaccagcgcccggaaaagcacaggaacccgcccccaaaacgcacagcggaggcacagagcgaagccgcaacgagcgcacgaaagctagacaaccccgaaacgggagcaaaaaccgaacccaaggcacgagaccacgcacagaggcccagaaccgacaacccaacgaaacgca

SEQ ID NO: 126642 - DNA, 493 bp, Arabidopsis thaliana columbia
  unsure (1)..(493): unsure at all n locations
atgggcgatggggcggaccccctgagtcacgttcgtagctgattcgattcgggccgcttcgattcgattcgatttagcggcgatgtctctcagacctagcgcgaagacggagggtgcgacggatcggtacaaagtagcggttcgatgcggaggaaggacggcggaggcgagaggataacttgggttgagatcaggatttatangagagaggaaaaatttgcagaaagaagagantttacgtcttctatggctttttggctcagncacggggacanacgggaccaggatctttttttcagcgaacccatttaaaagataatctacctgctantggttgctggaatcctggtcagaggatagcaattcacaattggagggcacaaatctctttgcggaaactgctttctattgaacaanatccttctatcattgaagttgtacaatctggtggttgtnctcgtgttggtgaggttcttttcagggatgacttccc

SEQ ID NO: 126643 - DNA, 538 bp, Arabidopsis thaliana columbia
cccccctcgggtcggcgggatcgacaaggctggtttcggattcgggggcggcccccttatttggttcattcctaaccttattaggggggccggtattcacggatttggagttggggcttaaaaattcaacctccggagccttcaccaaaatggttaaaaggttattaggtcccttagttttgtttaaaaccattccacccaggtttttggaattggagtttattacctgggggctcaagcctttttttgacctgaatggttaatgcagcagttgcttcaaactttttaataatgtcgcaccgtggcgtttggcggttatatccccatggtggtctctgaagctcatggcgacatttctggccaggtatagacaagtaatctttatcaacttgctcttcacccttctgtttctcgaagctacttatcggatattcctgctcgaccttggctgatctcacaaagtaggtgacgcccctatgcgtggtgaattggagctcgtagttatacgatgagaaagcgagtaaattggttgaggaga

SEQ ID NO: 126644 - DNA, 486 bp, Arabidopsis thaliana columbia
  unsure (1)..(486): unsure at all n locations
cccccctttcgagggtcgacggggtatcgataaagcttgatatcgaatttcgcgggccgccacacataatatgtttcatactaaacatcataaggaggacagntatcaacgtatatgagtttggacttaaaatcaactactgaagcataacaaaatgctcagaagttagtaagtaccatagctatgtctcagaacaattctaccaagtttctgggattgagttactaacttggtgcttcagtctctctctgacctggatggtttatgcagcagctgcatcaaacctcttcatcatgtcgcaacgtggcgtttcgcggatatatccccattggtgtctcttgaagctcatgggcgacaattctggccaagtatagacaaggtatctctatcaacttgctcttcaaccctctgtctctcgaagctacttatccggatattcctgctcgaacttggttgatctcacaaagtaagtgacgcccctatgcg

SEQ ID NO: 126645 - DNA, 513 bp, Arabidopsis thaliana columbia
agggcagggtcaacctggttatcgattccgcggccggccaacacatccattaaaatggctggaaactttttaagtaaacccggggaagttctccttcttttgctctcaccttactcaaaattatggacggggaaattaaaaaaaataaacctaaattgaaacattaagtaaaacccaaatccaaactccatctaatactcctgatattttgagaaaaaaggatgcatgatgcgagttctgttggaacccgcatatcatcggttaagctaacgaacctgatgcctaatcaataaagctgctaaagggggttagcttgagtgaccggaatataaacacattgcatatgatctttgagaatcatgctgggctaatgctaccttaaaaggtagtttttagacataggctctgtctttacgcgttagacataaatctgcaaaaccgggcggtgatcttccaagttcccgttctacagggctgcatctttggccctgtgagctccacactatgcgaggg

SEQ ID NO: 126646 - DNA, 513 bp, Arabidopsis thaliana columbia
  unsure (1)..(513): unsure at all n locations
atagggcgacttgngtaccgaacccccctcgaggtcgacggtatcgataagcttgatatcgaattcgcgggccgcatttctataactaacacactcgaagttttctctgctgtcacattacatnggagtttttgatattggcaggcctagtgaaaatatggtgggctttgcttttgatcaattttcatgaaagtatcttcaaacacntggacagggatcaaagctctacttatctgcgaagctccaattctgttcgtgtagccaatgtaattttctcaagagaaaggagaactggggtaagacccatcttgggtggcaactggtgggtggttcttgagttnccatttctttcctgcttccattctttnnctgcggtgcctatgtaacncctctgaccccaaaaggagtaaacatnncctccgttggggtctttaaatcatggattgaaagaaagaaatgaatgcgggtagatggataaaccatggcctaagaaatccacactgnnnaggttaa

SEQ ID NO: 126647 - DNA, 536 bp, Arabidopsis thaliana columbia
cgggccccccctcggggtcggcgggattggttagcttggtttcgaattcgggggcggccaattcgagggtttttattgggaaaaaggttccgagaaaggcttattcaaccacttcagaagttaatttcggttttttaacccttggaaaccaacattttttttggattaagtggttccaggtggaaaatcggagctgttagccatttttggcgatatttcccgcgcacagattagtattagaataattaaaaaggaattcaaaaaccgtcgaagctctgtcgttcatggagcttcctcaacctcgtcccttcaaaacccaagaatttcgcacagggagaaaaccaacacatgattttttatcgctctgcagtcattcaaccgtccacccagatccaaagccaacaccaccaccttcttctcaaggtagtcacttgaaaacccatgattttcttcaaccggtagaatgtggtggtgcttaagaagacgtaaggaggaataacttttccactaccggggtcgaaaaggccacggcccct

SEQ ID NO: 126648 - DNA, 475 bp, Arabidopsis thaliana columbia
  unsure (1)..(475): unsure at all n locations
ttaggcgttggtccgaccccctcgagcgacggttcgtagctgattcgatcgcggcgcaattcgggatttatcggtaaagatcagagaagcatattcagcacttcagagctcaattcgcttcttcaccatcgaaaccacatatctcttgatcagctggtacaagtcgcagatctgagctgctagtcatttttgcgatatttccgcgcacagatagtaatagaataattaaaaagaattcaaaaccgtcgagctctgtcgttcatggaggcttctcaacctcgtcccttcaaacccaagaatttcgcacagggagaaaaccaacacatgatttttntatcgttctgcagtcattcacccgtccacccagatccaaagccaacacaccaccttcttctcaaggtagtcactttgaaacccatgattttcttcaaccgttagaatgtgttggtgctanagaagacgtaagtaggataac

SEQ ID NO: 126649 - DNA, 452 bp, Arabidopsis thaliana columbia
  unsure (1)..(452): unsure at all n locations
gggagagggaaaagcaggtatcggggggggggaaagccccgcaacaaaaaaaacccggccgacagcgggggcacgcaacgggcgcacccggggccaaggccgagaggccgacncggccgcccccccgagacaaccaagcggcagcggacaccgaagcgcaaaagacaacaggcggagaaaacccctcccttcgagcgcgagggacaagacagaggggacaccccacggcaagaaaaaaagaccaccccacgggagaggggagggcggcgccaccgccaaaaaaaaccgcagacgcccggcacgaaggagcccacaacccagaccgagaagagacgaccgccagggngagaacgaagacgaccagaaaggacacgccaagggagaacagaagagccaggcgacgagaacggccgaggcgccgcggagcgcccacgagggacgcgccagccgcc

SEQ ID NO: 126650 - DNA, 465 bp, Arabidopsis thaliana columbia
  unsure (1)..(465): unsure at all n locations
tatgggcgattggtccggcccccctgagcgcgttcgtagctgattcgatcgcgcggagagctgcaagctgtccaaggtgcgctggccgacaaggcttggagaaagactgggccttgagcacaagactcacttacttacacaccaagcctgtcccattgagaaagaagcagncactcctgattaaacccagtctcctgttctcttccttcgatgagctccaaatgacgaaaaaacanttggggtctccgcaggggagatgagactgaataaacatttcccctgtatagtttgcgtgatagtagtagtagcagcagctggatatattgcagtacctaaagatgtcagttctcggagcagccagccggtttagtggggtttagttttttttcgggtcccctgagcanaatcggttcttggcctctgggtttacctagagcaaaaccagttccgatggttacttgagtt

SEQ ID NO: 126651 - DNA, 471 bp, Arabidopsis thaliana columbia
  unsure (1)..(471): unsure at all n locations
caagccagacatcgaatacgaggccgccagatttcaagggagacggcgctgcatatgagggcaacccaggtcacgccaacggcgtagatgagaaagaccgagtgaacccgccgccacaaagaaccactgactgcaaccggacactgcccagaccgaaagagagcacacngacgaactcttagtgccgcgacgagaagagaaggcgccacgacgaaagaccacgcggacctcgcggggagcagagacggcatagacatagaccagcatagtcagagcgagaggagtactagcagcaggagcagataatgccgcgcatgacgaggccaggacgacgagcacacagccggatccgaggggggaaggtcacgggcggagccccagagccacgtgggtgcctgcactcagggccgacatgtaggacacacagtggcgaagggcacgagcgactagctcagtgcatacgggaccgga

SEQ ID NO: 126652 - DNA, 428 bp, Arabidopsis thaliana columbia
cgggtcgctagcgggttcgaactccggccggccttgtcaagcaaacatgcgcagatgaggccactcggccagacaagggggtgtgagaagactcgtgaccaagtgtcaacaagaactgaatgtcttacacaccgagactgaccaagaacgaggaatatttcttcacggggggaaaaccacggggctggccgaggcaagggaaagaaccggggggggagagccggggcccgaaggagcgaagccggaaaacacgcccgggaaagaagcggggagcaaaagagggacaggggggggccaagcggggccggacagggcagcaacccgaggaacccgccggaacaaagcggaaaagggaccctccggaccgccggagcccagcggttttcgggcccgggggggacctggggcaaagggggccgatgggggcc

SEQ ID NO: 126653 - DNA, 380 bp, Arabidopsis thaliana columbia
  unsure (1)..(380): unsure at all n locations
gcacgacgattatatgcagtgactcctcagatcacgagggaccggtactgttgcctgcgctatttacgacgaaaagaatgagggccgcgcagccaacacgagcgtcaattggactcgaaacccaacagagattcgtgagtccatgaaagagaccccacaagatctatttctctttaaagggagaaggtncgtgctcaggacagagattgagactctgacttttcttgccgtaccggggattgagatggtgagaaaagcatggagaggcgcaccgactctccctgagatcatcgcgtgcgcaccccatattgtttcgggcccgggatcaaaccagggagcgcgaagaaagaagagatcgctgtggtagggaaaatgattac

SEQ ID NO: 126654 - DNA, 296 bp, Arabidopsis thaliana columbia
catttggcctcaaacccagagagaagggggagttcataatgtgaggagtgggagccaaagcccgggaagggagacaggtccgtgcctggcggagatggtgactctggagttgtttcttcgaaccggggtggagatggaggggcaggtatggagagggcaagggactctaccggggtgatcccgaggcgcacacataaatatgttggacagggatcatcccagggcgcgggagaacgaagaaacgtggtgaaggaatgacgatgattccgctaaaacgggatgtcggcttgaacggc

SEQ ID NO: 126655 - DNA, 462 bp, Arabidopsis thaliana columbia
ccctcagggtcgcggggatcgatagcatggttacgcattcgggggccgtccggtttaacccgaaaggcattggccttctcagaatatggggggaacggcttggagaggggcctaatccccgggggggtaataaacccggcggtgggcaagagggaggaacctttgaaggtgccgaacaataacgggtttcttatttttgcgggggtaacaggacccaccgccggctataggcccggaggtaggaacctgtgctctggagggggtcgttggattagtaaaaggaaggggaaaaaatgtactccacacctttttttggaggagaatcttacatcggattttggttgaccaacttttggacaatggtgggccattgctggaaaaggaaggctgcatattcttcccggggcagaaaaaattccgtgaacacagcgttacattcccttcaacttccgatggaagtgt

SEQ ID NO: 126656 - DNA, 363 bp, Arabidopsis thaliana columbia
  unsure (1)..(363): unsure at all n locations
ccccctgaggtgacgatgaagctgtatcgatcgcgcgcataagctatgtattgatcactgatatttccagactcagatgcatattttcttcatcaaaacgtaggcgctaagacggcgatactgtgtctaggctcttgactacgtctgcgctcgtctggctgagggttccacggattcttgcgcgcactgcatgttgtccacggtattagatggcgaagatgtcgcacacngaccgacaatatcgataagtttcgtgacatctctgtgtctactgtcattctgtctgagtgtgcagaagtctgacgtgaagactagagagagaaccatgcgacatgtttacgatagtgcggaactgataacatt

SEQ ID NO: 126657 - DNA, 500 bp, Arabidopsis thaliana columbia
  unsure (1)..(500): unsure at all n locations
agcncggaatcgaattcgcgggcgcaaaagattttataggggaagcgacattctgcaagaacaaaaaaaagatccttaatttggaaaccctaaacaaaaaaaagggccaacccttttttgccttaagcggcccaagagatttcaatgggaaaacacctaaaaaggcctaaaagaagaccaagaccccaaggggtatgngtttcgggggaccgcccaacctccgaatctttttcaagctttatctcccttcctcctgccgcaagaacctaagttctctttcaaactccctccttgggaatcttggacttccgcactttttcctttggataacctcaaaggccggctaccaggttaaggcaatatcggcaatcccaaaaaacccgttgggggggaaatacctgccaaaccatacgaatggcttctggacccccgaacctggaaggctcctcctgcttaaccagcctccttcaagaaccaaggcaccccaaggaagtcctctg

SEQ ID NO: 126658 - DNA, 457 bp, Arabidopsis thaliana columbia
  unsure (1)..(457): unsure at all n locations
cccctcgagggtcgacgggatcgataagcaaggtttcgaattcgcggccgtccaagatattatttctaaattgacaattgccatgaacaaaaaaaagatccttaagctgaaaacacaaaacaaaaaaaagggccaactcttttttgccttaagcggccaaagagatttcaatggggaaacactaaaaaagttctcctcctttacaaaggcgccaaggagaaaggaancctccaacgggaaaaccacccaaccccagcgagggaggccccccctccttcatacaacaagagccgaaagggcccgnacaacaccaccaccttgggaattttcgaattaaggcactccttcttttggagaacctgaaaggcccgctcccacggttaaggcaataatcggcatccccagagaacccgctggggggggaaaaacccgggtaaaggaaaacggaaaggcttct

SEQ ID NO: 126659 - DNA, 543 bp, Arabidopsis thaliana columbia
  unsure (1)..(543): unsure at all n locations
cccccctgggagtccgagggaatggataagctggatatcgaattcgcggccgccggatctttcttatttgggtcgttggaattggacctttttagactcttggaaaattgctttgccaacatccttggtttgatgaggccgcagcaaaagggtccttccattctatcattggacgtaggagtaaccaaccttgatcgcccgccgattactccacaagctatttttattaagcagccggacaaaccaggttccgtgattattcaaccaccaccgtgcagggcggaggctgcaccaccaggactaagtcctaagaccaccactaagagcatttcattactagagaacgctttagaagacgtgaagctctttcacacattgcttaaagagctagagtcgtggtcattttgcggtaacgtatctgtgcacagagaattccacggtgaagaagtactcttgcgaatcgatctcgaagaataagctggagactatcgctgattaggatgatatgaggagagagattcanataatgcagcattggagcgg

SEQ ID NO: 126660 - DNA, 493 bp, Arabidopsis thaliana columbia
gggtcccggcccccccctcgaggtcgacggtatcgataagctggttatcgaattcgcggccgcccgatctttcctatctgggtcgtcggaattggacctttttaaattcatgggaaattgctttgccaacatccttggattgatgaagccacaacaaaatgatcctaccattatatcatttgacgtatgagtaaccaacctttatttttcgtagtttactccacaggctagagccactaatcagccggacaaaccagactccgtgaatagtcaatcaccaccgtgcagggcggcgggtgcagctctagtactaagtgccaagaccaccactaagagcattgcattactagagaacgctttagaggacgtgaagctctttcacacattgcttaaagagctgagtacctggtcattttgccgtaacagtttctgtgcacagagtattccacggtgaagaagtactcttgcaaatggatctggaagaataagctgg

SEQ ID NO: 126661 - DNA, 534 bp, Arabidopsis thaliana columbia
  unsure (1)..(534): unsure at all n locations
ccccctcngggtcgacggtatcgctaagcttgatatcgaattcgcggccgcctgggtcatgggtttgtctgcttttccgcttttgcttttggctggatgaatcataatctcttgagaaccattatggtcacaagaagtggtcctaagcctggggggaagaacctaagaagggttcaattttcttctttcattccgggttttaagttccggaaaccggttttttaaaaaccggaccggagttggaggaagttggcctaattaaaccgaaaaaaatgtttaggcggatcctggggaggcttcctaagaaaccttctgctaagttttgggataagggggaatcccaacctctagataccaccaccattcaaggaggaggtgatgaagttttaagccagagaccgtcatcaaatggagatactagttgggatggggttccttctttggatgtattgccaaggttgagagatgtttccatctctgagaagcaagaactgtttcttaagaagcttagactatgttgtctagtgtttgatt

SEQ ID NO: 126662 - DNA, 491 bp, Arabidopsis thaliana columbia
aggcggtttggggtccggacccccccttgggggccgccggtttcgttagcctggttttcgattccgcggccgccggggccagggtttggccggctttccgtctttggctttggccgggatgatccatattctctcgagatctattatgtccacaggagtggttcttatgcgtggggagagaatctaaggagggttcaactatctttcttcatttcgggttttaagttcctgagatctgttttggaagaatctgatctgagttggaggaagtttgactaattagatcgaagaagatgtttaagcagatccttgggaggcttcctaagaaaacttctgctaagttttgggataatggtgaatcccaaactctagataacaccaccattcaaggaggaggtgatgaagttttaagccagagaacgtcatcaaatggagatactagttgggattgggtttcttcttttgatgtattgccaaggttgagagatgtt

SEQ ID NO: 126663 - DNA, 484 bp, Arabidopsis thaliana columbia
ggaccgggaccccccttgagggccaccggattgattagcctggttttgaattcgggggccggaaaaccattaattagccaaccttgtgggggtcccaggatcttctcaccggggatgaccttctgcctgactctttcctttacagggagatggaaaatggattcctctggaaagtagaaggaaggtgggtaactgtggaagctttttttgttaacattggtgccaatccatctgctgaagaaggtggtgagaatgaaggtgttgatgactctactcaaaaggttgttgacattgtcgacaccttcagacttcaggagcaaccaacttatgacaagaagggattcatcgcttacattaagaaatacattaagcttttgacacccaagctcagcgaagaagatcaagctgtcttcaagaggggttttgagggagctaccaagtttttgctccccaggctcagtgactcccatttctttgttgggga

SEQ ID NO: 126664 - DNA, 472 bp, Arabidopsis thaliana columbia
  unsure (1)..(472): unsure at all n locations
agccaagccacnacggggcggaccatcaacagacacaagggccccgccggccacccagacaaccagaaggctaacaacgaccaccacacccaccacaagcaaccggcgggagaagacacaggcagcaagttcctctctcgggggggaacaacaagaaaggagaaccaacccgaacaaaccgaacgcaacgagggcgggaaggcgccaacggaagcggaacacccacacaccccacgaagcaaagaccacaaggggaggaacggaagaggcgcaccgccgcacacggcaaccggcacgaccggccaccaccccacagagaaccaacgcgagaccgcagcagcgcacacagggggcgccgcccacgaaaaagccacacagaacagaacgcaacaagacgaaccgccaccagagacaaaaccggaagaagacaaccacacgcaccggaagaacacaaaaagaagagaccaaaaac

SEQ ID NO: 126665 - DNA, 355 bp, Arabidopsis thaliana columbia
  unsure (1)..(355): unsure at all n locations
aaagaaaaaggccggcgaaaccaggggggagaccggaaaggcaacaccgggaaacaaacggccgaagaacggggaaacggacaaccacccccaacacgaagagaaaaacgccagggagaacccaggggcgncagaaacgcaagacagggcggaaaaaaatcgctgccttcgggggggggggaaccaagccggaagggaacccggcggaacgaaaaaaaaaggcccccccggcgaggggggggggggggcaccccccccagaaaaagaggagaggccacacccgcggacaaccccaaagcgcgcgcgacggggggcccccagccggacggcccccgcagagaaaggcagcacgcag

SEQ ID NO: 126666 - DNA, 319 bp, Arabidopsis thaliana columbia
  unsure (1)..(319): unsure at all n locations
aaccgatttttttttccgggagcaagcngaaaggaccaacaggaccaaaccncacccaaacggggaagggaggggcacccaggaaaaaccaaacaccaacggaccggagccacccggcaggagcgacaagacccccccgaaccacagaggcaaagggcggaaaaacaaaaggcaagcgggaacggcaccggaccccccggggaagaaaaccgcacccccgaagaaagcaaaacngccacaggcacagaggaacaacccaccggccacgagcacaaggagacacaccccccccacaaaaggacacaaaaaggccggaagg

SEQ ID NO: 126667 - DNA, 533 bp, Arabidopsis thaliana columbia
ggggtggacggcctggatgaacctggtcttcgattcgggggccgccgtcaacaagaagtggagcgtctacatcactggtccccggcccgggagcgggggtttggataattcttttgaggaccccaccaccaaaatttcggtacttgcttgaatgacccgcaaggtttggttgggccctaggtggcctaagtttgatggttaatcaaaaattggtttatgtggcgttaaggggtaaccttttacttaccggggtgaaacgaattcgcttccttgaaagagctgcactacttgacaggatgtttgggctttggcctctagcccaccctgccgatcaggtccacgtgactgaattccggcacgatgaacgtttggatgatcaggagtgcaaatcgccccctgaaactgcgacccgaaggaacctctcatgctatacgtatacagaaggatggcagcctctgacaagggtagattctttgattttggtcgagtttctgatggtacggctactactggtatgaatgccacaataatgg

SEQ ID NO: 126668 - DNA, 502 bp, Arabidopsis thaliana columbia
ttttgggagatttgggacccggcccccccctgtaggtagccgggatccctatgcaggagacgcacttcgtggccgttttcacaccagaagggggccggtcaaattatttggaaccaaaacctgaaagcgtgggtttgtacatatctgctatgatcccatcacgaaaattatcgatccttgtgtaaatgaccagaaggatatgttgtgccatatgtggttttagcttcgtgtctgatcgaaaattgatgacattgagctcatgagtaacgcttttgtgacctgtgtgaagcagtctcgcctcattgaaagactgcactactacacaggatgatcattgctttgtcatctacccacactgtcgacaggtaccgtgattagatcctgcatcatgtaactcttgttgaacaggatgaaatgcatcaggatctgagacaggaatggtcctctcatgctctacttatccagcatgatggcatacctctgacaagggcagattctttga

SEQ ID NO: 126669 - DNA, 461 bp, Arabidopsis thaliana columbia
gcccccctgggcgcgttcgtagctgtatgattgcgccgcctcataccctctttctcttccagtctcatttcaaattccattttcccttaggaccgggaaaggaacctaacttccgtggttgttcaccaattctgcattaattaccggccgggggaccaccatttcccggtggtatgaaccgggggctgcccaccacgatgagccggaggagggacctgttaaggcttaaggtggaaggtaaggttgaatggtccgttggcggggtcactgttaacaatctaagtcacattgaacacgcccgagtttacgtcattttcgatgtcctctggaggtaccttaggcttttaggatagaaggtggcttacgttcgaaatttcacggatgtggatgacaggattattgccagagcgaaggatttagaggaggatccaatcagtttgaccagacgtttttgtgaggaa

SEQ ID NO: 126670 - DNA, 505 bp, Arabidopsis thaliana columbia
cccccccctggggtgggagggcataactaacctggtattcgaattcggggccgtttaaagaatcacttaatccgaaggtgggtatcacaataacttaatgtgtccttacttaagctcccaatattaaaattaaccccaaaactgatttgagtatatttgcggatactggactgtttctgcaagtgtgaggaccctgatattttttcaagggggaggccagagaggccttgcctgggaggagggagtgtccaccacagtaaggcaattattattagcccgtggttctggaatagactccttacaaattgatatgacaaaatcggttgctcggttagcactgaaaaacggggaggaatgggaggcaagccgttggataaggccaaattgggtcacccacatgagtttgtgattccaggaagtggaccctacgggagctcagacgtctggtgaactatatgtgtccgatcactgacttgcgagagtaaccgcagacaatatggaccgt

SEQ ID NO: 126671 - DNA, 467 bp, Arabidopsis thaliana columbia
gggggccggacccccccctgaaggtggccgggatccataagctggttacggaattcggggccgttttaaaaacgagcttatctggcggtgggagcaaccataggcctaatggtgtccttaatcaagccccctaaaattaaagttaaaaccccaaaaagctgtttttggatttatgattatgccagataaactcggacctggtctctttttactgtggagggcagtcctgcttcatttggcccatggggaggccacagaggccttgcctgggagaagggaatgtccaccacagtaaagcagttaatattagcccatgtatctggaatagactccttccaatttgagtttgacaaaaccgttaggtaggttggccctgaaaacctgggaggaatggggggcaagcagttagaaaaggtcaattttgattacccacatgagtttgtgatttcagtaaagggaccctacgg

SEQ ID NO: 126672 - DNA, 481 bp, Arabidopsis thaliana columbia
tttgggggccgaccccccttgagtcggcggtttcgttagccttgatttcgattcgcgggcgcgctttaattgcgattgaccgaaaggggccggagaagggtggacttttcagaacggtcttcctgggccggtattacgggcaaaacaccttgcctgaatcaaggttttcctggaaattaccgtggtccggaaggtattttcaccaagtggcctcggtgggttaaggttcttggggagagaaaacccggattggaccttcacaggagggttggagccttgacttccttggtccaagtctttgaagttctatcaaatgctccttatcttctaaaggtcgattgtgatcactacatcattattagcaaagctctaagagaagcatggtgtttcatgatggatcctcagtcgggaaagaaaattggttttgttcatttccctaaaagattcgatgggatggataaaggtgacagatactctaatc

SEQ ID NO: 126673 - DNA, 455 bp, Arabidopsis thaliana columbia
accggttgatgccgagcgaccacgcgtcgatcgggcggaatgtccgccgaaatacttctgatgcaccgagcgagtatatttctcatttacagactgatgagtcagtattgtgctaggccactatctttcaagaaatggcggacatgaccacacagcgttattgtctttactgtatgcagagaagattcgtgatcttggctcttgctatcacagtcctgaatgcgcgtctctataatagtggctggctacggagacataagatatgcgagttcggaggtgttgctagtccatcatcttatctcgaaacagaagctgtgctggcgactgtctacacggaggtgatgatcactctaggccgaactccatcatatgtgagacacctcagatgtgcttggatatactaggacactatgaatatctgatacatcagtgctgagaagatacctacaatcgct

SEQ ID NO: 126674 - DNA, 503 bp, Arabidopsis thaliana columbia
  unsure (1)..(503): unsure at all n locations
nnnnnnnnnnnnnnnnnnnnnnnnnnnnnnnnnnnnnnnnnnnnnnnnnnnnnnnnnnnnnnnnnnnngcggccggctgagggagctggcgagactggagagaaagaacccgaggggaaagatgcatttgccggaccggagaacctggcagctggttcgtcaaaaggggggatggcaggaaacggagtggcagctggagcttgacccttttagggagattatggtggtaaaaaccgggggttcattggttattagcctgagggaggtaagtaccgggatcccaatggtcgtcttaatggctggaaccaagtccttgggggattaaaaccttgaccccttctttccaccttaatcaggttggttgccttggattgggggacctcctttctgccaccagaagacctttggttgtcctttcgttattagaatccttggattcattgaactggtctcccagaacagatggcaagaagcctggattcgtctacttgagacaaacaact

SEQ ID NO: 126675 - DNA, 467 bp, Arabidopsis thaliana columbia
ccccctcgaggtcgacgggatcggatagcttggatatcgaattcgcgggcggttcacttcaatctttaattcggctggtcagaaccgacccttctggacccgtccaatcggtcccatctaaatctggtcagctttctaatcttcatacagctactggggtaccttctcacttcggtcggaccgcttcgcttttttttttagttcgggatctaggggaattttccggaccaaattagaaccgtcctacttaaggctgaccggttcattttcgagacctaaccatggggtaaggaggatgatctttttggccatggatgggatggaggaggaaataaggttggtacctgggatgggagagaaattgagatctggagctttgagggggtggaaaagagcatggaaggggttgaatcaagctgaagtgggaacgggttggcaggttttctttaccctgggagagcttaagt

SEQ ID NO: 126676 - DNA, 545 bp, Arabidopsis thaliana columbia
  unsure (1)..(545): unsure at all n locations
cgcccccccctcgagncggagggatcgattagcctggtatccgattcgggggccgccacttcttacttttttcaactttgttaattaactaattggccattattaatatttcccaattggggtggtacttaattgggaagagccattttttcccattaaggttttaattttttgggttttttggtggagggaaaaggtttggttccaccggttgagaaaaaccggtgcaccaggatttggaattcggaaatccgttggtttaagttttaaaatagaattaaataaggttgttctttttttttcttcgggacactggaactaacaccaccgatgcattacactttgtagagactgcaaatggaaggcatcttttggtaatcccggattttgagatcaggtagtggtggatttgagatcaggtacatttacttgcaaggtgttttgaattttggttgtgacataatgggaaagcctgcagggtggttaaaaagtgtactactgtggaaagaaaccatctaaatctagtggttctaaagataaggaga

SEQ ID NO: 126677 - DNA, 494 bp, Arabidopsis thaliana columbia
ataggcgatttgggtccgggcccccccttgagggtcgcgggattcgattagcttgatttcgaattcgcgggccgccacttctaacttttttcaactttttaaattacctaactggcattattaatattttccaatttggggtgattcttaattgggtgttgccattttttccatttaaggtttcatttttttgggttttttggtggtgggaaaagtttttgtcccacgggttgaaaagaacggggccaccagaatttggattccgaaatgcctttggtttaagtttaaaataaaaattaataaaggtggtcttttttttttttccgggaccactgaacctaacaccaccgtggccctccattctgtaagacctgcaattggaaggcattttttggtaatcacgaatttggaaaccaggtagtggtggattggagatagggttcatttactggcagggggtttggatttttggtggtggacatattgggaaagct

SEQ ID NO: 126678 - DNA, 467 bp, Arabidopsis thaliana columbia
ggggaattggggggcggaacccccccctgggggtcgacggtatcgataggctggttatcgaattcgcggccgccaaattcaaaattaaattggaaaaataagagcacaatatgtcaatgatgcccgtatccaggtcaccagttgaagcgggactctcttcatttacggtggaatttaatggtttagtacactatctactataaacgagggaacatactatttttgcagggtggagcggcaaagacgggaaccaacaatagggaaaaggatcgacatgtgggtgtaaggaaaaacacgagatttatacatggcgtatactctctgaagcctttgaacaacgagggcgtactcccataacttgccattagctcgcttatgttattccagtctaagcccctggaaggtagtaaagaatctacgaagacgaattgtgggacgggattcttcacgatctccacagatgatgc

SEQ ID NO: 126679 - DNA, 481 bp, Arabidopsis thaliana columbia
cccctcgaggtcgacggtatcgataagcttgtatatcgaattcgcggccgcctattataacatacagctggaacaattgaggtccgacaatttgatccccctaaaaaaaggaccaccacaaaaacatttatgattttttttttttggggagcaacctttaaataaagaaaaatacagaagtctggccctttcatcgattaaaatgtttcgggaaagaaagacaaacttccattgtatgaagagagagatggtggaagaaagaaaattattaagcgggaatattccgagagagaagtggtctttttaacgctcggctgattgccataatatacaaacgtccacttgaacaacttgctcatcccccccccgagaacccgtcgtaagttttgacccaaaataattatcgataaactgccattagaattgcggtaaggcatcgtcacgtgccttggaattttgatttaatgcttcttaccatttt

SEQ ID NO: 126680 - DNA, 508 bp, Arabidopsis thaliana columbia
atcgaattccgcgggccgcacgagttacattccaaaatcgtcttatgggtaaaggaccaatggaggcttatttccactttcccatggtggaaaggtggtacttaattggagttttaaagggatccttccaggaggtggccgacctttgaatgggtggcagaggaaagaaacttattgcaaccaggaggataatctccggctatagcgagcacggagctcggcaaagaccaaatgccatctccgcatatcaaaccagaagccaccgctgtcccaaaagcttcagccttggctgcatctactctttcccagataaaaagtatcaaacttcccacacacatgtcaattgcgaagtaaggtcccaagaaaaacggtatagccattgccatgggaagtggaatgaaccttccccaattgctatggagactatcttttactatgtttacgagaatcgccacaccgaagaacgcgtagcatagaacaagacattctctcggtagagatgcgacac

SEQ ID NO: 126681 - DNA, 511 bp, Arabidopsis thaliana columbia
  unsure (1)..(511): unsure at all n locations
nnnnnnnnnnnnnnnnnnnnnnnnnnnnnnnnnnnnnnnnnnnnnnnnnnnnnnnnnnnnnnnnnnnnnnnnnctttnnttnnnnnnnnnnnnnnnnnnnnnnnnnnnggnttttttttttttttttttcttcactagaatgggaaattatattgatgaaataagttctgaatacaataggcggcaatgcaatcaaaccttccaaagacataagccggcgagtacatgtagactcctagaaacaaaaatctatttaagaaaaattaaagaggaaataaactcaaacatacaaatacacgcatctgaaccaatcttctcggaatccaaactcaaaaaatcaaaaataaaattacaaagtctaaatcaccataaaaacaaacagattcacactaaggaaaacaaaaccaacaaaaccaggactctctttaccacaaacggnggtgaacaaacaaacaccccgcgacccaaatgatgatggtcataagaagaagaaaggagatcgagatcttca

SEQ ID NO: 126682 - DNA, 533 bp, Arabidopsis thaliana columbia
caggtaccggtctggaattcccgggtcgacccacgcgtccgcttcttcagggttcaggtgtgaaagctgacgccaccgtggcagctgacggtagcggtacatttaaaactgtggctgctgcggttgccgcggcccctgaaaatagtaataagaggtatgtgatacatataaaagccggagtttacagagagaatgtggaggttgctaagaagaaaaagaatataatgtttatgggagatggtcggacgagaactattatcaccggaagtcgaaacgttgtagacggtagcaccactttccactccgccaccgttgctgctgtcggcgagagattcttagctcgtgacatcactttccaaaacacggcgggtccgtcgaagcaccaagcggtggctctccgtgtgggttctgatttctccgccttctacaattgcgacatgttagcttatcaagacactctatacgtccactctaaccgtcaattcttcgtcaaatgtctcatcgccggaaccgttgacttcatcttcggaaac

SEQ ID NO: 126683 - DNA, 506 bp, Arabidopsis thaliana columbia
tatgacgtcgcatgcacgcgtacgtaagcttggattctttagagcgggccgcctttttttttttttttttttcatttcggttctaatacctcgaagatctaaagaaaggtccccaccccaaccaaaccaagagggccacccgatttggttcattccatattaatcaattatttttggagcccaccattccttggaaccactttccacacaattttttaaagacccaaccaaaaggggaaaccgggcggacattacccagcttccaccacaattaactggccaagccgtttattttgaagtttaagaagaagccgaatttactttaaagcccttccatttaattttattggcagttccagcccctgctcttgtgtccaaatcctttctgtaggtaagagtgttaaacgcaaaagtccgggtccactcgaaccacctttcggttcgaatcacgtcggagatagccgactgctttatcaccgttggtgattattctttccatggccgac

SEQ ID NO: 126684 - DNA, 533 bp, Arabidopsis thaliana columbia
agtaccggtctgaattccgggtcgaccacgccgtcgaaaaagaacatggccgcgagtgcctcttccatggcgaggcaacttaaggaccacttcttcttcggtttttttttttaacggcttggccgcccgaaaggcattttccggggttcttttcggggttcttccaaccaaagaagttttttccttaattgtccgacctgttaaatccgacaggacacctttccaggtagttcaaccaatcaccggggatccattcatcggaggttgggaacctccggtgacatcaagcccattgatcgcgtggtacctttccaacctccctggttaccgtaccgccgtcaaccctctcctccgcggtgtggaagtgggcctggcccatggtttcttcttagtgggcccgttcgtcaaggctggcccattaaggaacactgcttacgccgggtcagccgggtctttagccgcggctgggctagtagtcatcctcagcatgtgcctcaccatttacggtatctcttctttcaaggaaggagagc

SEQ ID NO: 126685 - DNA, 509 bp, Arabidopsis thaliana columbia
ggtgcactatagaagatctatgacgtcgcatgcacgcgtacgtaaggctggattcttttgagcgggcggccttttttttttttttttttcctgggagaaccggatttttttattcaattcccaacctttggattttttttaattggattcaccaaggggtgccaaaaggaaattggttggttttttttttttaaccattggagttggttttttttttcccgaaaaaaattttccattatggtaaaggtttggaatggagttggaccatatagggtggaaaccttttggtaaaataataccagatgacttcatgcccttgtaagccgcaccgcctcagcgaataactccttgagagaagcgttggaagccgcgatcctctgcgatgttatgtccaaatctttaccggatggatcaaagatgagtccaccagcttctttcacgataacaattcctgctgcaatgtcccatggaccaccgaaaccgagctcgtagaagatatcaacccttcc

SEQ ID NO: 126686 - DNA, 480 bp, Arabidopsis thaliana columbia
atgccccccttccttaggctggattcttttgagggggcggcccttttttttttttttttttttttttttttaattaacaattggccccaaggaatttttttccaaggttaaacctttggctgaccccattccaatggcttattttttaccaaacccaacccattcgaccactttatttttaagtttccttaaaggtttattaacgataagggttaaaccgacccgttcaatggaatacattaagttaatattattaggcacccgaaactttatccgtaaaaaacgagtttttgaaagggtatgaagctcgcattgcgatgccacataggccttttggattggcaatgttgcaagccattttaatgtagccagcctccccccatgtgtcgcccttcgagtttttcacaatccagtagtcacgaccattctgggttccatacccgaccacaacaacaccatggtttaggtttgttccgcagg

SEQ ID NO: 126687 - DNA, 552 bp, Arabidopsis thaliana columbia
  unsure (1)..(552): unsure at all n locations
aggtgcactatagaagattatgacgtcgcatgcacgcgtacgtaagcttgggtccctctagagcgggccgccttttttttttttttttgtttaaaatctttggttatcgacgacgaaaaacaaacccaaaaacaattggaggcgcatgtttaacactaaaatncgaagccccttgttaacggcaacaagcgcatctttaaagacaaacaatttctcgtctcttctttctacaaactacctttttaatttttnctattcttccttttcacacatttcgttattcatcacccatccgaatttttccgggtcggggtaatttatttaaattcgaccccgtttccattgaacccgttcccgctttttacgaacaatttttcaatctttctcgtaattcacccgcggattcttcgcccgccgggtatttaacaaccacaccggtcgttccaaggcgcattaaacctggagcaccaaccttccgccgcttttcttcctaatattacgccgccgataaatcaccacctcttcctccgccgttagaaacagtaagtccag

SEQ ID NO: 126688 - DNA, 493 bp, Arabidopsis thaliana columbia
  unsure (1)..(493): unsure at all n locations
gacgtcgccatgcacgcgtacgtaagcttggattctctagagcgggccgcccttnttttttttttttttttttttttttttttttttttttttttttttttttttttttttttggggaaaaacagaaatgggaattccgggtttctttggagggttttaacaattttgggccaaaaaccaaaacaaaaaaagggggtttttttttttttttacccaccggaagaggccctcaaaaccttttctccccttaaaattttagctaaatgggaatccttttttccccaaagggggaagcaaggtttccccccccttatgggttttttttttaaaaacttgtttcagtaaaaaaagccaaaaaccttgcccccaaaattttttttccggggtttttggggggccaaataacccgccggggggggaagaacaaggtccccaacttgtttggaaggaaaaaaacaaacggtccaccctttaatttccttaactccaaaat

SEQ ID NO: 126689 - DNA, 520 bp, Arabidopsis thaliana columbia
gacgtcgcacgcacgcgtacgtaagcttgggatccctctagagcgggccgccttttttttttttttttgatcttgaatacatcgtcagatgtttgcccatttttggttatttcttatttaaaatgtcctatttaaagacttgttggtgtgtttaaaaaaaaaaccaagggatccaacttttgagaatctaaaaaacatttttcaatcatcatcatttttgactctggcttttcactttcttgtgctgagcccttgagttcttttacccttctcttctcgttgcctttcatggctttccaatagatagaaaatcaacttatcaatctcttcagggtgagataatgagcggtgggagacatcaaaatgccatcaccctgcaacacgggactaacattcccgggcttcttggcccttgggctccaaaggaatgcgccaacaccccatttcttggtggaaaatggttcgttccggagatttattggttacaaactcagtcccaaggattcaaacctgtttcctc

SEQ ID NO: 126690 - DNA, 511 bp, Arabidopsis thaliana columbia
  unsure (1)..(511): unsure at all n locations
ggggcgaaaatttccagggggggaagggccggaaaaacacacaacgggncagaccaaaggggagaacaaggccaaaacgaacaagcacgcgcgaaccaaggcacccagggggcaacccgccggaagccacccaccccgagagccgccacagacgggaccagaaaccagacccctcccaagggggaggggcgcaacaagcacaacaccaacccacaaaacaccaccgaaaaggggggggggaggcacccgcggacccagaagaaagaccgggagccaacgaaaacaaaggaccaaaggggaccgcccacaagaaaaaagccgacgagaaagacaggaaccacacggaccccccaaacggacccccccgccaaaaacacaaacagcacgcccagcacaaacaaacaccaaaaccaacccacaccgagacggcggcaaccccccacgggacaaaccaaaagagacgcgcgccacaccccaccacgaacgcgcaacacaccacccaacacccaca

SEQ ID NO: 126691 - DNA, 414 bp, Arabidopsis thaliana columbia
  unsure (1)..(414): unsure at all n locations
cccccgngggggggaaacaaaaagtttcaaacgggacatccaagcaacaaacgaccgaggcgaagaccagtttggggccggacacgcaacgcagaaaaccggataccgtttgtcccagagtagaaggggagcaagcaggagcggaccaaccggtaggcctttcttctttaaggggtgcaaccgcgcaagaaaaaacagggaaaaaaaaagggaacggaggggggggccccgccgcaaaggagcggagcacccaccgaagccaacggggaaaaaagggcccccacacgggcaggcacaggcgaggagacaccccgggaaaagaaaagacccggacggaaagaggaaccgacccaagaaaaagagagccccaaaagacaaaagagagagacgaggcagcaaaaaaacaggccagaa

SEQ ID NO: 126692 - DNA, 475 bp, Arabidopsis thaliana columbia
  unsure (1)..(475): unsure at all n locations
agcaggaagacagaagancggtccgacgggggggaaagccgcagaaaacaaaaaagacgcgcaaagcgggggggccagcacagggccgcccggcgcggcgggcccggagacagcacaggacacagcacgcccgaccccgagaacggcggggggcaccgacgccaccaaccccaaggagaccaggcgaagaaaacccctcctnccaggggggggaaccagaaccaaaggacgcgccccgccacgcggcaaaaaaagcgacacaacacggcaagggcgggaggcccanccaggcgaagagagggggggcgaacgcgacacacgcgagngcaacgcacgacgaagagaacggagaggaaacgacggggcgcgggagcccagagggaacgggaacgacgaggacagagaaaggaagacgggacgcggagacgccgagacgcacaagaagcacacgcacacaacgcaccccagcgaacac

SEQ ID NO: 126693 - DNA, 414 bp, Arabidopsis thaliana columbia
ccagcaggccacgccggagccacaacagccgacagggcgcctccccgcgaaagagcaacacggcccaacagaccaaaagcccacgcccaggggacgcaggacgggcacacgccgcgtttttttttgcacgcctccagaaagaagaaccccccgacgcagacacacccccggcaaaaggagccccagctagaggctctagctgcagaaagaagctgcccgaagaggatttgccttggaacaacttttcgccaaacgcatgaactttgagagccgctcgtactcggtgcctgcgtaacccagaaggaactttccccaacactcctttttcatcaggaaccatggtgagccaaccgctctttcatgggccaacatttcttctcttgaatctgcttctgttgcctgcgcacttctctt

SEQ ID NO: 126694 - DNA, 501 bp, Arabidopsis thaliana columbia
accggttgatgccggtcgaccacgcgtcgagggaagactcggagatcatgtcatgagaaggatcaacttctctattatggatctcactgtgactactgattcttggagcgagacaatgtcttcaaatcatgggcctcaaaaatgttctttcatcaaaaacccaaatcgattttagtcatctctgctcattgggacaccaaattcccatctgtcaacactgctcttcgcaataacacgatccacgatgtttctggcttccctgatcctatgtacaagttgaaatatgaagcaccaggagcaattgaatcagggaaaaggttaaaagagttgttaatgaaagaaggaggaatgaaccgcgttgttgaagatacaaagagaggacttgatcatggagcttgggttcctcttatgttgatgtatccagaagctgatatacccatttgtcaactctctgttcaatcaaatcaaaatgggagttatcattacagcatgggtaaagca

SEQ ID NO: 126695 - DNA, 535 bp, Arabidopsis thaliana columbia
gccagcacgtaccggtcctggattgccgtggtcgacccacgcgtcccgatctgggtcgtggcgccttataaatcaacgaccctttggtctttgacggatcctctttttttattacttcatctcttccattctcttcacttttatcaaaaagtcgatccttaagggcttttctttaccctttaatggtatccggaagcttttggaagccaataaggggtcttggatggttttggaggttcagaatctgccttttttaacttgattcagcaagttcgtatctgaaaaggaccgttgggtgaggtcaatagtgggcgcggtgttatagtaatgaaggacggcgagcttgatttgtccaatcaggaagtgattcagagttcggagatgggtgaattaccacctagcaattgttcgatggatagttactttgttgggcttttgatggatactaatgctgcttgtacccacactcacacctgtgaccccactggaccagagaacactcatactcacacgtgctttcatgtccaccccaaga

SEQ ID NO: 126696 - DNA, 391 bp, Arabidopsis thaliana columbia
ttatgacgtcgcatgcacgcgtacgtaagcttggatcctctagagcggccgcccttttttttttttttttttttttttttaacacacagaacatgtgatgtttgttgattaacaatatatcatccttttagatttgcaagctgacctaggaaatacaatggaagggacagagagttctaactcaagcaacaaaaatgaggatacaatgtgtacctgacgaagctgatcctgcagctgaactctacaacttatttggaatacaagatctatgctgggggaaattgacagtacaagcttgatgatgctggaaactgcacttgatgcacgatgcccaccttgtctctgattcgagacagatgtattgacggtgctgaatgatccgtttccatta

SEQ ID NO: 126697 - DNA, 540 bp, Arabidopsis thaliana columbia
cacgcaggtaccggtcctgaattcccgggtcgacccacgcgtccgggcgtgtattgggagttttatacttcatgaaagcgtgtttttcttgtctggactcccttacattttcctagaaaggactggttttctgagcaactacaaaattcagaccaaaagtaatactcctgaagcccagggaaaatgcattgctcgactattactttaccattgctgcgtaaacttgtctctcatgatggcgtcgtatcctgtattcagattcatgggcatggaaagcagttttcctctgccgtcctggaaagtggtgtctgcccagatcttattctacttcatcattgaggattttgtattctattggggtcacaggatcttgcatactaaatggctctacaagaacgtgcacagtgtgcatcatgagtacgcgacaccgtttggtttgacatcagaatatgctcatcccgctgaaattctgttccttggttttgctaccattgttggtccggctctcaccgggcctcacctgatcaccctttggttatg

SEQ ID NO: 126698 - DNA, 506 bp, Arabidopsis thaliana columbia
ctatagaagactatgacgtcgcacgcacgcgtacgtaagcttggatcctctagagcgggcgccctttttttttttttttttacatggaaagacagaattatatcattcaataccaaacatatgatttttttttaattgaattcacaaagggtagcagaaagaaaatagtttgttttttttttctcaacaattgagtttgttttctttctaccgaaaattttattcaataatgttaaggttttgaattgagtttgatcatataaggttgagaccatattgtaaaataataacagatgacttcatgcccctgtaagccgcaacgcctcagcgaataactccttgagagaagcgtttgaagccgcgatcctctgcgatgttatgtccaaatctttaccggatggatcaaagatgagtccaccagcttctttcacgataacaattcctgctgcaatgtcccatggaccaccgaaaccgagctcgtagaagatatcaacccttccacacgc

SEQ ID NO: 126699 - DNA, 472 bp, Arabidopsis thaliana columbia
gcacgcgtacgtaagcttggatccttttgagcgggcggcctttttttttttttttttttttttttgggtcggtaaatggtccaaaaatttcacttttttaccaacctaattaaacccaacccaccatttaaatttatttttaaatattattcccaggagaaattaaaatttaattattccaaatggattccaaatttttccaaaaacggttttggccgggtcagggttggggaataccgcgggttcattaaattttggcctaggggggcacaaggattttggctcggcggcgggttcttttcggactttccattattggcggcaattaacggcttttcccaaaggaggaaatttttggcggcggtttcaacggttggattccctggaggcaaaggattctaatggaacttggtcttcctcgggtaaggtttaatggcggcctttggaaatctgggccctccggtgggatcta

SEQ ID NO: 126700 - DNA, 357 bp, Arabidopsis thaliana columbia
tgacgtcgcatgcacgcgtacgtaagcttggatcctttagagcgggcggccttttttttttttttttttctagcgaaaatataatttattaatgacttttattttacatgccaattattcgactgaaatggtataggaatagagacctgtttgtattacaaaattaacttatgtgggagaaacaaatagtatataactttaacgtttccctttttggtcaagcgtcaagccttccttggccatttaagaccacttttcattccaaaaccttgacaattaaaacattttggccttttcaaaattccaaatttacttttcttaaaggacctattggaccggtaatttttagaatgaatt

SEQ ID NO: 126701 - DNA, 543 bp, Arabidopsis thaliana columbia
  unsure (1)..(543): unsure at all n locations
nnnnnnnnnnnnnnnnnnnnnnnnnnnnnnnnnnnnnnnnnnnnnnnnnnnnnnnnnnnnnnnnnnnnnnnnnnnnnnnnnnnnnnnnnnnnnnnnncgggcggaataaacattagaaccaacttcattcaacaatgggagggtcttaacttatggaccgaagtgcccctatttaatttttttggtgcattacattcatgaaggtcccttaatggataagccggctggcaaccaacccctattaaaatcttcttttgttttcggtggttggcttggctttttaccacttccattatggctttggttaattcttaagaactggggggcttgactaaccatttggtcacctccattcattggccactggaaccaccttcccgtggaatggcacccacaggctcgttccatctaaaacaccgaaccaatgctgctgaaccgcagcggttccttatgcagtagtaccagtacctgggctgacaaggcaaagctataaacggaatggcaggatccacttggcaaatagggcaagtcactgtatcctct

SEQ ID NO: 126702 - DNA, 545 bp, Arabidopsis thaliana columbia
  unsure (1)..(545): unsure at all n locations
tccnnnnnnnnnnnnnnnnnnnnnnnnnnnnnnnnnnnnnnnnnnnnnnnnnnnnnnnnnnnnnnnnnnnnnnnnnnnnnnnnnnnnnnnnnnnnnnnnnncggccgctactttgaatgctgatgaatcactggcgtatccacctaagcataatgattcatattcagctactaaagctgaaggggaagctttgattttgaaagcgaatggaagaagtggactactcacttggtgcataccttctaacaacatatttggtcctggggattaattaatgggtccattgcttggtactggtggcaaggctgggaaatcccaggtcattattagggaagggaggaacttctatgaattcacttatggtgaaaatggtgggcacccccatggctgggctgaaccaacttttaccttaggaagagaagtatgggccaaagctgctggccaggcttacttcattaccaacatggagccaattaaattttgggagtttatgtcacagcttcttgaaggacttggctatgagaggccaagtataaagatacctg

SEQ ID NO: 126703 - DNA, 535 bp, Arabidopsis thaliana columbia
  unsure (1)..(535): unsure at all n locations
ccnnnnnnnnnnnnnnnnnnnnnnnnnnnnnnnnnnnnnnnnnnnnnnnnnnnnnnnnnnnnnnnnnnnnnccacgcgtccggtgaaaactaatttatccttctagaatggtatctatacgaagattggtgtggatctctaacctgcatggtcatcataacttaattataccaaaagttccgttgagcacagcatggattaattgccaacttaaaggatgggaatttaggaagtctggacctatagattgatacgatacacagacgatctagatatgtgatcatgacgtcatggacaagatgctactttggatactactaggatgaatatacgacatgatagtgtgttagaaaaagcataggatgaaacctctgcctccacccaaagatggtcaccagacggagccatgatctatgatcacttggaacaaggagtttatggacatacttgatattactagggtctacaatattgctaatggttgggatatggctactgggacgtgtcagattactatgagatataacacaatgga

SEQ ID NO: 126704 - DNA, 558 bp, Arabidopsis thaliana columbia
  unsure (1)..(558): unsure at all n locations
atgatactttaagctcnnnnnnnnnnnnnnnnnnnnnnnnnnnnnnnnnnnnnnnnnnnnnnnnnnnnnnnnnnnnnnnnnnnnnnnnnnnnnnnnnnnnnnnnnnnncggccgcgttgatatggctggtcagaaaaaggaaaatgaaacgaaaaaggctcagtggagctgtacaaatgagaatgcataagaatttgacgacatagttcatgctacagatccacattggcagaaactaggtacatactttcattcaatttatcataaacgtgtgagcaataaccagcagtctgctacgcatagtacctggtcctcaactgagggttgacccttatgctcacgatattggtcagccttaagagttacacgtacacttgggacactttgggatgacagaccattggcttttccagtcaatggaaattgctggttctcttgttgctcanactcagttctaatatccaatcctagatcttgagagtccaacattgatgataatgattttgggctattggatacatctttagaagatgaccataactcatcaccaccgctgag

SEQ ID NO: 126705 - DNA, 539 bp, Arabidopsis thaliana columbia
  unsure (1)..(539): unsure at all n locations
ctcnnnnnnnnnnnnnnnnnnnnnnnnnnnnnnnnnnnnnnnnnnnnnnnnnnnnnnnnnnnnnnnnnnnnnnnnnnnnnnnnnnnnnnnnnnnnncggccgccgtcacctcagcatgaagaagccgaagctgttttgggtctcagccggagcaccacttctttccgttatcgtctctacacttcttgtctttgttttcagagccgagcgtcacggaatcagcgtcatcgggaaattaccagaaggtttgaatccaccgtcttggaacatgcttcagtttcacggtagtcatctcgcactcgtcgccaaaaccggactcgtcaccggaatcgtctccctcacggaaggaatcgcagtgggaagaacatttgcagcgctaaagaactaccacgtagatggaaacaaagagatgatcgccattggtctgatgaacgtagtaggctctgccacatcttgctacgtcacaaccggagcattctctagatcagcggtcaacaacaacgcgggagctaaaaccgcagtttcaaacattgttatgt

SEQ ID NO: 126706 - DNA, 541 bp, Arabidopsis thaliana columbia
aggttccaataaaccttacttaaggggaccaaagcctgaacctccaccgggggggcggccgttctaaacctagtgaatcccccggccttgaggaattcgcggccgttaaacattcacgtagcattccaaggtccttccgatggtcctatagtcctcctcctccatggtttccttgagctttggtactcatggcgccaccagatccttgaactcgccgttcgtggctaccgtgccgtcgctcctgacctacgtggttacggtgactccgatgctcccgctgagatctcttcctacacatgcttaaacatcgttggtgacttaatcgccgtcatatccgccttaaccgcctcagaggatgagaaggtctttgtggttggacatgattggggagctctcatcgcttggtatttatgtctcttccgaccagatagagtcaaagctctggtcaacctcagtgttccgttctctttccggccaaccgatccatcggtgaagcccgttgatcgcatgcgtgctttctacggcgatgattactatatct

SEQ ID NO: 126707 - DNA, 486 bp, Arabidopsis thaliana columbia
acaacccactttaggggagcagcgcgccagcgcgaaccggtgcggaacgctgtatagtacgacgcgtccgcgggcatcaatgaattcctgtacgctatctatcgatactaatggatgactgctcacactcaagccacgttgacacggtacttacaactgacgataacatctacgctgccttcccagacacccgcaaggataacaacaacactacttccatcatatacgacggcggaagagataactgattgcatgtgcggccttcgagtggaaagaggaagattgagactctattttaacttgctaaccttaccgattgcgaatcgactaatgtagctgactaccctattcgcaacaagtgggttgcctgagtagcattcgagcttgagcacggagttggtgaccgtgagcactgctactgaccatggtactatgatgtaccgtcctggacaatggggaatgttcccttggtcgtgtgcaccgact

SEQ ID NO: 126708 - DNA, 542 bp, Arabidopsis thaliana columbia
agctcgaattaaccctcactaaggggaacaaagcttggagctcaaccgggggggcggccgttttagacctaggggatcccccggcctgcaggaattcgcggccgccctaatcaccagaggttcttagccactgggatcaaagtagctctgacctcacctatatgtagtaaagaaattgagaagaatcaacctgagccttccaacaaccaacagaaggctaatcagattcctgctaaatccacaagccagcagcaacaacaaccttcttctgctactccacttccctgggctgttgacgatttctttcacttctctgatattgaatccaccgacaagaaaggacagcttgatcttggggcaggggagttggattggttttcagacatgggattcttcggtgatcagattaatgacaaggctcttcctgcagctgaagttcctgagctttctgtttcgcatttaggtcatgttcattcatacaaacctatgaagtcaaatgtttcacacaagaagccgaggtttgagaccagatatgatgatga

SEQ ID NO: 126709 - DNA, 176 bp, Arabidopsis thaliana columbia
gctcaaaaccgcaagggactggggtaatgcacaaaaaccagcagcgaacagccctttgggaccaccaaacaaacccgggggccaaacacctaaccgcaaagccaccaaggcgtcgcacatcaggaaccagaacccgtgccctgcaagccacacaataaggcaatgtcagaaccgcc

SEQ ID NO: 126710 - DNA, 487 bp, Arabidopsis thaliana columbia
  unsure (1)..(487): unsure at all n locations
cgccggcaggcaccggccgggaatccccgggtatgacccaggcgtccgtgaactgaaagaatggacgggccctaacaaaggctgtaattcatgggacgaggttctaaatggcgcattcagaaccgcactggaacagcctggcacctttgtaagacctccttttccataactattagaaccgaccggaagagctcttgtcnnatcgnggggcggnggacctggaagactccaaacaaggagagggggaccaacctaaacagggcgaacaggaactggaagaaaccacgctcgatcccacaaggagaagggagggcttgtggtacctattggccacctaaccacgacggatgatggtcaaccttataagatgacatgctaagacgatgctgcctgactttaagtctatgctaaaaataaggccacggacccgcatattactcttgttgagagagcctgcatataccataagttaagaccggcagtggta

SEQ ID NO: 126711 - DNA, 549 bp, Arabidopsis thaliana columbia
cagctcgatatgaccctctctaagggagcagagctggctgcttcaccgcggtgggggacgctctagaactaccaggattccccgggctggaagaattcgcgggcggcttcaacttttttttacttcttcagatatgggtaccttttcgacgaacttaacaattaaaattcttttgtactttggccgcaaaattcttacttgttattccggcgggtaacttcggttccacggggggcacaattgggttcttggcggttcttggttcggtttaattttcgggtaggtttaaccctttcaacctattggccattttggatttcaacaaaaaaaaaacgaattcggttttggggaaggagaaattagggccacacgtgggggggcgttttaacaaagttagcgtcgaagatggcgaaaatgtgcggcggcgtcggcgaatctttaaccgtaacgatccgatgtcagcttccgacggaagatctcgacgcgctcgtttcaattacttccgatgaagatctagtgaatctaatcgaagagtacgatctcgtttcc

SEQ ID NO: 126712 - DNA, 537 bp, Arabidopsis thaliana columbia
cagctcgaaataaccctcactagggaacaaaagctggagcttcccgggggggcgggcggtctagaactagtggatcccccgggcttgaggaattcgcgggccgtttgggttccactggtcttttcaagggtgcctgaaattaaaaaaacctttgaagaatggaggttgggcaagttaaaatcctggagggaaggccaaacccccaccgaggaatttaccagacccttctttaagggaagttggcttaaccggttctgaaaagtctcgatggcctttttccacactgaagctctctgtttggcgtcttcaaatgataaaaccttctttggcgtgcaaatcttgaaatgtgaagggctagtgactacaacgttgaggtcattcgagttatcagaccatataatgtttcctttcacaactagttttgacgggtcgacatagatcagcttgggtttgttggtgagtattagctgcaccttcttgctcgttattttctgaagcttcttcaccgctgatatcatcagaaccgattctcctggc

SEQ ID NO: 126713 - DNA, 537 bp, Arabidopsis thaliana columbia
gggaccccagaaaaaaaaaaaaaaatccctagttcgcaccccccctctaggggaacccgccggccgcgcgcggggcggcgccctgacagcggacgcgcgcctgaaggaaccggggcgccgactcggagaggacggggcacgacccgccaccagccaagcaaaagctgcggccaaaggaaagggcagcaccagaagaccaacggggacgacgcgaaagggaggcagcgtttttttacgggggggcctaccgacagagccatcggcgagagaaggagccgcgaaaggagcacacgctgtcgaggggaggccgccaagagcgccgctagggggtgccgcggagctccggggacgcccagggtcggaaccggccgcgcccattccgtacgacccaacacagagccatgcccatcgggaccaccaccaacacaaacatcacgagaccgggcagcgacaagaccagcccccccacacatagcggccacacagccgcacaagcggacacccggcccggtcaacatccaccggcgacgagcatca

SEQ ID NO: 126714 - DNA, 520 bp, Arabidopsis thaliana columbia
ggaccaaaggctgaagctccaccgggggggcggccgttttaaacctagtggatcccccgggctgcaggaattcgcggccgccacaaatgttacaaagtttgacctgacattaaaattaaattacacaaaggccccccccccccacgacatcagaccatcctccacctaatcaaccattaccattctaagaattcatacccactcgccaaaaaactataccacaaacgaaaacaacggagacaattgaagaggaaaaaagaaagatatgacatgataaaaaaaaagaagaaacagcagactgaataaaaatgaacgagaggactaaagcccggacaaataaactctacaaatcactactaaaccaccaccaaaactgacttctctaaccttttaacatcttaatttacacaccccctgatatcttcaagcctcatcgtttctcgtctatggctcatctttttctgtacacatgaggaacaccaggaggcggatgttacaagtgttttttggagcggtatgt

SEQ ID NO: 126715 - DNA, 543 bp, Arabidopsis thaliana columbia
cagcttcaaattcaccctcaattaagggaaccaaagctggaagctcaaccgggtggggggccctttagaactaatggattccccgggcttgaagaatttcccggccgttttttcaaaagccattattggttaagggtccagaattttacattgaaatcggcaaaaaggccaaaaatcttttggccaggaataaccaaggaaaccaaaaattaagggtaaccacttactcttcaactggggtggcaatcactacaacgggaccaaacaaaggaagctggtttttgggtgatgttgctacccaagtgaagaacaacaacttcactgctgatgtcaaagtttccactgattcttctcttttgaccactcttacctttgatgagcctgcccctggactgaaagttattgttcaggctaagttgcccgatcacaaatctggaaaggctgaggttcagtatttccatgactatgctggtatctctaccagcgttggattcacagctaccccgattgtcaacttctccggtgtggttggaaccaatggtt

SEQ ID NO: 126716 - DNA, 531 bp, Arabidopsis thaliana columbia
  unsure (1)..(531): unsure at all n locations
cnnnnnnnnnnnnnnnnnnnnnnnnnnnnnnnnnnnnnnnnnnnnnnnnnnnnnnnnnnnnnnnnnnnnnnnnnnnnnnnnnnnnnnnnnnnnnnnnncgcgggcggaaacaccccacactttaaaacacaccaattgacccacaattaatcaacacttatacaaggtttaacttattggcattacacacaacacaaacttatctttctttctttggttcaattgaattttaaatccatttttaaaaaggcttttcgggtggtggaggaatcaagtctggtactggaaaagcattctttattggttggaaccgggggtcttgggctgaacttgaccctgctaagctcatgtagcataaagacgaactcggtactcggaatctttctcgacaagcgaagtagctggtgagatctccgcatcgcttcccgggttgtaaaacgatgcaaccgacatcctgtttccttcttgttgagtcaccacacggtgcagcacactcttatacttcccgttggttatcacctcaagttggtc

SEQ ID NO: 126717 - DNA, 467 bp, Arabidopsis thaliana columbia
cggggggggacgctctagtttaaggggagccccgggcctggaagaattcgcgggcggcaacaacccacaatttaattacacacaaattggcccaaaattaaaccaacctaataccaggttttacttattggcatgacacaacaaaacaacctaatttgtcttccgcggatcaactggattcctaattccactttagaaaggtccttccgcttgtggtagaatcaagtccggtaacggcgaagcctttcttaatggtggcaaacgggggttcctgggcctgaaactggaccccggcttaaggctaaagtgatccatgaaggccgaacgtggggtactcgaaatctttctcgacaagcgaagtggctgttgagatctccgcatcgtttcccggttggaaaacgatgcaaccgacatcctgtttccttattgtggagccaccacacggtgcactacactctaatacttcc

SEQ ID NO: 126718 - DNA, 460 bp, Arabidopsis thaliana columbia
cagctctatacgactcactttagggaagctggtacgcctgcaggtaccgggtcccggaattccggggtcgaccacgcgtccggggactgatattatttatgttggactcaaaggatctgattgtaagctccgcgagaacctctcgagtcttgaagaaagtagtgagtgatggacgcatatgtatctatggctctcatgatggttatcaacgaatccctcaccgcaattttcttggcaagtcacgctgttgatcggattttccaaaagaaggtggctgagcatttgaataatttgattgaaaaaggtgtcattattgcttttaaacaatattctaaactgagggctgttacttctcatctagaccagggactcatttctgaagtgatgctatctgatatgagtcttcgaggaatacctggttgttggcagacaccatgcaacatctgacctgtgtggggaa

SEQ ID NO: 126719 - DNA, 517 bp, Arabidopsis thaliana columbia
caaaaccgcagctccacccgggggggatccctgtaaattacacaggatcccccgggttgaagaaattcgcggccgcattaaagtccatggttttattacatacggaggcgtcttctagtacttgtgaacacatatgtgtaacctcaggatgacctttaagcccaagtaggaggataaagcacaatgtagattaaggtttttcttctattgttattcaggacctgctaaagagattgcataagagattagataagctttaaggtccccatcctttgagaatggaagcttgacccacacgattaacaccgatatgtgaaagtgcccatcacgaagatctcaagaatgagtttggcacatttctttcaaagcctggaaagagcgagttgtgcaagtcttaacatgatgtaacaccttgtcttcctcccacataaagcctggaatgttctgaccccattggatgtaactaacagtgcctcttccagagtttggatataggtccggagagataaccacacct

SEQ ID NO: 126720 - DNA, 545 bp, Arabidopsis thaliana columbia
  unsure (1)..(545): unsure at all n locations
cnnnnnnnnnnnnnnnnnnnnnnnnnnnnnnnnnnnnnnnnnnnnnnnnnnnnnnnnnnnnnnnnnnnnnnnnnnnnnnnnnnnnnnnnnnnnnnnnnnncggccgcaaaggactctttagtgttaaaacttacaggtttcatggacatcttttggaaaaacaagctcaattaccttgacttccaatgaatcatgctttaaacttaaagcggatgggaatgaccattaccaccaccaactaacttaagaattgagggttacttttagatcactctattatgaacttcgtagcaacaaaatcaatcgggaagggtcacttcccaattttccaatgagtggtttgaccaattacccttttaatgggtcaaatatgaattccaaccttttggcttcaggttcttttctttaatcaaggtcctaatttttaaggcttcccgggaccggcctaatcctggaaacagaatccgattaaaaaattccaaccttccgacctgcaggcaaggttgcgtgggccgaatggttaatggcaccggcggcaccaggac

SEQ ID NO: 126721 - DNA, 288 bp, Arabidopsis thaliana columbia
agggagctcggctgtggccgaccgggcggcggcgtctatactacccgccccccgccctgtaagagtccggcggcgcacacaattttcgtcagctgtcgtcttagctatcaggtccgtctacaaagccctatgcaacagttgcgctatctgagaggctacagcattacactatgcacatatattttgttaaaagacaaatttaactcctgttaaatgagctcacgagaggaccattcgcacgtctacaccttcttgccatctatcacattgaattgaccctgatgcgta

SEQ ID NO: 126722 - DNA, 419 bp, Arabidopsis thaliana columbia
tccaacccacataagggaaggctgcgccgctgccgggtcccggtccggaatccccgggtacgaccaaggcttccgtgacctgagggatttttggacccctgaaaaaacgggattgtctggagcacggttcttctcactctaaatggaaaggtcctgggaacctgtttgggtttcaacgactttccttaagaccttgtatgaggtgaactgccttacaaatatttttatccactggacggccattgccttatactatataacgaggctggaagaccacttatatacgccctgagaaggtggaacagtgcattgccaggcctcatagtcaggataggcatatactaccggaccggcacactttgctgcgaagatataagcaaagttgttgccctaacttatgctaatattgtttataactt

SEQ ID NO: 126723 - DNA, 535 bp, Arabidopsis thaliana columbia
  unsure (1)..(535): unsure at all n locations
cccaccgggggggggggcccccaattccaaggggggcccgtgcccagaaaaaaaacggggccgcccaaacagaagccaagaaaaaggaagaggacacgagcaaggcccaaggcacacccgccacccgaaaacgcacacaaaaccgaccacaacaagaacgcgcaaaaaccccaggggacgcaaccttttttttcccgggggggcaagccaaagcgcccagagaccaacaagaaaccaaaacgccccccagaggagcggggacaagacccaacaagcgagacccccccccagaaaaaccagacagacacgcaccgaggacacccccgagaccacgggagcaacgcgaaggagggcacacccacaggcacggacaccgaaaaaggaaaaaagaaaggaaacccccgcaaaggcaagcaaggcccaaaaagccccagaacgcagagaagcaaggcaccacacacnaccaagcacgagcagcagacacaggcacacccccgaggcaacgccacgacagagccagaaccacccgcacccc

SEQ ID NO: 126724 - DNA, 535 bp, Arabidopsis thaliana columbia
  unsure (1)..(535): unsure at all n locations
ccccggcaaaccccgnnccggaaacccccggttaacccggggggcggggcacccaaaaagacnagaccaccggaccgagacaaacaaggggccacaggggaaccccaccgccaaaaccccgaaagcagggcccnccaaaaagcgagaaggggcaacaccgcggcaaacaacggggacagaaggacagaggacaacttttttctagagggggggaagcanaaaacaacgccccccaanaaacacaaaaaacaccccgaaaaaaacaggggggcggcccaaaggaaagactctctagagctcaagccaacccacaccaaagcgaaacggcccccaagggaaccccccaaaagggcaggcgcnccaagaggaccccgaaaagcggccaagaagccaaagccacaaaacccagccacatctcatggagcaaacagggaagaccgggcccagggcacaggcaaccgcaataaccccaacacaccactacaccaaaagaaccccgcgacaaaaacaaccaaatcacaacgccaaccccgaa

SEQ ID NO: 126725 - DNA, 423 bp, Arabidopsis thaliana columbia
cagggtacaataaccctcactagaggggacaaaagccggaggttcaccgcggtggggggcgctctagaactagtggattccccgggctggaagaattcgcgggcggttattacttttcaaaggtactagaggaagatttattctacccattaatttatggcccccagaccggagaaccgaccggccggttccccccaccaaaggtaaaaaggggaccaattaaaccatgttttattatttaaaatctggggtttttttaacccttaaaaccaggtaattattggttggttcttaaccagtggattcacaattcagaatgtgccggccaagggcctgggttggggagggaaacattcttaccccacaccaccgggaggatggaggccaggagaccggcccagaccacaccatgggtgggagtcc

SEQ ID NO: 126726 - DNA, 516 bp, Arabidopsis thaliana columbia
acgactcactttatggaaagctcggacgcctgcaggtaccggtccggaattcccgggtcgacccacgcgtcccggttattgttgggattcacggacgttctaccggtgcatttgacttccctggagcctatatgttattgccgggcactcccaaaataacgtggaaagtggattaaggaggaacaaaatggacagggttcagggcccagatgcttacatgtattaccaaggtgggaaacaaattctattaattagtggtcaacttacaccaaattaagccattaaccaacacctttaccgttttgatctttagaacaagaattggtccctttcttcatccaacggaaacctttcaaaactttgttgcttaacgcgaccgttggtggcaattggaaccatcccatatttcgttggagggccataccgttcacgccaataccaagggttttactctcttgaccagacccaaaaccaagtgaaactgcttactcctgttgaacaaggacccacttcttg

SEQ ID NO: 126727 - DNA, 520 bp, Arabidopsis thaliana columbia
  unsure (1)..(520): unsure at all n locations
cgccgcagccccccggcgcgggagtcccggttttgacacaggggccccgcgcaccataataaaatgggcccactacaacatcttataccccgctgaatgggccctgaaaaaacgtttcatccgaccctnccgcgggaagccgctagacaatctggggcactcggacactccttatccctgaggccaggcgggcaggattttttttttgcggggggaagaaccccagacatttgtgccaagggccctggggaggcgcgcctccggcatccctttaccacgctgcagcctccaccagagaatgcaaacacgacggcctcggaggtcaggccccaagaggagcggtgaagttactccacagagagctgagcttccctgcgcacaataggccagcaggcaagaggagggaggtccccaattccagtcctcaggtctcgcaccctggccaggactcggtacaagcatgcaggcccggcgtcttgcagtctctaacgggatgtgtgaggagactccgagagcgcag

SEQ ID NO: 126728 - DNA, 530 bp, Arabidopsis thaliana columbia
  unsure (1)..(530): unsure at all n locations
taaccccatttaagggaacaaaccctgaagctccaccggggggggggccgctgtaaaatatagtggatccccggggctgaaggaattcgcggccgccataaggcaaaaaaaaatcacggaagggaaaaactcgaaaacaatggtggatggtacaatacaacatactatggcatttggttatttattatatagatatatatatatccatgggagaacttttttttgcaactgtcaaccgccgncttaagctgctttctatgctttctttccttgccggaactcttcttcgatcttggccttaaggatagagtacatggcaactccagcaatggctattcctgttcctatacctgnctgngtcgatatcttgtttccgaagataacgatggagaaaccgatcacgaacacacgtttcagaacgtttccaaccgcgtgagtcagcggggcaaccctctccaaggtattggtagccagctgattgtagagatggtaaacattccaacccagaaagatcagagatgattttagtc

SEQ ID NO: 126729 - DNA, 582 bp, Arabidopsis thaliana columbia
  unsure (1)..(582): unsure at all n locations
agctccacacgcggnggcgggacgctctagtattagtaggatgccccggtctgcaagaaattcgcggccgcgttaaactctctgtaagactagtgacgttacatatgtcttgacgctgtaaacaaaaagacctcgagaaggctgacgggcctcggccggccacgggggcaagggctaacgcggagtcctcccgaaagggcttccctcgttacaaggtgaacccacttagaccttgcactcttctcccataaactacaatctccagtatagcttgtggatcacctctagtctgcaagcatttaccgggatttcccacgcccccattggatggtccctccgggaacacgcaacagcaccatcgggcggaacagtggaggtacgcgtgttttcaaccaaagcgctcgctttattgggatgcgcgcacaattggcaccaggtccagaacggtacctgtttccctgatgcaagcagactggatgcatgcgtcagtttgagagatgccagaatggcggatcgcgcgtccaacggcgatggaacgaacaaccgttgttgctctcaaagactgctcgaggttctaccagc

SEQ ID NO: 126730 - DNA, 497 bp, Arabidopsis thaliana columbia
  unsure (1)..(497): unsure at all n locations
cgggggcngcccggggggggggccccgcattacagggggggccccgggccggaagaaaccgagggccgccggcatccggacagaaaggagcccaaaaccggtcaagccgccacaccagaggcagaagcaacaggggaacccacaccacccggagaacgaaggcccccacacacaacggaagccagcacaatgctcctttaaggggggaacggccaacccacaggggggaaagagagcaaaacgaacggaacccaggggggaaagggaggcccgaaaggccaacagagggccccgcggagcgagagaaggaccagggcaaacgcaacgggccacagcagaacaaaaccaccacaaaacgcacacaagggggggccaccccaccaacaacaccaacagggccacagagagaccaccaaccgcgaggcgcaaaaacgccccccgcaaacggagccgacaccaggaagagggaacacaggagagcacgggggcgcgccaaa

SEQ ID NO: 126731 - DNA, 407 bp, Arabidopsis thaliana columbia
  unsure (1)..(407): unsure at all n locations
gggggcganctataaccagcggaggcaacgggcagaaagaaaacaccggccgcaaaggcacgggggacaacccagacacagaccaacgccacgacgcnacgagaagagacggcgcaccangagacagaccggaaaagagacccgccggcagcacgagggcgagacaacgacgaggggagcgacccatgtttttttttgccaggaggaggaagaacaccagcgaccaggagccatcaacaacaaagaagcaaggccagcagcgaagagacgcgggaggacacgccggaccgccaggcagaggcaagaaggaccagctgcagggaccgacgaagagggaaagcgcgacggagacaccacaccagccggcgcgaaacacggagcagcagacaccaagagaccaacagaca

SEQ ID NO: 126732 - DNA, 499 bp, Arabidopsis thaliana columbia
accgcgggggcggacgctctagtactagtggatccccctgtgctgcaagaatacgcggccgccgccaatgctcttcatatatatataacttaagagaccacactgggtctctctgtctctctcttttgcattatgtaggaactcaaaacacacaacagaaacaaacaaggtttttggagaaacttttttttaacgatttgaaactcaacaaagagagagagagggagataagacataacagaagctggagagcagcttatgtttctctgtggaggattgattgattaagcatcatcctcaccgagaagcgcgacgagcatcttctcgtaatctacacgagtgccttagggataactttctccaaaggaaggcggacctgcgctgggactactctccatgacctttaagaaaattcatttcttggggcacaatccaagtgagcggctcttcatcaagagcagtttggttaattgctaaccaataacatcgacaaagaaag

SEQ ID NO: 126733 - DNA, 469 bp, Arabidopsis thaliana columbia
  unsure (1)..(469): unsure at all n locations
gcctgcgggaccgggccggaatcccgggtttaccacgcgtccggttgcttaagcagactacggttcttgccaagggagtttttttgtgttttattggagaagtccaacacaaaaagccgttccaaaaagatcaccttccgaatagcctaaggctgaattttccccaaaaaccgaagaaacaccaatccctccactcgngggtccaggaacccaacctcctacccattgggagtaatccgaaaaacctcctgggaaccgaaagtaacctctttgaattcgaacccaggttccccaccaaaggaaacgaggacctttattcaaagaattgaccttaaccgaacaacgggtacaaccgaaaatcgggccaaggccccggtatttatcacctaaccaaccaggtttaacgggtccggggaacggatccgctaaaacaaaaccccaatgccacagcctaaggagaaatctgggc

SEQ ID NO: 126734 - DNA, 526 bp, Arabidopsis thaliana columbia
  unsure (1)..(526): unsure at all n locations
cccccgggcgaaaaataagaaaaaaaaaaaaatcccaataggacgacaacccacttaagggagaacaacgccgccccccggcgggggcgcgtttagacgggcgcccctcgcgcaaaaaataccgcccccgccaactacacaataatggggctacccatacacggctactggacatatcaggaggatacatctacacaattgtcctaattcggaacaacactacaanaccacactatttttaggagggggcctacaagagacacagcgtcaacgtaaatattgctgaccggggaaacccggcgacctgtcgcacccgagagctatgaggggggtgccaccaccttcaacgacctcaactactggcccctactctgttgatggaagaaaaacagacacatcaccacccccatgcggaccatcacctcctcgcccctcagcacaccgcgtagagggagatgacacaacatccggacacccaaagggccgaagacactactctaccagcacagctcccagagccccactt

SEQ ID NO: 126735 - DNA, 525 bp, Arabidopsis thaliana columbia
gggaaggctggtccgcctgcaggaaccggcccggatttcccggttcgacccacgcgtccggaagtccaggattttaagggaccaatttcaccatgtttctgcagcttttttggaccttgaaaaagggtatcaagaggctatcgaggaaattactagaagaatgggtgcagggatggccaagtttatctgccaagaggtagaaactgttgatgactacgatgaatactgccactatgttgctgggcttgttggtttaggtttgtcgaaactcttcctcgctgcaggatcagaggttttgacaccagattgggaggcgatttccaattcaatgggtttatttctacagaaaacaaacattatcagagattatcttgaggacattaatgagataccaaaatcccgcatgttttggcctcgcgagatttggggcaaatatgctgacaagcttgaggatttaaaatacgaggagaacacaaacaaatccgtacagtgcttaaatgaaatggttaccaatgcgttgatgca

SEQ ID NO: 126736 - DNA, 552 bp, Arabidopsis thaliana columbia
ttcagctctatacgactcactataggggaaagctggtacgccctggcagtaccgggccggaatttccgggtcggcccacgccgtcggccagagcttcttgaccctgggggcttggttaccagccttcctggattctttggttcccagctttttttttttttcttcttaatcttcctttattttggaatcaatccggaggaggaacctggagaacttttggttccgcctttggggccaaagcctttgccaaaatccttatgcctccgataaatccaaaggatcctttcttttccacgctcgcttctattgccgcgaattctccggaaaagcttctcaatcggccggttaacgctgatgtgccgccatatcttgacatctttgactcccctcagctcatgtcttctcctgcacaggttgaaagatcagtggcttataacgagcaccgaccgagaactcctccaccagacttgccatctatgcttcttgacgggagaattgtttacattggaatgcctcttgtgccggcagtgactgagctagttgtcgctgagc

SEQ ID NO: 126737 - DNA, 554 bp, Arabidopsis thaliana columbia
ccagcttctaatacgactcacttatagggaagctggtacgcctgcaggtaccggtccggaattcccgggtcgaaccacgccgtcggcttttaagggttacttggctgaatttattcgaactcttctttttggggttggtggcggtggctttggttttggttttggccagcttaaaatccaaggaagcctggaacccggttggcctggccgttgccgttggggttaacgccttggccttttcggtgggggtttccatagccgccaacatctccggcggacaccttaaccccgccgtgacactcggtctcgccgtcgggtggcaacatcacagtaataaccggtttcttttactggattgctcaatgccttggctccatcgtcgcgtgtctcctcctcgtcttcgttaccaatggcgagagcgtaccgactcatggagtagcggccggtttaggagctattgaaggagtagtgatggagaattgtggtgacctttgctctggtctacacagtctacgccacagcggctgatccaaagaaaggttcactcgggacca

SEQ ID NO: 126738 - DNA, 500 bp, Arabidopsis thaliana columbia
atgacgtcgcatgcaccccgtcctaagcctggatcctttagagccgcccgcctttttttttttttttttttttccagaaccaagaaaattggattaccccttatggggaaccttaagccaaatcccttcttacccctttaaaaagccttccttaaggatggaaaaccaaagcccaagggttttttttttaatttaaccgtacccaaaaccttatggagaactcatttcctcaatggctggctagttggaaagggtgggccttgtcttgcagtgtaccgagcaaactctcaaaactcttcttgaaggaatctactccttcgtcttccaactgttctcctactttgttccagtctattcccagcttctctagtgcactgtaaatcccttctgcttctgacacattcgcatctattgtcctcttcactattccatgatctgcgaatgcttccagggcttgatccggcatggttgatacagtgtcaggtccgatgagaggagcg

SEQ ID NO: 126739 - DNA, 533 bp, Arabidopsis thaliana columbia
tcacttaagggcacttttaaagaatcttaccttccattccccccttccttagcctggattcttttaaaccggccgccctttttttttttttttttttttttttttttttttttttttttttaaaacaaaaaaggcaggctttattaaagttttcagttttttcaccttcaaccttacttaaaaggtttttacaaagccaatgccttaaaaactacaaaggccttttttcgttaggaaacaacttaaaaggaactgccccaccttttttactacaactaaaagtcctaaactccaaaaaacatacaaacaacatttgaaacccaaattgttcttactaaaaccatccccgacaccaacccgatcgtgtttaggctgcctttgcaaacccgacctgttcgttaccaaagtcaaatacggggtggtatttgcccatgaacacatctcccaaaatccaaagaggtccacgaggtggaccaacgtcaaaagcaataaaaccactgatgcactgtgccacaggtccctcaccaactttc

SEQ ID NO: 126740 - DNA, 491 bp, Arabidopsis thaliana columbia
  unsure (1)..(491): unsure at all n locations
nnnnnnnnnnnnnnnnnnnnnnnnnnnnnnnnnnnnnnnnnnnnnnnnnnnnnnnnnnnnnnnnnnnnnnnncttttttttttttttttttttttgttttttttttttggttttaatgttttttttgttttttttatcccaacaattcccaaccaaagattttttttaccgggccctaatagagggctgtaaaaaacttttttttcacccagggaatttttcccccccttaccggcgaaaaacaaaccccccaccaggggtttgggattccccccaccctccattgcccgggaaagggaaggttgtggacttacccacccttttcaaaaaaggcgggattttttggtgaccccaaacaaaaaagaaacccggaacaaggacgggtttttagctttttaaattttaggccaataaaaagaatccgggccccttaatggtcccagcggaccgggtttttttttattaggtgtaccccggggtttacttttccc

SEQ ID NO: 126741 - DNA, 544 bp, Arabidopsis thaliana columbia
  unsure (1)..(544): unsure at all n locations
acgcgtacgtaagcttggatcctctagagcgtccgcccttttttttatttccttttatgtgaaataaagaatatacttccatcacgaagaggttcnggcttcatataatgcaacagaaaacaactcaaaaacactagaaagtaagatctcagatcttaaaattgctcaatatccctcgaaggggaacccctaccttgttcggagggatgcacctaacatgcgccccctcnncactgaggggcgcaccggagnnncacacccggattctaagaactatagaactcgagcaanncggccctcccggcaattaggagaataggacattgaccttttcttctccaacacaactcttagttgctttaggaaatctcgaaatgatcatggaacactgggtgaccaggtctcgaacgaagctctgtttgtgttcaactggatggaaattcttggaccctacacggacgacagaggatccctcttggggaaaaatgattcaggtaaacttccgtaggcccgggaaaaaatgtggctcctccggtcgcaccca

SEQ ID NO: 126742 - DNA, 514 bp, Arabidopsis thaliana columbia
ggaggtggatgcgccccttccgtaggctgggttcctttgagagcggcgcgccttttttttttttttttttaaaaaaaaaggggttaattaatggaattggaattataaaaaaaaagaaaccccttaaaaaaccttaagcccatacaaaaccccagcttggtttttcggcccattttgaacaaaatacaaatcccttatcctttgaaacgtgtgccacgtaagcaaactttccgaaccagtttggtgacctttcccaaccggccgggtaaccttaagggttcttggaacccgggccaaaccaacaaaaaattttctttcacaaaactttattatttggttcaaattatacacacgcttcccaaaaaacaattttattacgcgcttaaacttccccaacgcgccgggcaattcttggggcgtgggaatttttattaaggaaccgaaattattcgccctttgaaacgtgacccagcttactttcttattacaaacaagccccggagaccttattagg

SEQ ID NO: 126743 - DNA, 524 bp, Arabidopsis thaliana columbia
taggtcacctataaaaaatcttgacgtcgcatgcacgcgtacgtaagctgggatcctctagagcggccgcccttttttttttttttttttggtatagaacttacacttcatcttttattccaacaggcattagcccaaacatataaaccccaatattcttttacaattgaaatgcatcaagccgtcaacagatatacacccaatgacccaaactgaacaaaaacaaaaaaagttaaaacagaacagaagcaaatgagggagggagggagagagagagagagagagagagatacacatggtggatgattttcagcttattcccagttgcagactccaaagtttgttttatctactattaaggcaaatgatgatcctgctgaattatttttagaagatgtgaaggggcgagagatattacgtgaaactattgcacaccgcgatcaggcagtcgacttgaagttgccagattcaaatggttagaggattgaaaatttccatcctctaagagaatcaatacttatctc

SEQ ID NO: 126744 - DNA, 515 bp, Arabidopsis thaliana columbia
  unsure (1)..(515): unsure at all n locations
ctatagnagatcnatgacgtcgcatgcacgcgtacgtaagcttggatcctctagagcggccgcccttttttttttttttttttttttttttttttttttttttttttttttttttttttttaaaaaatcccttttcaaatttcagattaaggtggtggttattaaacccttaaccttttggccagaccaaaaaaggtggtttttttagacatttttttttttgtttaaaccagaagaagaaattaaccggttttagagccttaaccgggggtgaagcataccaatttttggttagcccatggggtacttttgaggccagtttttaacagaagccccggacttgggtttggcgggtttggacatgggggccaattttgggactaacggggcatttggatttggatccggttacagggaacatttttgaaggcaaccccttttcaaatggggggggggaggggtcccttgttcttttaaaatgtgaggggaaatggctcccttggtgtggaattagg

SEQ ID NO: 126745 - DNA, 507 bp, Arabidopsis thaliana columbia
cacgcgtacgtaagcttggatcctctagagcggccgccctttttttttttttttttttttgctttgggtcaacccgaacctggggattatatacaacaatgcaagaaaggagttccttggatttaggggactaactatcaagtagatatttttctaacttttcctttcgaacattgtagcaaaccgagtttcctcattacaatgtgtagccagcaccggatgcaacatagattacaattaatttaccctaaacaactgttccatgcttattatatgcagactttccttcaaacacccttttaaaagctggatctaaaagattctcttaactcctctcccccacctatgggttgacccacataaccacagatttagggcttttttccacccatttttggggaacatcattttctcttccaatccctgggctccccccaaacttcttttaagtgccttcaaaaagcgaggggcgctttaatacccccaaactgcagggagctgataccc

SEQ ID NO: 126746 - DNA, 495 bp, Arabidopsis thaliana columbia
  unsure (1)..(495): unsure at all n locations
nnnnnnnnnnnnnnnnnnnnnnnnnnnnnnnnnnnnnnnnnnnnnnnnnnnnnnnnnnnnnnnnnnnnnnnctttttttttttttttttttttttttttttttttttttangcacacattttaacccatattggatggacaacttacaagcctccatgaaacattgaaacccttagtttgcaaaaaacacagtcggggttattgcggttttacattacaagctttgttttttttaatggagatccaatattttacaaaccattgttcacttgtcgaaccctgccttaacagatctgcctttaattcaaattgaaatcaagaagaagatcgttttctttcacaatcaagactctaatcgaaattctttgaagggtttttaccagttatcccatcaacctgaaagacaagattatctccagaagatcgaatcccagaaatataccacgacttgaaaacgcccgacccggatcccttggagctccgggatcttacctg

SEQ ID NO: 126747 - DNA, 541 bp, Arabidopsis thaliana columbia
aagggaacttttaaagaactttaacgtccatgcgccccttccttaacctggatatcctttaaaccggccgccctttttttttttttttttttgagacaatggaccaccctaaaaaaggtcctcaaaggatgcaggaccttccacacaaaaaaagaagagggttaaaccatctcattcaggggctcaaatccgtttatatcctatgtcacaacagatattcacacagttcgcaatctgtctagaggagctatgtagatgggtcatagtattagggagattaaagctaaataaaaggcgaagggcaataagaagtaacctggagagatgtttttagagcctttattgcccattagcattgttcttctagagttcctcgttctcctgacgcagcgcatagatccttgactggagaatactgatcatagcttctgcactcatcatttcaagcttgaaagtttctctttcaacagacatctggtgaatctccttctggagatcattaaccttctcttcaggagatgcaagtggagtttgaggaggc

SEQ ID NO: 126748 - DNA, 411 bp, Arabidopsis thaliana columbia
  unsure (1)..(411): unsure at all n locations
gcctctaaagcagttcgccgcgcttttttttattctacctcaaaacagtggatggcaggaaggcggagcacgctgcttcctcatatgagggcgcctgagccaccaatgccaccgagatctcttccttttgaatgacacatcaaaggaacacacgctcggcgcggcttaaacaactcaaaaaacccaccagaggaaattttttttttagagggggggagaagcccagggagcccaagccgcggggccgggagaaaccagaacgccnagaaggggaagcaaacgggaacgaacccaggaagccgcgcggagcaccaacgccgacagggccagcgagccgcgagacgaagccccaacgaaaaggagacagcgccgccgcagagccgagggaaagagaacgaggacaagacaagg

SEQ ID NO: 126749 - DNA, 501 bp, Arabidopsis thaliana columbia
cacgcgtacgtaagcttggatcctctagagcgtccgccctttttttttattttttagaagaatgatttacttttcttttttgtcacaaatgtaacattatattaaacattcgatacaatacatagccaaaataaaggccttttaagagattacagaaagttgaggccctacctagagcctaccatagtaaccctgcttactgaagaagaaatatcaacttttgacccaatctgaaaccacgtgtcatcaagaggatataacctcaacacgtattagacaagtaatcggaagatttccgataacaacttttgccgttgagcaccgatcacggtgagagaatcagcgtcgataacaatcgaattgggattcttttggtaatcatcgaagttaaaccatcgaagctccaatataatttaacagcataagaatttccgaataagcggcggaaaattttttgtttctttaaccaaagacgccatctcttaataattcttgaaactt

SEQ ID NO: 126750 - DNA, 521 bp, Arabidopsis thaliana columbia
  unsure (1)..(521): unsure at all n locations
attgtannnnnnnnnnnnnnnnnnnnnnnnnnnnnnnnnnnnnnnnnnnnnnnnnnnnnnnnnnnnnnnnnnnnnnnnnnnctttttttttttttttttttttttattttaaatttttttaccttgaaaattagaaaaagaaattaaaaaaaaaaactccaaaattttttatttagggcttttccttaaagagtgaagctaatccggtgacagccttcacttctctctccaccgccacgtcatcatcgccgtcgtttggagaggaggaagaattaacaatcactctcggagataaacatttctcctcaaaaaccagctcaatctctacactatccacctncttctncgccgcagcctccgcccaccaccgaacattcgtctccctctccggctgcttaacgacggaggctcgtgtatagaagaaagccatttagatcgcatatactcagctttcctccacggaggaaaagggctttcctttcttcttcaaactctgtttcgccgcctccgatatcaaaaac

SEQ ID NO: 126751 - DNA, 522 bp, Arabidopsis thaliana columbia
tgacgtcgctatcgccccgtccgtaagctgggtatcctctaaagcggccgcccttttttttttttttttttttttttttttttttttttttttttttttttttaaaaacaacccgaattttttacctgtttttagaaaactttgaacaaaaaattttttggttttttcaaaaaaaccaatccctgaaactttggggctcaaatgccccctgaaaaacatcagtttttggcccttttttttttccgaaaacaaatcaaagaaaataaaaagttcttccctttaaaaaaaaacaaaactgttgtaatgaatttaaaggaagggggaagatcatttcttgggggggaacttggatttgaggggttaaacaacccctggaaaaatctgaaagggttgacccaaaattttttccggaaccgggggggttaaacccaaccaagttcccccaaaaaattgggttcccggaagctgacttttgaaagctgcaataacaaaagcggggacctcccctttgttcttttggaa

SEQ ID NO: 126752 - DNA, 476 bp, Arabidopsis thaliana columbia
ccgtaagctgggatcctctagagcgtccgcccttttttttattttttaattgaagaactgtagtatgtgattctttgtgctccttcattcaaaattcactgcgctttcatcctcaactcattggagggaaacaatttagataacttaaaaagcaacaaagaaactaaaacataaaaagacatcttcctccttctcaaggcggcaaaaagagaaagaaaaaaaaacgaaacggaaaactctataaaagcagacaaaggcaagaaactccttctgggtatattagaccaaatcaagggcgctgcttaagatccatgtatccaggatgcacagcacttggtccctattaataagctgacgacgttgattaaccatggtgtgggcaaggctatgaaaccgtactgggggtgatcacccaagcactgaattagcctggctaagatccgcccagaggatacataccatgatagtgccaaaag

SEQ ID NO: 126753 - DNA, 409 bp, Arabidopsis thaliana columbia
  unsure (1)..(409): unsure at all n locations
ccgcgtacgtaagcttggatcctctagagcgtccgcccttttttttatttttttgtctgaatcttgaaacatttatttttccaataataacccataagctgagatatctggccacagcaaagagaatgtgctaagttaaagactctacctaaaacataacggatacgggtggggcatatagcaccaacattcctccaacagggggtgaacaccagccacaaaacgatccaagacgcagaaatggcagcaacaacaaacgngacgncgccgcaagaagaacaaccaacagcgcccactagaagagaagccaaaaaccgcccccaccaaaagagccagcaggccnacagaaaaaccgacacccgaaaacacccaaaagactggaaagcgcctgttacccaaacccatagac

SEQ ID NO: 126754 - DNA, 498 bp, Arabidopsis thaliana columbia
  unsure (1)..(498): unsure at all n locations
ccccgcccgtaggcngggaccctccagagcttccgccctttttttatttttttgtctagaatatagagttatttatttccgcggtgacagtccataagctgagatacctggccacagctcaggcaacgggtcaagcggaagacggtgcctcgcgcatcaggggttgggggggggcagacgtaggaggtttttttttatggggaggggcaggacccccaggaggacggaggagcgaggagcggcgcgcccaggagcccgggggcgcccaaagacgaagaaaaggcagggcccccgagcccggacagaagaaagcgcgcgggaggcccggagcgaaggcgggacagccgcaaggcgaacccggcgcgcggagaggggcgcccgggagcaaagggcgcgcggcagaagccagaagagcgcgcggagcgcagacggagaagcggccggcgcggaagggacccagggccgcgaggggaggggcgaaaacacgcgagcgcaagc

SEQ ID NO: 126755 - DNA, 390 bp, Arabidopsis thaliana columbia
aaaaaaaaggagaagggggaagaggggccccacggccgaagaccccccccagggagggcagagagacacacaaacacacagcagaggagcgccaaacagagccggacggacacagagaagagaaagcgagttttttttttggggggggggaaccacacagacccgaccggcgaaggaaaccccccgccccaagaggcgcggagagaccccacgaaaaggggcgagccggggcaaccaaacccaaggggggaggggacaacaccacgaccccccccacaagagagccccaaccacagaaccaccgagaacccaaagcggcgccaaacaggggcgcgggaggagagggaaagcaggaaccaaaaaacacaagagacgcggacggagacccgc

SEQ ID NO: 126756 - DNA, 466 bp, Arabidopsis thaliana columbia
  unsure (1)..(466): unsure at all n locations
cgcacgtaagctnggatcctctagagcggtcgccctttttttttttttttaatcagacatttgacaatccgatagaaagagactcataaagagaagacgaacacacacaataaggaaatgaaatgaccagagataattcataagaatgctccagagaagaaaataacgctccggtgaagctcgggggcttcgtggttttgaagcgtgacgcaaaggacgagacgggaggggcccaaacccacgaaccgaacgaaggggcccgggcaccccttatagcatgctccaacttcattcaacactaaaccggagagggtgcatccgaaacaaaggaagcttccacatggcccagaaccgtccctctaaataaccgggagggggtccgcgctcaacggacacaaaagcgcgctgtaacccgaaaaaaacacaggcacccccttgccgcggacaaagaagcaactagtttaaa

SEQ ID NO: 126757 - DNA, 528 bp, Arabidopsis thaliana columbia
  unsure (1)..(528): unsure at all n locations
attgtannnnnnnnnnnnnnnnnnnnnnnnnnnnnnnnnnnnnnnnnnnnnnnnnnnnnnnnnnnnnnnnnnnnnnnnnnctttttttttttttttcttgcaatgttgttgtaccattggaaggctttttttcttgggtgacaaaaacttttaacttgaggtttaagttgtagattgggttaaagattatagatgctatcggaagcaacatgttaagatcttggaatgtcctaaccgcaaacacaagctgcactctcttgggagatttgagtcggtttttgctcgctagttctttcaaaatgcttagaaatggtgtgatcccaattcctcccgccacaagaaacagattatcatacctgagaaaatctaccgaggcaggtccataaggaccttccactcttacgattatgttgttaatcttattttcacaatttgccgcttcttctattttgttataaacagaatttgtccaatctccctcacatttcatcataatagacaatgagtgtttgtctacactcgagcttg

SEQ ID NO: 126758 - DNA, 505 bp, Arabidopsis thaliana columbia
  unsure (1)..(505): unsure at all n locations
acgtcgcatgcacgcgtacgtaagcttgaatcctctagagccgtcgccctttttttttttttttttttttaaaaanattttttttttttttgacctccccttataaaaaaattttaacctttaaaaagggataccctccttcaaacccctttaatgggggggggggccaaacataaactaagccggccgcccccgtggggggatttttttttcccgagggcccaattttcttagccccttttttttttttccccccccccccggttccctaaagggtcttttaaaaccggcgtaagcgccaaacttttaaaatccccaaaccccaacccttttttcttgagagaacctcccccccttaacaatcaaaagaaaaaaacgtttagcgtcccgcaaaccttcaattccaaaagaaaagtcttggaattttcattccttgcccaaaattttcccggaagattatctcggcnctttttgtctttgttcaaccgtccctaacctccataaa

SEQ ID NO: 126759 - DNA, 492 bp, Arabidopsis thaliana columbia
cgtcgcatgccccccttccttagcctggattcttttaaaccggccgcctttttttttttttttttttttcaaaaaagccaacctttttaccaaataatggttttaaccttcttcgggccaattccaggattccaaaaccttcccaacctcctaaaagttttttttttccggattcaaccattaaatttttccttgggaaagtacccaccggaaaaaaaagggaaaatgaaaatgggcggttttgtttccaaaccaaatttccaagattccagtaaaattttgggttcccgatgatccatcatcctaatcacgataaaccaaaccgcacacagaagtaagggaagtccctttgagcagccttgtggttaaaattctaattcagctttagactggccagctcgtgaggaaagaatgattcctacaataagcccgtaaagagcaagcgcttctgcgaaaataaggataagaatcatcccaacaaagagcttaggc

SEQ ID NO: 126760 - DNA, 490 bp, Arabidopsis thaliana columbia
  unsure (1)..(490): unsure at all n locations
cccccttccttagcctggattcttttaaagcggccgcccttttttttttttttttttttttttttttttttttttaagccccacaaccccttaaccccggagggataagtttggtcccatataaagggttaattggcccaaccccttaattaaagccttttaaaaaaaaaaagggggccaccaaaacaaagggatttggaaaacaaaaaagtcaaaagccaatttttttggggttaaacgtcacaaatccccaaagaaaacgactcattggcttggctctatctgggccttccttttttctttgacaaaaaaaacgacaggacccacgacggaaaaaaccctgaaacagatggaggcaatatttagggacccgtggcggccactgatagcctgaacgctaaaaaaattgttttttttggcatcgngggtgctctgtccataggcaacttcatggccaatggcttcaaccgcgtaggcacaaacgaagtag

SEQ ID NO: 126761 - DNA, 485 bp, Arabidopsis thaliana columbia
  unsure (1)..(485): unsure at all n locations
nnnnnnnnnnnnnnnnnnnnnnnnnnnnnnnnnnnnnnnnnnnnnnnnnnnnnnnnnnnnnnnnnnnnnnnnctttttttttttttttttttttttttttttttttttttaagcacacaaacgcatcaccaccgtaggattagttttgttccatatcaatggcttaattgtccaaacccattaattaaagcctttaagaaagaagaagtgtgcaacaagacaaaaggaattggtaaacaagaaagttcaaagtcaactttttttgggttcaacgtcacaaatacccaaaggaaacgactcatttgctttgctctatcttggccttcctcttctcattgacaaagaagacgacaagagccccgacggaaaaaacactgaaacagattgaggcaatatttaaggacccctggcggccactgataacctgaacgctgaaaaaaattgttttttttgcatcggcggtgcttttgtcataggccacttta

SEQ ID NO: 126762 - DNA, 421 bp, Arabidopsis thaliana columbia
  unsure (1)..(421): unsure at all n locations
cactatagaaaaagttatgacgtcgcatgcacgcgtacgtaagcttggatcctctagagcggccgcccttttttttttttttttttttagacaagggagcatcctaaaaaaggtgctcaacagatgccagaccatccacaccaaaaacgagaagggataaaacactcaactcaggggctccactccgttatatcctatgttacaacagagattcacacagatctaaatctgtctacaggagttatgtacatgggttataggattagggagattaaagctcaataaaatgctatgggcaataagaagtagcctggagatatttttttagagccaatattgtccattaccnttgttgttcgagatttactagatctcctgacacaccgcatcgatccttgactggagaatactgaccatagtt

SEQ ID NO: 126763 - DNA, 455 bp, Arabidopsis thaliana columbia
cccgtacgtaagctgggatcctctagagcgtccgccctttttttaaatccttttttttgaaaattttttttttttttttttttttttttttttttttatttaaaaccggaatggccccttttcattaaatatcaaaagggaccaaaaagggcgggccataacaaagtcaaaacaccggcccacaaaatttgtggttcttgaggctggaaaaaaaaaaaaaccccgaccccaggaacccagacaacccgggaagcgggccccacccacaaacctgggggaaggcaacaagggcacagcgcgggacaaaaacagggaccggcccaacagggaggggcccccccaccagggggcaaaaaaaaacaagggcgacaacaagggggcacaaaagcggcaccccccggagaccaaaaccacacgggacaagcggggaggccccccaaaacaaacccccccag

SEQ ID NO: 126764 - DNA, 526 bp, Arabidopsis thaliana columbia
  unsure (1)..(526): unsure at all n locations
nnnnnnnnnnnnnnnnnnnnnnnnnnnnnnnnnnnnnnnnnnnnnnnnnnnnnnnnnnnnnnnnnnnngccttttttttttttttttttttttttaagaaattctggttataccaaaggggccaaattttctttaaaataacgaccgtgcattattacatgacacctattgaagcttagagcccccccattaagaggaagagaaggtgtcgattatgggggggggaagtgggtcactaaggggagtcgcccaattggtgaatggtgctttaccgggtgcagccggctgaaccggaaaacccaagaacccaaccatgggttaaccaacctggttgatcttaacttgctgaagctgagccttctttttcggatcaaacgcttattcttacgggtcaaagaacttggcttctggataccaacgctttttcgaattcaagttaacggtttggtggaacctaatggagccgaacccttaccctttgaaccattttaatggccaaaataaaaaccggcatgggtggccttaa

SEQ ID NO: 126765 - DNA, 389 bp, Arabidopsis thaliana columbia
  unsure (1)..(389): unsure at all n locations
gtacgtaagctgggatcctctagagcggtcgcccttttttttattttttgaacaaagtttgagaagcttacactaaaaccaaataaaaaaatctagagctgcggtagtttcatttcatcatccataatccggtcagattttcatcacatctattgaaacaaagaccgacatatttgctatcgccttggctccttttgagagggaccagaaaagcagagacancaaaaccagaacccgcgggcaaaaaaccaggggggacgagccgcagaccccaaaaggaaaagcgccacggaagaggcaggcgacgacgcccacacccgacggaacggccccaggccagacccggcgcccacagacaaaaaagcaagcgaccaaagaagggggggaag

SEQ ID NO: 126766 - DNA, 537 bp, Arabidopsis thaliana columbia
agggaacactataaaagaatctatgacgtcgcatgcacgcgtccgtaagctgggatcctctaaagcggccgccctttttttttttttttttggcttagggtgagatgtttattttgattccaatcttgttcacactttataagcagcgaccacaaaacaacatatatcaaaaatcaaattatgctagtacacacacattcacacggcatttaaggttgtaaagccacttacaaaataaccaaaaaacaaaacaataaaaaactgagaaagaacaaattaatcaattattgcgttagggttttggagttgggaaaaccccagtgtactcaaacgaatccctaccataaggatcaccagatgcttcctcgtatgttgctgaatcggcgttagggtttaatccaacaagccgcaatatgctctcaagttcttgcaccacctcactcattgttggcctattaactccctctggctccacgcattgtagagccacatctacatacttctcgaaccctttcaaattcccgctgttttggataa

SEQ ID NO: 126767 - DNA, 538 bp, Arabidopsis thaliana columbia
  unsure (1)..(538): unsure at all n locations
nnnnnnnnnnnnnnnnnnnnnnnnnnnnnnnnnnnnnnnnnnnnnnnnnnnnnnnnnnnnnnnnnnnnnngcctttttttttttttttttttttttaaaacgtgaatgtggttgaaggacttaaccaagggaaaactttttcctttgaaatcaagactttaatccttccttcaagaaaaagaaggcaaggctaagaattttaaaccagggggtcccattggggaactttttttggggagaaccttccaattaccttgggatcaagaaagtaaagaacttcttcaaaattaacccattttggggtcctaaaagggatgcaaggaggaccttggggaaagccaaaatgcctttaacaattaaacggggccaaaattgaccatttttttttccaagggccaaccgaattggcccctgtcccggcttttggggtggacggatgccaaccaatccttaacctaagagcaccaatgctccattgttttgacggcaagcttagatgggtcatcgctgggacgtggctttagctcccagaagagcc

SEQ ID NO: 126768 - DNA, 502 bp, Arabidopsis thaliana columbia
gacgtcgcatgcacccctacctaagcttggatcctctagagcgggcggccctttttttttttttttttttgattcaacaataattagttttaacaaccttaccaataaaatatttaatccttgtcaagccttactttaattctaacgtccaagaaaaggatcctagcttatgaattccaagcggggggttcccatttgggaacttttttcaggaagaaccttcccattacctttgaatccaaaatcttaataagccccccccaagtaaccactttttggagctccaaaccgaattgaaattccacccttgtaagaccttaaagccttaccaatcaaccggtgcccaaagtcacccgtttaatttaatagggccaattcaattagcccctgtccccccatttccgaagaacgcattccatgcattccttaacctaaaagcaccagtgctacatttttttggcgccaaactggattcggccttgattagcacttgtattaacct

SEQ ID NO: 126769 - DNA, 496 bp, Arabidopsis thaliana columbia
cgcgtacgtaagcttggatcctctagagcggtcgcccttttttttttttctttttttttggttaacaaaaaatttgggaggcacgcaacgtcaacaagagaataggactctcgggcgaaggagaataaggtgtcactattaccgaaaaagaaaaagcggggaacaccccgacaaagaagcccacacagctgctaaatatacaggagcacaaaaaaccccaggaggaggcggcaaaaagccgaaaacgccccaccaacaagggagggaagaacaagacagaaacaccaaaccccaccagacggcacagagggtaccacgaaaacacccacaagaagggcaggagaccaccaaggcgtgaggcccaccacccgaaagcgccggagagaaaaccggaaaaccgggaaaccaaaaaacggccgcccgcgagaaagagaccaacccaccacaacaaccccccggcgcgccaaaaagctaaacgggaagaagcgacaaccaa

SEQ ID NO: 126770 - DNA, 505 bp, Arabidopsis thaliana columbia
gacggcgcatgcaccccttccttagcctggattcttttaaagcggccgccttttttttttttttttcttaattaagttaaggacctggaaactttaaattctaaacctttttttgggtggcaccatttccaaaggagtaaccatgttaatggtaaacataccatattagtaagcattaatgtttaaggcatccatcaggtagtaaatgatccattggcgtaaagagggaataaacggtgaatcaccataccggttgattcagcgacattggttggatcttctatatattcctccggtaatctccaatcataccgatgcactaagttagccaaagtcacctcaatcaagatcacagcgaatgatattgctggacaaatccttctccctgctccaaatggaatcagctcaatattgtgacctcggaaatcaacagacgaatctaaatgtctctccggtctaaactcctccgcgtctggtccccacgtcgcagcctctctcccgatcg

SEQ ID NO: 126771 - DNA, 483 bp, Arabidopsis thaliana columbia
cgcgtacgtaagcttggatcctctagagcggtcgccctttttttatattcttttttatggcaaataaagtagtctctaagggcggacccatgaacctaactatagaaactgatgaacacaaatctaccatgctcggaactaacaccacaaaggggaacctcacaaaaggaacaaaggacataaaattttctaatgttgaggtgcaaaagaaccgcgacggaaaggggaacaccattccatactgcttaatcgggcccaacaagctttcccagaacaattttacataaaccactaacgaggaacaggggaaacatatacagaaccccgacccaaaggaccaggtttgaagaactggcccaacaagaaacaaaaaagggtggggtccgaaaacccctcttaagggacatgctgcaaacaaacccttggggtttcaattgccgcctaaacgagcttagaataaaaacaaccaaaatgggcccctct

SEQ ID NO: 126772 - DNA, 551 bp, Arabidopsis thaliana columbia
  unsure (1)..(551): unsure at all n locations
cgtaagctgggatcctctagagctttcgcccttggtttaaatcctctttttaaagataagggcgggaatcagagagactttcctataaagcttgattcaaagccaattatgagagagaaactccacactccccaaaacaagatactacatctcctttggccgggaggaaacaaaaaaaaccctccctcctactagaggggggagggggaacgcacacggccacaaggggagaaacacccgccccgcaacacacccggccacagacaccaggaacgacagccggcaccaaagagaaaacagcagnggaccagcgacaaaagagagcccgaggaaagaaaaacaacacgacccacagcgaggcacaccccaaaacgagaagagccgccagaaggcgaagcccgcaagccacaggacaaaaaaccgcaagaccaccaaagccacccaaggacaggagccgaagaacgggaccagcgggcgagaacagaagacagaccgaagaagcngaggggcgcagcggcgaagcccgcgcgacgcccgagagaacgagaaag

SEQ ID NO: 126773 - DNA, 492 bp, Arabidopsis thaliana columbia
ccgcgaacttaagcggggatcctctagagctttcgccctttttttatttctttttaaagattggaacaaatctataatgacgtaacatattacagggtgttattaacacattttcgtgtggacaagtaacagatatgtctatctatacagacttattgttgagactggtccacacaacacgcggaagatcccctcctgtttagggggggggggagaaacccgccacccaaaacacacccgccgcgagccaaacagcccccggcggggaaaacagccggccaccacgaccccaaaagggccacagcacccagcaccgggccaagaaaccggcgacccccaccaccagccggaacggaaacagcgaaccacaaaaacccagacaagagccacgaccgggagggaggaccgggcccaagggcagaccgacgagacccccccaaaaaaccgaaaccccacccaccgaggaaccaggcaaccccggagagcacagcg

SEQ ID NO: 126774 - DNA, 269 bp, Arabidopsis thaliana columbia
aaaaaacgacgaagcacccagaaaggggaccaacagagaacaacgaagcggccccaaaaccagaaacaagcgcacggaagacaaaggcaagcgcggcgcacacaaaaagacgaaagaccaagagcagaaccggggcatttttttttttctaagggggcgaaacaaaagaagaaacagaccggaaaaccaaaagaggggggccacgaacccacccaacacaaagggaacaccaaggaaagcgggagcacaggaccgacccggaaaacccc

SEQ ID NO: 126775 - DNA, 441 bp, Arabidopsis thaliana columbia
  unsure (1)..(441): unsure at all n locations
cctaaagcgttcgccccttggttttattcttgttagacggggggcccttccttaggaaggggcccccgggaccccgggtctacccgcccttaccagaatcagcctcatcccactaacccgttggggcctgcacgcataccccacccccgggggtccgggggggccaaaatttcctctttggaagggggggcgcaacggccgcgggcaaccgggaagaaggaagggagacggtgcggagcggcgcccgcgcgggggcacacaagacagccgcgcagaggggaaccaaaagagagacgccgcaacaaacgccnccgcggaacgaaagagcccaaaggccgggcggcaagaagccagagcggggcgacgcccgcgcggggcgacaaaaccccaacgcgaggcgcacacagcacacgggaaggacaccgggaggccgggggcaga

SEQ ID NO: 126776 - DNA, 335 bp, Arabidopsis thaliana columbia
  unsure (1)..(335): unsure at all n locations
nnnnnnnnnnnnnnnnnnnnnnnnnnnnnnnnnnnnnnnnnnnnnnnnnnnnnnnnnnnnnnnnncttttttttttttttttttttgatacacctagggccggtggatagatccttgaaagaagattctttgcatcatctgatgtttacggaacatatgaacgcccgcactaaggtccttatatgataattacatccgtggcttgatggctctggttcttttatgaagacgatctatggaggtgcacttagagaggagaaatatgtaatatctattactacgacacggtcatggaaatacaaatgcaaatgaggattttctgctggaagtgacac

SEQ ID NO: 126777 - DNA, 361 bp, Arabidopsis thaliana columbia
cgtaagctgggatcctctagagcgtccgcccttttttttatttttttttttgatacacctaaagaaggcagagggatccttgaaagaagatcatatacattattttatgtgttgtgtacatattaacgcccgaccaaaggcccttagaaaataaggacataggtgagttgctggccaaaaatttttttttaagaggaggcaaggaggcgaaaagagagaggaggaaaaggaaacgcccaccgggagggaccgagaaagggagacccaaacccacagagggagaacaccgcggaaaagagacagaaagcgacccggaacggagcggcggcgagagggacgcgagagaaacaaaaagcaccgg

SEQ ID NO: 126778 - DNA, 471 bp, Arabidopsis thaliana columbia
  unsure (1)..(471): unsure at all n locations
gccgcgtacgtaagcttggatcctctagagcggccgcccttttttttttttttttttttgaaatggaaacgaaaattttattagttacaagattgataaagacaaatcttatacagcttgaactaacggagtattaggctttcttgcttacatgataaccatatccattatatggtggtacataacccatagttattgctccaaacaatgagggatttgttggatcaccgttccctantcgggcgatgtgagattgagccttttgaagtcttcttgtgtgtctttctncgtctgtgtctgcccatttgacaactaaaggaacagttgaaccctccattttatgttttccgttgatagattccatggcggaaacagcttgttcttttgtctcatacttcagaaaagcacagcctttgcttcgttgttgagcacctcttaaaatctggaaatcctttatgggccccgtccttg

SEQ ID NO: 126779 - DNA, 489 bp, Arabidopsis thaliana columbia
gtcgcatgccccccttccttagcctggatatcttttaaaccggccgccttttttttttttttttttttggaaagggaaccaaaattttatttatgtccagaatggataagaacaaatcttatccagctgagacctaacggattataaggctttttggctaacataatacccatatcatttatttgggggtacataaccaatagttattgctccaaacaatgaggaattggttgaaacaccgttccctagtcggccaatgtgatatggagcctttagaagccttctagagtgtctttctcgtctctgtgtctgcccattagacaactaaaggaactgtggacccctccattttatgttttccgttaatagatgccatggcggaaacagcttgatcttttgtctcatactacagagatgcacactctttgctcatttgtagaacacctcttagaatctgtagatcctttatggccccgtacttggagataa

SEQ ID NO: 126780 - DNA, 443 bp, Arabidopsis thaliana columbia
ccccccgcgggcgggcggggggggggggcgagcgagagagcgcaaccccggaagcgaagagggagccccgacggaggcgaaggggcggaccggggaaagacaacacagggggggccccaagggggttccctccttttgggggggaccaccaggcagccccgggagacagaaaacaaatgagcccgccgagcacgaacaagcgcgggggaccgcaagacggagcgagagaaggaccagagggagggaagagggggccaaacagaagaaagagggagcccaacaccgcccacacacaacaagccggggggcgaacggggcggggcccgggacgccggcccaccgggagggcgacacgccaacgggcgcaagcaccgaaggaacagagcccggaggggggggggggccaccaggggggggagaaggccggaaagacgacgagggaa

SEQ ID NO: 126781 - DNA, 495 bp, Arabidopsis thaliana columbia
cacgcgcacgtaagctgggatcctctagagctttcgccctttttttattttttttttattgaatgttgactaggtgatttgggtggacagcaaaacaagctggttataatcgagggtttgagacagaatggtgcacatataaattcttggggatgaaaaaataatgttaaattccggcagcccgtgcgggccgttttgtctatttaagagggggcggcacgagcgacaggggaaaggacaagcaaaggcggagcacaaggaggagcgcgccccccacaagagagaggaaacgaaccgcgcggggacaaggcagacaggcagggaggcagaaaggaggcggaggacgaggagagacccggccaccggaggagggacagaagaggaccgggggcgggcacggcggagagccagacggacgacgaacgacccagggccagcccgcgagagcgccacaaggcgaggcgaaggagggagcgcgaccggccacaaaagaag

SEQ ID NO: 126782 - DNA, 492 bp, Arabidopsis thaliana columbia
  unsure (1)..(492): unsure at all n locations
gacgtcgcatgcacgcgtacgtaagctttnatcctctagagccggcggcctttttttttttttttttttagtgaaatccattaaggccgataataattataacggtcaaaccgattccatatggaattggtaaaaccccgcagaagacccagaaaaaaagggaacgatttcatggatttaccataatcaagaaaaaggtcgggttattcttaatacttgaaagaagccatgaaggctccttttttttggtgcccacgaacccggtcctgatccccccataaggaaaaacggaacaccaccttcttggtttttattgccagaaataaaaaaaatactcccgggctaaataataccattgttccaataaggagcgaatagactttttcgacggattggacaagaacctgggtctttgtgagaggcattacagtttataaagaaaaccattcgaaggttcaaggacttttcaggtttgttttgttgaataaaatc

SEQ ID NO: 126783 - DNA, 381 bp, Arabidopsis thaliana columbia
cccctacctagcctggacccctaaagacggtcgcccttttttaattcctttttttccgccaacggggcactttggagcgaaaaaacaaaagccgaaccccttggaaccataaaaaaagccgggcgcttatacaacaaagggggagggggcccccacaccacaaaggccgaacggccgcattttctcctttaagggggggaaaaaaaaggaatcccgaaccaaggtttttcccttgaaaaaaggaaaccccaaggggaaaacccttattgggcgcggccaggaaaacccttccttggaacagaaaccaggaccgcccccaaaaaacaaggggggggaccccgaatgcccggaaaaaccatgcccgaacaaatgcggcccaaa

SEQ ID NO: 126784 - DNA, 519 bp, Arabidopsis thaliana columbia
  unsure (1)..(519): unsure at all n locations
nnnnnnnnnnnnnnnnnnnnnnnnnnnnnnnnnnnnnnnnnnnnnnnnnnnnnnnnnnnnnnnnnnnnnnnncttttttttttttttttttttagcaaaaaaaagccgaactatatatttgtggaactacataacacaatcatctcggaagatatgatgggccagatgctcatttcacacttgagtgagtaaacgacacagatgcgtatgacgtcattggtcaaaagcacagttcaacgtccgaatgcgactgcgttacaaacgaccaatattgatattcaatagggatacacgactgttcgaagcttaacagacaggagagggaagcatttgcttgatggtgaacgtatgctcttatggtcgtggtgctgacctaccgcctcaccagactctatcgcgatcaatgccgccatggcttgagcttgagcatactgatcatgatgacctggcaacgtctccgtgatcttcatgattattggattcttcctcctccatcagtgtgcatgattctgcgaacta

SEQ ID NO: 126785 - DNA, 479 bp, Arabidopsis thaliana columbia
cttgacgtcgcatgcaccccttccttagcctggatcctttagagcgggcggcctttttttttttttttagtcctaaaaaccaaactttcaaaaattttggtggggattaaccaccaaacggattccttccccccaaaggtaccggttttgggtttagaaggacaacggcaaacctttattccggaaataaaatcaaggtggctttcctgaatctgtccttcgggggcttccgggcctcttttcctgactggggatggttcccaaaagcttccttttgttttccaaagcttctgttaccggggcgctggggccctgttctactttgattaaggccggaagcaggtgtgtgttgtggatatgttctcttttgccgtttgaatttgttgccatcttgttgggctgtagtttctgatgaagcttctctgtaatttcttttccgcggccctctggatggatcgatggatgtagtctgtgactca

SEQ ID NO: 126786 - DNA, 487 bp, Arabidopsis thaliana columbia
ttgacgtcgcatgcacgcgtccgtaagctgggatcctctagagcggccgccctttttttttttttttgatttggcaatgagctttttttttttttgtgatttcaagcataagacttacgtaaaaggaacctcgtaattggaaagaatcacactgatcaaggtggggaatcatcggcattaacaaatctttagctttgttttgttaacacaaacgtgcaaaaggctcgaggcgggaccatgtaatcggaaagctcgttgaccttcttttgcagactcaaatgacttgtgaaggtcttgcactagtttaccaactccctgagttaccgagctttcagagagtaaaagaatctgatgatgatgacgctacaacagtctatgacgagcggcgtcattgagccgttttacctgccacccggttttccacaaatgctgaattacggccactgaggactcctccacacagatcttatgtgtcattaccgggctg

SEQ ID NO: 126787 - DNA, 506 bp, Arabidopsis thaliana columbia
  unsure (1)..(506): unsure at all n locations
ctatagnagagcttgacgtcgcatgcacgcgtacgttagcttgggatccctttgagggggcggccttttttttttttttttaaggccaaggccaacttttgggtaaaggctcaaaatttaccattaatttacctttttcctaccttccaacccccctccttggagacctagaggacttcaaggggcattaaccgcctagattaggatccattttaggacttcttcacagctgaccactttttatagtggcttcatcccaaataaatatgattctcttcattcttaagtcccttcaaaattcaaacacagtcccagattcaaattaccagtttttgcttccttagtttggtccgagtctgttaggttcatgtctagctcaacagctttaggtaatggagattcagtgtcgaattcttcagtctcttcaatttcagaatccttagaaatcactttttctctatgctcaagcatcgcaattggagcgtatctgaatcttcgcttaggcg

SEQ ID NO: 126788 - DNA, 449 bp, Arabidopsis thaliana columbia
gtgacactatagaaagatcttgacgtcgcatgcacgcgtacgtaagcttggatcctctagagcggccgccctttttttttttgttgataaataaacaacatgcgatacattatgagagaccacaaataagtccacatccagaatcgttaatatactctcaatttatacatgcgaaccggttgaatagaaccgaccccactctgacagctcctaaggactccgagcttctaaagcctaaaaagaagaactactgagtcgacgtgacacctatggcacggatctataggagttgatgcttgccaagcagatggctctgaattctctgcatgccttcttctctcatatgggctagatgaccactaacatctctgagcagcgcatgaagggacgaatcctttcacgataaacatgccgctgtagaccaaaagccgttcggaatcaatagcatc

SEQ ID NO: 126789 - DNA, 527 bp, Arabidopsis thaliana columbia
taggtacacatcttaaaaaatcttgacgtcgctatgcacgcttcacgtaagctgtggatcctctagagcggccgcccttttttttttttttttttagtttagtgacaaaatccattttgtcacaatgtaaaactgaaatttctgaggtggtctacataagctttttaatgatctgaatgtttcaagaactaaattcatcaaaagaaagagagagattacattggagacgaagcgggctttgtacattgagatgtacgccatatgccaatcaccttctccagatagctttgagatgtcttcttcgcgttgcatgctcgggttgtcatcatcatattgaatccatttgccactctcttgcttgacccatgcaacttaatgaccagagtctgcactcctgcccttgtggtcaacacagcgaccaagtcatagattccagtcatgtgagtttccttctcagaagaagtcccttcctgtgggtttactgtggatgattctccacttccatttgcagacgcctctgcatcagt

SEQ ID NO: 126790 - DNA, 515 bp, Arabidopsis thaliana columbia
gacactatagaagactatgacgtcgcatgcacgcgtacgttagcttggatcctctagagcgggcggcctttttttttttttttgtttttttaggtgaccaaagcatttattcataccgaaaacaaggaattttgggggtggggaaccttaatttaccggtggtggaaaggccttcttgaggaaaggaaggaccagaacctaatgactttccttgggacagaatcgttcccaaccttgggagaagtctggctttcggaaaacacttttaccctttggctcgagtaagccttcttggggctggttaagggggtggcctgacccgcaatgaacctttccctaaatgaatagctgggcaaaggaaggccatggcctgaaggttttcatagagcctttgaggtctaggactctacaaggtttataaaactgatcggagcattttgttgctgaaaaactgtgacggcttgggggctaactgcgcacggtggagaattagggacaccttacatgtatatcat

SEQ ID NO: 126791 - DNA, 402 bp, Arabidopsis thaliana columbia
ggtgacactataggagaatctatgacgtcgcatgcacgcgtacgtaagcttggatcctctagagcggcccgcctttttttttttttttttttttgcggaagaaagggccactttttttttgtggaaagacaaaaccccatcctcttggaagattataagaacccgagggcttttacaaaactgtggtaggaagccaaacaccccgaatggcgaaccttcatctaaaactcaactctacggccggaaggaagattgattcccaaagaaaaatatttctgataaaaaaggaaaccccaatggtcgaacctttatcgtgctcagccggaaacctttttttggaaatcaaccttaaaccccccaattaagggggggggactcctgcacccggaaaaatctgtccgg

SEQ ID NO: 126792 - DNA, 475 bp, Arabidopsis thaliana columbia
aggacgtcgcaggcacgcgtcacgtaggctgggatcctctagagcggccgcccttttttttttttttttttaaaaaaggaattcgaaatcactatactcgcccgcttggaatgggcaaaaaacgtggaagacatcctgacaaggaagggacggctaaaaccgggtacaaggtcggccgaaaattggacaatatcatcgtggcaccagtttatttaaagccgagatcgcacgttctttctaagtttgccaaccctaataccgaaggcccttgttcaggttaatcgctatggttgtaacttcggaggccatagcctggaactggtccaccattggccttccgtgccgggtaaaagccttgagcctcacgggaaaggaattagccgttctggactaaccaggcccttgctgacatgggacttactggggaaaacttggtgcgaactcacgatgaaactccgggatctgttcttgagct

SEQ ID NO: 126793 - DNA, 481 bp, Arabidopsis thaliana columbia
aggtgacacttagaagatcttgacgtcgcatgcacgcgtacgtaagcttggatcctctagagcggccgcccttttttttttttttttggcttagaagtttttctttttggctcgatttcatttatcggcaaaatcaacaaaccttacaaaagttatgcatcggggaaaagcttgatccgaattatggggtacccattaacacaaattattactattaccagcttgagcaatcagccgatccttaaatcaaacaccaaagagccgattttcgaaaatgaatcccttaccaatgaaaaccatgccccaaaagggcttaaaaggtattcaaggcctgacttgaccattaaattctggccaatggtaggggtcatgaccaccggagggacaacaacttttgggcctgcctggaatctttttttaatcggaggaccccattccttggtaggaattagttctgggggaagaacctccaaaagcctaa

SEQ ID NO: 126794 - DNA, 472 bp, Arabidopsis thaliana columbia
cttccttagcctggattcttttgagcgggcggcccttttttttttttttttttttttttttttttttcaaaaaggattccaaagctcaaaatttaaaataaaccctaaaaccattcaaattttaaagaaaccggaacaaagcaaaatttggggttctgggaaaagcgtaaagtaaaaaacttttaagcttcagtagcagcctttggttttttaggcgttcgggggccaccaacgaaccatgcgtgggcacccttaaatgggttaagcgtaacttggttaagtggtttgaattgcccctggtgaaacttttttactttaatttggaaccaagtttttggtggaacgggggaatccattcagtttgccttttttggaaacaaaaaggggccttctgacttgggggaatttgaagcttttaaagccaaaaaccttgcctgatttgggtgaacacccttgaaaaaaataactttaa

SEQ ID NO: 126795 - DNA, 470 bp, Arabidopsis thaliana columbia
gtcgcatgcaccccttccttagcttggattcttttaaacgggcggcccttttttttttttttttttttttcttttcaaaggagaatggaacttggcgtgaaaaccatttacaaattttttggttatttccaggaggggatagggttataatggtttaaatttttttaccggaagttatttttttgtcaaaggaacgtttcttccacaatggtttgggacccccgggaccccaccaagaaaaatatcactggaggccataaagaacttttgacggctctcacaaccgattataattaaatcgggtttcctgagggggaacaaaacctgtttaaaaaaactcgggtttttaacctttccggacccaactttgtacatgaaaggtacgttgatggttttagacggttgcccgatgctgaatccttttggggtcctcacgacaagataggggtatctggctggagctatctaac

SEQ ID NO: 126796 - DNA, 192 bp, Arabidopsis thaliana columbia
gcacgcgtacgtaagcttggatcctctagagcgtccgccctttttttttttttttttttttttttggcgcgagacgtaaccggggtcctaaaaacaaccgggtatcccgggggtggacggccctctatactgggtgggatactgtccctccgcgggaaaagaaggtaagagctatgactcaggaaggcaaca

SEQ ID NO: 126797 - DNA, 493 bp, Arabidopsis thaliana columbia
  unsure (1)..(493): unsure at all n locations
gtgacactatagnnagattatgacgtcgcatgcacgcgtacgtaagcttggattcttttgagcgggccgcctttttttttttttttggaaggaacctttatgaaaataaaaggcattcaaccaaaaatttcctttttggccaaacccaaaggcttttaggtttgtggttaacctttccttctaatggaatcttattccaattcttattaattaatctgccattcttattattcttttttggggggcctaacgaccaaaacacccattcctaagctttcattcactcctttctccttcaacaccaatcctgtatccaacttcatcccaccatcagccacaacaagatagtagtatccattatcagcttccaccgtcttcttttccctatcgatcacaaccattatcgcctctcctttcccgttccacggtaaaacttccctatcatcgctaaacgaaatcgccactcctcctttcctaatcgccaccacgggat

SEQ ID NO: 126798 - DNA, 446 bp, Arabidopsis thaliana columbia
  unsure (1)..(446): unsure at all n locations
nnnnnnnnnnnnnnnnnnnnnnnnnnnnnnnnnnnnnnnnnnnnnnnnnnnnnnnnnnnnnnnttttttttttttttttttttacagaaaaaacttgcgacttcaagacgacgaaacatgagactatggagctcaaatgctcactgcagatcatcagntatcgttcctttgttattgcagatgacataccaaagacgaaaagaagatcttccctttataacaaaacagagctgtagtaatgaatctaagggaaggtgatcatcagtttcttgggttggaacttggattcgatgcgttaacaggtgctgtagaatcctgaaggctngagcccgatgttgccacgacaggaggagtggacccaacatacgggcaccccagatcgagcaccaggagcctgacttttgaaagctgcaatagcagaagcaggggacatcaccatatgatct

SEQ ID NO: 126799 - DNA, 472 bp, Arabidopsis thaliana columbia
cgcgtacgtaagctgggatcctctagagtgtgccgcccttttttaattcttttttttgggcatagtgtgattgtcggtggtgggatgtttaagactaaaaaccgcggggacaaatgttataacaaaccgggtggattcaggtttggggggcgaaccacattgaggggccccggacgcccgtggaagactcttcctccttttgcggggggggaaggaagaaggggggcgcctgcagaaaagaagaaaaagggggggggggggggaaagaaggcgtaggggggcaaaaagaccctggttctttgtttgccacgagcattgtccgtgtgtgcgtggtatgtggccaggaggaaattggagaggaacgggggatttgttggttcggctttaccgcgaggggatctgggaaggctcctctttggaggggctcgcaaggtttttggtggtggagcacctggcacgacggtgagggggc

SEQ ID NO: 126800 - DNA, 491 bp, Arabidopsis thaliana columbia
gtcgcatgcacccctaccttagcctggattcttttgaacgggcggcctttttttttttttttttttggtgagaaccggtaatcctggtaattattattaccggtaatccggttccaaaaggaaattaataaattcaggaggagaccgaggataaaccgaggacgggttcggggatttaccaaaattaaaagaaaaggtccggttattactaattccttgaaggagccatggaggtctctttttatctcaatccaacgacgcggtactagagctgctaataggcgtgttcggtccgctcctttctgggttataatggcggaacttataaaaataatacttgccctgattataacaataatccgatgatgagctcatagacgttgttaacaagtagcccatgtccttgttccgtgtcgaggtcataatagtatatagaaaaaacaatccaacgctcatggtcaattcgagttcgctctcttcgatacgatcgg

SEQ ID NO: 126801 - DNA, 512 bp, Arabidopsis thaliana columbia
gccctatagaaagattatgacgtcgcatggcccccgtccgtagcctgggatcttttgagcgggccgccttttttttttttttttttccttattagaagtattaagcctggttcccccaatttagaaatccaattccgccaaaaaaaaaaaccaaaaaaaccgaagcctcaagccttcagggttaaatcggaaaaaaacctttccttatcactggttggctggacttccaaaaaatccatttttttttcacctaatttatcattccccgtttaacccgaaaccgatttcgtagcttgccggaaactccccggccagagcatctcggcctcgtcgtcctccacgtaaaaaggtttacaattaccgaaatacccctggttgaacctggcaatgtttctaataagtgtttctggtgtctgccttgtcatgctgacgtcgtgcgccgaggaatgtgcccggattcccaaagtcctgaacgatgtcatgttcccgtttccgcttccgtgaagcggcaa

SEQ ID NO: 126802 - DNA, 508 bp, Arabidopsis thaliana columbia
gacctatagaagagcttgacgtcgcatgcaccgccgtcgtaagcttggatcctctagagcggcccgcctttttttttttttttttaccttatagaggtatgaagctgatgccccaaattaagaatccaaattcagccaaaaaaaaaaaccaaaaaaaccaaagctccaagcttcaagggtagatctggaagaaaactttccatttccatcggttgcttgacgtccaagaaatccatttttctttcacctaaattatcattacccggtttaacccgaaccggattcgtagcttggccgaaacttcccgggcaaaacattttgggcttgttgtccttcacgtaaaaagggtttccattaccgaaatacccctgggtgaacctggccatggttctaattaggggttctgggggttggcctggcatgcctacctccggcccccaagaatggggcccggtttccaaaggccttaaccaaggtattgtcccctttcccgttccctgaagccgca

SEQ ID NO: 126803 - DNA, 609 bp, Arabidopsis thaliana columbia
  unsure (1)..(609): unsure at all n locations
aggtgacactatagnaagactatgacgtcgcatgcacgcgtacgtaagctgggatcctctagagcgggcgccctttttttttttttttatataattacatattcataaatcagacatttgacatcccgatagaaattgtctcattaagagaaaaaggacacagaccatagggaaatggaaatgagcagagataatttcataaagaaatggttttagaaaaagaaatttaagctttcgggtgaaagctttggggggctttggtaggcaaatggaaaactgatgccatttgggactttgaccggggtgtttggtcgaattcccgattgatccctaaatgaaaggggcgccccgggtacctcccttctttgcaatttctttcaactttcctttcaancactttggagcgggaagtcgggtggcattccccgaacaaatgggaaagctttncaacatttgggtcccagtacccggttccatttcgtagtattcccgggaagtggtttcccgtggctcaccggtacaacaaaattccgttgcttctaaactcgaaattcaaacaacaaggaattccacttntgttgcgggagaaaggggtagtcaactttcctt

SEQ ID NO: 126804 - DNA, 486 bp, Arabidopsis thaliana columbia
gacactatagagatctatgacgtcgcatgcacgcgtacgtaagcttggatcctctagagcgggccgccctttttttttttttttgtttttaaaacgaaaggacaaaaaatattgctgggaataaatgtcgaaaggaaggcgtaccccccaaagactagggcatagggttaaaaggttcaaagaaatattaaatttgggatagaaaacaaagaatgggttggtgaatctggaaaggcggggatttcctgactgttttcaaggcttgagaatggttggaggaggtgaactgtactttacaaaaggttgggaacttgacgcgctttgtccattaccaagttggaaaaagggggcagcgggtgacattattgggattgattttggattcccaacctaaactgtcgcactcaggaatgcgagcggggagcacatgaaactgtgatgaagtgacacatacccgtacctatggatggttcaatacctggagca

SEQ ID NO: 126805 - DNA, 504 bp, Arabidopsis thaliana columbia
  unsure (1)..(504): unsure at all n locations
nnnnnnnnnnnnnnnnnnnnnnnnnnnnnnnnnnnnnnnnnnnnnnnnnnnnnnnnnnnnnnnnnnnnnngccttttttttttttttttttttagcagaagaaagtagatttatattgatggggaattacctaacacaaacctctcagaacataaaaagagccagatgctcattacacactcatggaagtaaaccacacacatcggaggacgttccttccttaaaagctcaattcaacgaccggatgggactgggttacaaaccctcattatttttatttaatatggatacccgaatggtcgaagcttaacgggcaccaacgggaaggttttccttggtcttggacatcatccccttctttttgggggggtgaacaacggaggcaacagcattatattcggaacccatggcggccattggttgaacctgaccaaaacggacaaggagacctggccacctcttcttgaacttttggggtaatgccttcttgctcctccttcttgg

SEQ ID NO: 126806 - DNA, 420 bp, Arabidopsis thaliana columbia
gacgtcgcatgcacgcgtacgtaagcttggatcctctagagcgggccgcctttttttttttttttttttttttggtttaaccggcccattttttattccaattaaagaaaagccgattaccttggatgattttattccggcggtgtctttaaccaagaaagaagattggtgcttattttccccattacctaatcctattcctgaattattccggaggttggaagaaagaatttttccggtgaaaaatttttccggggaaaaaggtaaaaggtaaagtgaaaccctctctttttaggtggggccttttccacttaattttttaacccaatttggaaggccccccatttcaaccgggggtggcctttttccttcgggtaagaacaccggttcccaccaaatgcgggccccgtattttttttt

SEQ ID NO: 126807 - DNA, 501 bp, Arabidopsis thaliana columbia
  unsure (1)..(501): unsure at all n locations
acccgtacgtaagctgggatcctctaaagctgccgcccttttttttttcctttttttaggcaaaatgaaaatttattagatgggaatatcacgaagacacaaaagcaaggatgaaatgaaataaaactgggtggcttatataagaatctcattacaattccaagtaacacgaaggggaaggagaagctttccctccttttaggggagaaggggaanaggaagggggaggcggaaacactgaaacatacggggggggaggagaccgcgagcccacctgaggggaaggggagacagaggggggcggaggagaaccnaacaacaccccaacccaggagccccccacccgaacccgggaaggcccccgcgggacccagggcggggccacacgggcaggacgggagcccccgggcgcaccccgcggaacaaccgccccccgcccccgaccgcacgggccgaagccgcggaacgcccacggcgcggccccaagacgaggcgaccccg

SEQ ID NO: 126808 - DNA, 510 bp, Arabidopsis thaliana columbia
aggtgacacttagaagagctatgacgtcgcatgcacgcctacgttagcttggatcctttagagcgggcggccctttttttttttttttttttttttttccttgaaagaagattatatacgcgtattttaaggtttctgtgcatattaacccccgaacaaaaggtcttagaaaattagtgccttggggggttggttgcgttaggaataattagaagagggatttttggggaaaattggaagggagtaaatggaattttccgggggggggttttttttttggaaaacaaattccaaaggggtttcttccgttgcaggggactaaaagaaccccttcttattcgttttttttttcgtccacaaaaaacttgaccccactggaaaggttcccaaaccttttcggccaattttaaacaattaatagtcaccggggaacttataagtagacccctgcttatgctttggtaactggtgtaaaaagataatgaaactcctgagtcttgaatacagagg

SEQ ID NO: 126809 - DNA, 479 bp, Arabidopsis thaliana columbia
  unsure (1)..(479): unsure at all n locations
nnnnnnnnnnnnnnnnnnnnnnnnnnnnnnnnnnnnnnnnnnnnnnnnnnnnnnnnnnnnnnnnnnnnnnnnctttttttttttttttacatcaaaaggagatgagagactccaggaatagctacaaaaaatataacaatcaacattcgaaaatggctaacaatttgataaccagaagagacccattcttttgagacacgccttcgctgagttgagaagacccaaacgaaaccaccaagcttcgattccgaagatggacccaccaaaaaagaaccaagattaggggtttttatgaatattttattaatgaaattaacgctggtctaagtcttcttcaaaatctgggaactgggtagtagtagttaaagattccccactttgggtggtcttcggtttcttcctaacattcttccctaaaagaagacttggtggtgaagaattcgggcctttttggttccttgaaaggttcttcgttggtt

SEQ ID NO: 126810 - DNA, 474 bp, Arabidopsis thaliana columbia
gacgtcgcatgcgcccccttccttagcctggattcttttgaacgggcggccttttttttttttttttttttaaaaatgggaaaatggcgccattttttgggaatttttttagaaaaggaaccaattggttttaaacattcttttcaccaaaggttatttcttccggatcccaaccaaccccaccaaccagttagaacccttgggacctgaaacgtccgatttttacccaattttttcagttctttaacctttgagtctttctttgagctaagcagcaacgtgatggataaactcctgggtgtcaaggcacgtgtccctcgaaggctttgagccgggaatgatgagggcaaaatcttgggtcattttccctgactccactgtccaaccacaggcggtttccagcttctaagtgaaatccaagagtttggcgtggacatctaacttacccctgtgtgcaagtccacgagtccaagc

SEQ ID NO: 126811 - DNA, 492 bp, Arabidopsis thaliana columbia
tttggaagaatctttaacgtggctaggcccccttccgtaggctggaatcctttaaagcggccgccctttttttttttttttttttttaaaagggaaaattgaaaaatttttggggaaattaaatagcaaaggaaggaggtccccctcaaaactcctgtaaacagaattttatggttcactgtacaaccaatcccgagaaaccagataaaacactgaggactgcaaccgtgcgagtttgacccactttcttctgttcctgaagcatgatggcttccagaggcttccctaggcactgcaacgattaagacctcggtgttcaggaacccgttcctactaagcttagagccgggactgagtgaacgaagatctttggttctttttcctgactccactgtgccaccacaaggaggtgccgggttctcagagaaatccaagaggaaggcattgtcatccaactgaatctatggtgcaaggccacgagtccaagagaaa

SEQ ID NO: 126812 - DNA, 421 bp, Arabidopsis thaliana columbia
acactatagaagagtcttgacgtcgcatgcacgcgtacgtaagcttggatcctctagagcggccgccctttttttttttttttttttcggcacaataaaaatttattatatttgatcctcatgaagaacatacgctaagatgaattgaaataaaactgggcagctcatataagaatctcattacaatcgcatgtagtacaaaggtgaatgtaactcttggtactaagtttttggacaaggtatgtatgatcgtggcggtggataactgtagacttctggcggtggaggagaattggaagcaaccttaggagaaggcccatcgtatcgttgtggctgaatgccttgaacacaaacagctgaccgtagaggagttcttatcgttgaacctcatacagagcaccaacatccatgcgagaatcgc

SEQ ID NO: 126813 - DNA, 481 bp, Arabidopsis thaliana columbia
tggatggcccccttccttagcctgggttcttttaaaggggccgcctttttttttttttttttttatttccaaatggttttacctttattaaccaccaaccaaattaaggccgaaacccaaattaaaaccaggaaattaccgaaaccattaaaaaaacctgcggagaaaaaagccagaaaaatagctctcaaattctctcattatcatctctttacaaattcttcctttttttgttactcttaacgcttttttcttcatcgtccgattgtaccgtcactaagatcgacccgccacgtcatttatccacaacaccttaaaaatctctaaaaaatattcacaaaatcagatcgagtcgccacgtcatcaaagactcgatccaagtcgactcaaccgagtgagttctctctactgagtcttgcatacatctccgctctcagctctttcccagattccacaaattccatcgccggagcttcttcga

SEQ ID NO: 126814 - DNA, 537 bp, Arabidopsis thaliana columbia
ccccttccttaagctgggaccccctaaaccgttcccccttttttttttttttttttttagggaaacccaaacccacccagaaggggacgggtcccgagagacacacgtgccaaatatgtgttccaattaaaacacgggcgcgattcttgtaagaaagggagtctaattctccacgacgacccaagaggggaagggggaaggcgtttccctcattcttggggggcggaggaaaaaaaaagcggggggcggcgcggaacttaaagcacatacgagggggggagagagaaacggcccccacctctggtggaacggccgacaccaatcgttcgttggaggacaggcgaaaacggcccctccggcccccgccccccggcaatgtttaggttcttacccccttttggatccggggggcccctcaatgggaacatgggaccccttaataggaaaggtcggaaagcgtttttcccgaaaatcgactcgtgggaggtctatcttcgataggacgagttttggggggccaaccagcgcgcggaccgc

SEQ ID NO: 126815 - DNA, 494 bp, Arabidopsis thaliana columbia
gtgacactatagaagattatgacgtcgcatgcaccccttcgttagcttggattcttttgagcgggcggccctttttttttttttttttttttttttcggattaaccaattcggtcccttaaattaaaattttattgccaggtggtaccccttcaaacttggggaaaccggttccttgggtcaaaaaaaaaaaaacttttgattggcatggcaaacattgaatggttctttttggagggacttgatcaactttttttttttaaggccacaaaagggctggcagttgtaaactcgtccttccagacgggggggagcttttgggtcttcttgtagtaccgagcaagacgatggattctgctctttacaagaatcagcctgaatttggaatccttatctttcctgttcctctcaagatgcttgcggatagcaacagctttcttgatcaagtgatacagatcctcagggatctcaggtgcaagaccatgagctttcaaa

SEQ ID NO: 126816 - DNA, 476 bp, Arabidopsis thaliana columbia
gacactatagaagaatttatgacgtcgcatgcacgcgtacgtaagcttggatcctctagagcggccgcccttttttttttttttttttttggcagaataaaaattaattagatttgattatcatgaagaacaaccgcaaagatgagatgaagtaaaacttggtacgctcatttaagaatctcattacaattgcaagtactacaaaggtgaatgtaaacctgggtactaacctttaggagagggtaagtatgatggtggtcgtggaaaactgtggacttatggcggtggaggagatttggattaaagactttgggatggtgcattgtaattttcaggatgttgtgaattgccgaagaccctattgaaggtatccgggattctggtttgttgtactcttccaattgctaaaactttcttacaggaatagctgttcctaacaaggaaagcttccacgtggtacagaaccttccatcact

SEQ ID NO: 126817 - DNA, 487 bp, Arabidopsis thaliana columbia
gacgtcgcatgcacgcgtcacgtaagctgggatcctctagagcggccgccctttttttttttttttttttaggcagaataaaaatttattagatttgattatcatgaagaacaaacgcaaagatgaattgaaataaacctgggtagcttatataagaatctcattacaatttcaagtaatacgaaggtgaatgtaaagcttagtactcactttttggagaaggtgagtatgaaggtggtggtggagaactgtagacatatggcggtggaggaagattgaattcacgcttaggggacggcgaatagtatggtggcggaggagagcattcccacaatcctagtaaaggtatggggaattctgcctgttgaaccctataaattcctaaacacatcgagcgagaatagcgcttccgaacaagggaggcttcacattgtacaaaacgttccaataaggcttgcggacgagtcaaagggcgtccgggacacaa

SEQ ID NO: 126818 - DNA, 501 bp, Arabidopsis thaliana columbia
ttgacgtggctagtgccccttccgtagagctgggtatcttttaaagcggccgcccttttttttttttttttttttgggggagtacgggcacttttttattagccacaaaagaaacaccggtaacgttgaatgatggtatacctgggtgtcttatataagaatctgattacattgccacgcgcctcaatggcgtatggaactctgagacttaacctctaaggagaaggtaagtatgatggccggacaaaaataactccgaaattatggtggtggaggagatttggacccatgatttggggggggctctacctcttctgctgaaggcgagcctggagcaccccattctaaaggattggccttttcctccgttaagaaccgtctccgacaaatcggtccctacaggatatccgggtcaaaaaaaatacgggctatacggcgactaagaagcacgtgccccgctttggacgggataacgctgtcggggctacaaactggttagga

SEQ ID NO: 126819 - DNA, 512 bp, Arabidopsis thaliana columbia
  unsure (1)..(512): unsure at all n locations
nnnnnnnnnnnnnnnnnnnnnnnnnnnnnnnnnnnnnnnnnnnnnnnnnnnnnnnnnnnnnnnnnnnnnnnnnctttttttttttttttttttaggcagaataaaaatcaattagatttgatcatcatgaagaacatccgctaagatgagatgaagtaaaactgggtagctcatataagactctcattacaatttcaagtactacaaaggtgaatgtgaaccttggttctacactcttggagagggtgagtatgatggtggtcgcggagacctgtggacatatggcggtggaggagattgggattcaagctatggggatggtgctctgtattttgcaggatgtgacaactgccgatgaccctaatgaagagatcggaggtactggttgttgcactcttccacttcactaaacatttgagcaggatgagctgcatcctaacaagggaagcttccacagtgcccagaaccgtccatcataggttacgggcgagtcacccccctgactggacaca

SEQ ID NO: 126820 - DNA, 525 bp, Arabidopsis thaliana columbia
aggtgacactatagaagactatgacgtcgcatgcacgcgtacgttagcttggatccttctagagcggccggcctttttttttttttttttttttttggttgaaccggccccttttttattccaataaaagaaaagccgattaccttgggagaatttattccggcgggtctttaaccaaaaaagatgaatggtgcctattttccccattgccttatcttaatcctgaattattccagaggttgggagaaagaatttttcccgaaaaaaatttttccggggaaaaaggtaaaaggtaaaggtaaacccttcttttttggtggggcttttccatttcttctttaacccaacctgaggtcccccaatcaaacgggggggccttttcctccggtaaaaaccggttccgacaaatggggcccgtaattttattacagtcaacgatccaccggtctaaacagcgatgataaaacacgtgtccacacttcggaagctgcctaatcttatcgtgggatacaaaatcggataggc

SEQ ID NO: 126821 - DNA, 462 bp, Arabidopsis thaliana columbia
tgacgtcgcatgcacccgtccgtaagctgggatcctctaaagcggccgccctttttttttttttttatgccacaaacaaaacgttgaataattatagggggcgattataggggtaaacaaaaaacctttttttgaaacctaccaacataattacttctgttattccgaaacagcatttgcctaaacaagttggtgaactcgctggaaaaaactgcaaaacacctaatagagatccacatcccattgatctcttattgtgctgaaggaggaggagaaaatggaggaggaggaggaggagtctcaactaacacttctaccttaatgcctagaacgcaaccagctgatccataaaggagataatatcgtctagcccaatacagaggaacaatatctatcccagatccacgcgtataaacacgtattgggcgggtggagatacatttttcataatcaggcttgttg

SEQ ID NO: 126822 - DNA, 509 bp, Arabidopsis thaliana columbia
  unsure (1)..(509): unsure at all n locations
nnnnnnnnnnnnnnnnnnnnnnnnnnnnnnnnnnnnnnnnnnnnnnnnnnnnnnnnnnnnnnnnnnnnnncttttttttttttttttttttggcagaagacaaatcatttagatttgatcagcctgaagaacatccgcaaagatgagttgaagtaaaacttggcacctcagttaggactctcattacaatcccaagtactacaaaggtgaatgtagacctgggtactaatcttttggagagggtaaagatgatggggttacgcggagacctgtggacatatggcggtggaggagattggtttgcaagcttaggagactgtgcactgtatctgtgctgggaggagatcattgccacgatcctattgaaggcattggggtactccttgttgcactcttccacttgctaaaacatttgagcggaatcggcgcatccgaacaagggaagcttccacattgaccagtaccgtccatcatagctcccgggcgagtaaacgcgctcactgtacaca

SEQ ID NO: 126823 - DNA, 451 bp, Arabidopsis thaliana columbia
ccccgaccgtaagctggagacctcaaaagcgtgccgcctttttttaatatctttgtttagggaaaaaagggccacctttgtgatcgcaaaaaaacaaaacccaatcacgtgtggaacgataaatacggccggtgctcaaacacacaaagaggatggaggcaacacacacacaatggccgaacctacaacagagtgctcttcagaaggcgggaagaaaaaagcatacacgaacacaaatattccgcgagaaaaaaggaaaacgcaaagggaaaaccactcaacaggagcggggcgcgtaaacacttcatctgataacgcaccctgaagcaccccaaacaaaagggggtggaacttgactcccggaaaaaaccgttccggaccaaatgcggcccgatagcttgagacagcccacagaggcaacgggtcaaaacaacaatgataaaaccagggg

SEQ ID NO: 126824 - DNA, 513 bp, Arabidopsis thaliana columbia
  unsure (1)..(513): unsure at all n locations
nnnnnnnnnnnnnnnnnnnnnnnnnnnnnnnnnnnnnnnnnnnnnnnnnnnnnnnnnnnnnnnnnnnnnnnnnnctttttttttttttttttaagaatagcatgtcataaagaagctttgaatgtttcatcgcacacttttccaacaatgcacaaccaatacatgtggtatgcttgcaacaagaatcacacactatgtggtctaaaattccgacaaagaaaaacatcttttggtgcttataacatacacgtccgttgtcaaactggtcataacatatagactgacacttgtccacttgccaccaccaactgccttgacggcacaaatctgctcctctgccatggaagacttgacgcacgccacattatcctgttcatgatcgaatccagacctcatttgggcggtgagaccatcattggtgggaagcttgagatcaagctagatgcgcccactgtcactgagaaggctcacgactcctgccttagggatagaaatcaactggttatcaacact

SEQ ID NO: 126825 - DNA, 493 bp, Arabidopsis thaliana columbia
ttgacgtcgcatgcacgcgtccgtaagctgggatcctctaaagcggccgcccttttttttttttttttttttaatcttaaactcttaaccttacatcaaagtaacttttattacattgcatacaagaaaagaacaaaccagcattattaggtttgagattaaacctgttcccacacatatacatagagatatgaactctacaatttcaaaccagagccttgaagtttctcctcaacaatcatgtcgattttgttttccatttcaggagtcatataactcttccaatcaccaacttcccctttacggaaaaaactcttgaaacttactccttccgacaagcttcctgttttgttgatctccaaaccgctaaggtttcttagagaacaaagttccaagatcttgtctacacctccactatcttcttcttcctttgtgaatggacaatctaagaactctgcaagtctcttgatttgcacacgaggctccgtcttca

SEQ ID NO: 126826 - DNA, 511 bp, Arabidopsis thaliana columbia
  unsure (1)..(511): unsure at all n locations
nnnnnnnnnnnnnnnnnnnnnnnnnnnnnnnnnnnnnnnnnnnnnnnnnnnnnnnnnnnnnnnnnncttttttttttttttttgtaaattatcttctttatattattcttgcgttaaaattcaaagaacaaaaaacagaaagataaccaacaaatgagcccaccaactaaatgctttaattaaaagttgtatacaaaaggttgatcactaaaaaggagttaaataaaaagaaaacaaaactgcatcctacctctcggattaactgagaagaaagagagaaagcagattgtggaaagaaagaaaaattacaggatgacacacatcaaccgccggtgaccggaacaccactttctctctaattgcttacattctagtggggatctcaccaaaactgttccagccattgggctagcgttttcagcttcacttgtgtcctgcagctgtcaatcgtcttgaagttccgttgccatttatggaaaagttcacaggctgcctttcttgtcctatcgat

SEQ ID NO: 126827 - DNA, 491 bp, Arabidopsis thaliana columbia
atgacctcgcatggcccccttccttagcctggattcttttaaaccggccgcctttttttttttttttttttggtcccaaaattttggattgggaaagaaacccttggtttttccccaaaaaaccacgggcctaagttccttttccttattttttattccttacaaaaggaaggaaaaaaaaaaacctgccaggtttaatcctaatattttttccaataaaaaaaggcaaaattttgagtcacccttttttcttttcgttttccctacccatgaagcatttccaaaccttaagctaaggctagctccgatattggtgacactaagttacaacccaccgggccaccgtgttaggcccaaacttaggcccgtataaactccaaaaactatggcttctaacttcaccacttttcgaaacagaaaagtttatacgtcgacgtttgaaaaggagcgtttcgtagcctcgttggatttcaaacgggaacaggcaaacc

SEQ ID NO: 126828 - DNA, 571 bp, Arabidopsis thaliana columbia
  unsure (1)..(571): unsure at all n locations
acgggggcgaccacanagggccaaaaaacgcaatcgttaagtaactcccccccaagcgtcagggggggaacgcccccgcccgtagcctgggagccccgaggggttggcccttcgttttggcgtttttaagaggggggacccaagccgaccgggggggccgaaaaacagagcaccagggaggtcggaaaacgaacaagcgcacgggcgctgaagcgccgacggcggggggggccccccaacgggcaagagagggcaaagggggcgggtttttttcttggggggggcgggaagagggcggaccacgccgaccagcagtatcctggaaggcagggggaactcaggggccgaggcccaggggggtgcagggcgcgagagcgcgtcggtcccagaggaaacgcccgcagccgcgccgggagaggcgggggcgggacccgcggacggggccgaagggccccgggggcgcagacggggccgcgatggagggggcgggcggacgcggggccggcggccccagcggacaggtccggccgggcgggggggggaggggcgggggcccccccctgcggggcca

SEQ ID NO: 126829 - DNA, 505 bp, Arabidopsis thaliana columbia
gacactatagaagagctatgacggtggatggaccccttccggtagcctggattcttttgagggggcggccctttttttttttttttaggccccaaccaaacccttatttattattaaatttggatattacggtttccttaaaaccttttttggaattttaccaccttattcctttttttaagaacaaaaccaccattggcctaatcaggtgggggaactggcgggaaaaaattccaaaccaccttttggagatccccttaaaatggatttcttatggggctgaaggaggaggattaaaaggaggaggaggaggaggattctcaactaaaacatttagcttcatgcctggaacgcaaccacctcttccatcaggtagataataccgtctagtctcatagagaggaacaatatctctcccagctccacgtgtataattacgtattgggcggttggagatacatttttcataatcagccttgtttacctcaagaatgttgtgttggtc

SEQ ID NO: 126830 - DNA, 507 bp, Arabidopsis thaliana columbia
aggtgacactatagaagaactatgacgtcgcatgcacgcctaccttagcctggattcttttgagcgggcggccttttttttttttttttttttttttaacaaaagggcttaacttggtctggttcatactaaaacccaaacttatggttggttacttccaaccccaaccccggagttattaaaaattcgttttttaccaaaagggaatggcaccaaaccggagaaaccacttagttggtgggcagaattttttttacttggttttttgggttccggaccctaccaggcttgtgggtaacaccaccgtttagctgaaaagctttttaaccaatggcctttctttttttaggggaaacgttgggagcattctcagcacagtaggtcctgttgggcataatcaacaactcgacctcacttgtgttgggaacaacgaatttcttgaatccattgggaagatagtgacgagtcttcttgtcagatccgtaaccaacattgggcatcaaagtc

SEQ ID NO: 126831 - DNA, 508 bp, Arabidopsis thaliana columbia
ctatagaagagttatgacgtcgcacgcacgcgtacgtaagcttggatcctctagagcgtgccgcctttttttttttttttttttttttttaccaacgggaaaaatattatgggggcctctacttggaaaccaaattaccttttattaattcccaccggccattaattaaacatgaatataccctttgggaaaaggtgaacaaccaaccttaaactggttatatccaactgaaaagccacaattttttacccattccccattcggcacttggtttgccaaccaaagttggaaaaggaaaccttaacctaaggaaaaaccaacctggacttgacccttggtggttaaagaaaaattgccgaactttagcgcaaatcctttggcttttacacaaacaaaattagaaattttaagtcccaactgggcttatttaaccttatctatgtgtcctcctcccgatgctattgccacctgaataatgggaaaaaaaggaaggttgagatcatcacgg

SEQ ID NO: 126832 - DNA, 514 bp, Arabidopsis thaliana columbia
cccgcccttaacccggggcctcctaaagggtcgccccccggggaaattctttttttttttagggccaccaatggcgggggggagccatggagacctcgaacccccctgccgtgtgaatcccagaccggcaacggggtttgaatgggtaaaatttctttacgggcgcaaaaaataggggtggagggcccaagtttccctccttttgagggggggggaaaacccacccgaaaaaggaccaaaacggccagagccacctggggagatggcgcaggaaacacctctggctcgggatgaacaagatttccatgccttgaaaagaaacctatcttgtttcatcccaagcatgctttgcggtctccgggaccgggttttggctcttgctgggtccgtggaccgccctcccgggctatcccccgggatagcacagtgcccaaaaaaagaaaatggccactaaaaattcgttttatagaggggacgtgcctcttttgacttttaaccaaggggggcaatttgg

SEQ ID NO: 126833 - DNA, 514 bp, Arabidopsis thaliana columbia
aggggacactatagaagatcttgacgtcgcatgcgcccctaccttagcctggatcctctagagccgcgccgcccttttttttttttttttttttttttttttttttttttttttgggagggaaattccaaaggtcttttttttttttcaaaccggaaaaaaaatttcgggccttggttggttggccattaatttcccaaaagggaaattttccaaagggggggttacccaaaaaattcttagccagaatattggttttttggggggtggttttttcccctcccaaaattttctgaaagaacaaacctttaattcctttttttaaaaacagggggttttttgggaatttggccctgtgggaaaaccccaggatttaaaaaagttgggctaaaaccttttctggttttaataacccaaccaggggctgctccaatcgggtttggcggccccggaaacccttttccgggggcactggggtccccctcaacggcctttttcatggggacccgtttccc

SEQ ID NO: 126834 - DNA, 491 bp, Arabidopsis thaliana columbia
gccccccgtcgttagcctggatcctttagagcgggccgccttttttttttttttttttttgaccaaatattggcttaaggtaaaaaattttaaattaacccggaattccttgggggttgccccaaaccacccttccaacttttggaagaagccaatcttaatcaaaaccaaatggttatgccattattccaaattcttgttgaaattaccaggttttttattaaaaattcgtgaaccaaccttggttaggcttaaccagaagcccaccaagggaacttgttccattaaatttttaccacatttttttctttaagggggggggtaattttcaagccaaaaaaaaaaaacctaccccggttggccttatttaccagcttcaaaaccaaaacctccaaagatattctcattaacctttgtggtaataaaaccttgacaagtcctgttgtttgtgagggtgaaacggccaaccttttctcctgcgtttttgctgg

SEQ ID NO: 126835 - DNA, 508 bp, Arabidopsis thaliana columbia
aggactatgacgtcgcatgcacgcgttcgttagcttggattctttagagcgggcggccttttttttttttttttttttttttaaagggaagaccccttttaataaaaccaaagaaaccgggcttaatttttgtttaataaaaaaaaaatgccggatattttggaatggattaattattgccaagccccttgaaatgggttaaaaaggaattctgcccgggaaaaagcgggggttttggaaaaaaggaaccggggtttttgtttttttcggcgtaagagcgaccagggaggcttattgatgggcccggaagacgattggtttgaaagcagaggttgttacaggttttccctgggggggcaaattccgaaggaggaaggcttgctcgagtccaaggcctgccaatccgtttaagggggttcatttggcgggcccttggtatacaatttcggagttttattcggaatccagttatgaaaggagtggacttggcccaaagattttggatctt

SEQ ID NO: 126836 - DNA, 507 bp, Arabidopsis thaliana columbia
  unsure (1)..(507): unsure at all n locations
nnnnnnnnnnnnnnnnnnnnnnnnnnnnnnnnnnnnnnnnnnnnnnnnnnnnnnnnnnnnnnnnnnnnnnnncttnnntttntttttttttttttttttttaacaaaaatgaaattggcatttaagagagatacatttggaatgacttaacaatgtacatgacatgttgtttttatgtattggcctgtgtttactcttcctgtgtcaaactgtttaattctctttaaatgctacatcggcaacaacaaagcttgaactcgagtccctttagtagctgcattaaaccaccaatcttaagcaagatgatctgttgtttttctggtacaagtcgttgttggaacgtaaaccacattgttcagcacacagtgagatcggccacagaagagacagatcatgcttccgataagtagcgataccaagaccctgatccatgtcccagctccagtgttgatgatcaagtaggtgttgatcaaatgcaaagaactggaggtatgggacgaatgggca

SEQ ID NO: 126837 - DNA, 538 bp, Arabidopsis thaliana columbia
  unsure (1)..(538): unsure at all n locations
nnnnnnnnnnnnnnnnnnnnnnnnnnnnnnnnnnnnnnnnnnnnnnnnnnnnnnnnnnnnnnnnnnngcctttttttttttttttttaggaaattacttattggggaccaagctttgactttgagggagtctcagtaaccaagaccaattaacttaaaaaaaaaactggaaattaaaaattcaaggtttaaaccaaccccaaattttgaccgaaaccggaaacggcattttagccagaattcaattccagaatacaaaaccctctttggacactagaggttttagtttcgatggtgcgagctaacctctgaaccaacaactatcatcggatggatcactttgatcacccaacggtttgtttttatcccaatacccgtaagtccaggactcacagggtttctgatgatagagacataccaacactttcaagaagctcccgggactgcagccgctgcagtagcgtacatgtttgagtcctgattggcatatccattgttgtatccttgacctcttgaatatcctccattccattggttgc

SEQ ID NO: 126838 - DNA, 552 bp, Arabidopsis thaliana columbia
  unsure (1)..(552): unsure at all n locations
gtgacactatagnaagactatgacgtcgcatgcacgcgtacgtaagcttggattcttttgagcgggcggccttttttttttttttttttggtggaccatgtaggctttatccaccaagcatttctgaaataaggtgaccttggaccagggctattggaaaaaccagtctggcttaggtcctacctccttctactatggggatgaaaccaacaaaccattcttaacttggttgttactggttaggagctttcctagagttttttctttttggggtggtaggagctggagtctgcctattccactcttgcgttttcatcttaatttgctggttgcgaagcaaacggagctttatgccttggccctggagtacttctcacgcagttgataaacagggatgaaagctccagctgtgttctctccatactagagaaaagaaaagtgtggatgaccaaacctttccttggtgggtactgcaggagcgaaccgtttgtcttctgcatcgtatgccactcggagatctgggtgcgctcgatattaactagaacctgatag

SEQ ID NO: 126839 - DNA, 377 bp, Arabidopsis thaliana columbia
ggacgtcgcaggcacgcgtcacgtaagctgggatcctctagagcggccgccctttttttttttttttttttttaaattaagaaaattctcttttcgaaggaggatgtgccacgagaacaggacagaaatgcctttattttgtcgaggaaagagccttgtgctcttaataagccaaacatatggccggatcgtaaaaccccgcaggaaccacttttctattaagcctgtaggcgggcagcaaagacgcctgggtccattaacccggttgaaaagtgttaccttacaccagattactgtggactcctggaatggccactacactggacggatctgagagcctacacctttgggccttagggggaatcacaacactctcc

SEQ ID NO: 126840 - DNA, 550 bp, Arabidopsis thaliana columbia
  unsure (1)..(550): unsure at all n locations
cggattgacttggtgacctatagnagagctttgacgtcgcatgcacgcgtacgtaagcttggattcttttgagcgggcggcctttttttttttttttttttttttggtcgaattattcttagcctttacttgaaataccttcttaccaaacccttaaccggcttacttccttaatgaaggaccaaagaattttccagggtttttaccccttaccaggaataataattcctaataaaacctgcctttaaaaatttcttgcaaactacttttttttcaaacaggttttagtaaatcgtcgggtaaaaatgatacagtacagatccgggtagtccctccggtttatcggtttttttatccaatcaaaccggaatgttatcgatggagtatgcgtcaaagtcgaattcgccatcaaccggtgcaatcccttcctgcttaagaagtgcgctcataagatcttcttgattactatactgctcgtgaaacgccattgttgctgtatccgtagccactctctctgatttcaccctcactgaaccaccgtttccgtctg

SEQ ID NO: 126841 - DNA, 537 bp, Arabidopsis thaliana columbia
ggttgctttaggtgcactattagagagctatgacgtcgcatgcaccgccgtacgtaagcttggatcctctagagcggcccgcctttttttttttttttgctgcatcaaaatatagctcacttaaagcagagggaggcaaatctctgtacagtggagctcatctgggtcgtttgttaactcgtgtcaagaacagctcgtgtgtcgaacaggacatgaccaatcactatctcttcttttgctcaagaggtgacaatgcccagacttaacaagaggggtgtctattgactcatccttcgattgagctttctaccgcattgactgtgcctaggtcctcggaagaagctttaactgcctctgcacacatgaaagcagctgcagctttctggatcgctagatctgctttgctcctcatactctctgctctttcccgcttgagcttagccaaagcgcatgctcgccttgcagcaccagctgcatctcgcaatttgtactcatcaatagggtgtactattccgtattcctttcacatcaggacgc

SEQ ID NO: 126842 - DNA, 519 bp, Arabidopsis thaliana columbia
atgcccgcctaccttagcctggattctttagagcgggcggccttttttttttttttttaattggaacctaattatttattccaaatagaaattcaccccaaattccaaggttggcatttttggggaccaacccaaacccattccttggcccggccaaaccttccaacagtttttacccttaaaccaccacagaattttgtttaaaccaaaattttaacacacacagttaattccttccaaaaaacattcaccgaccctttgaatcaatcaaatgatattcccacccccaacaaacaaaacctttaaccaaacagacaattctgagtttctgcccgacctttcggggcttgtgctcttccatgacggttcgatcagattaaacgaatgctccttgatgattacaacttttttttttcacaacgaaatgaatcaatcattgttgctttcagaaaaaaaagccaagagatgactaagaatatacgaagcagaagattacacgtgataatatatattatgctc

SEQ ID NO: 126843 - DNA, 536 bp, Arabidopsis thaliana columbia
gacctattagagaacttttacgtcgcatgcccccctacctaagcctggattctttaaaaccggccgcctttttttttttttttttaaaaggaaaattcccttaaccttacttaaaattattaccttttattttcccttctttaaccttttaaccttaccttaacttatggaaccaaggcaaatgcaaatttaattcctaccatttttggaataatccgctttataaataaaaaattctacaaaggttggggccttgactgaacaatgtaaacatcttcaccaaccaaacaaccttcaacgtcttgagcacagccaaagtttctttccaagaagaaaccaaccgaaccgagtctctgaccgagctgctgtctaaacaccgagtcaacagttaaacgttttttgctatagtccacggtcaaccgaacgtattttccatcagcaggacctgttcctgacacaagaagctcttcgctgaagtttgcgaaagctaaggtttgtacaatcccgtcgagcttacccgaagcgagtctccatgg

SEQ ID NO: 126844 - DNA, 482 bp, Arabidopsis thaliana columbia
  unsure (1)..(482): unsure at all n locations
acgcacgcgtcacgtaagctgggatcctctagagcggtcgcccttgtgtttttttttttttcaataaaactcagtcgccaccacagagaggacttttgtcggatgccagatctggagtcaaaacactctggaacccgtaaacatgggtacgtatagctggcgacaagaaacgaacacacccccgacgacgcaaactcccgtgataaagngggggcggaacacagagagaagcccgcnaccggacccacccccaccaacggctggggaccccaccgaaggagagcggggaaggcgcggaacagaagccacgcgaccagcgaggacaggaaagcgcggaacgaaaaaaccgaccgcgcccggacaaccaaggagaagcaccagcacccgcgccgagaagaaccaggccagaccacgcccgacgacaaagagccaaaacacagagccaccccgaaagccgaacgaagacgctcccccgcggaccg

SEQ ID NO: 126845 - DNA, 559 bp, Arabidopsis thaliana columbia
  unsure (1)..(559): unsure at all n locations
gnnnnnnnnnnnnnnnnnnnnnnnnnnnnnnnnnnnnnnnnnnnnnnnnnnnnnnnnnnnnnnnnnnnnnnnnnnnnnnnnncttttttttttttttttttgggaagtttttttttttggaaaaattaaaggctcttttattaaaagtaaaattcaaggttttattttacaaagctttttccatcgaaaacaaccggtaacaaaagggaaaaaagggtaaaacccaatcaccgtaaaaaaagcaattactggcaaagatggtccacggcagtgaccaactgagctggctgaacaaccggccattctttcaatggacccgcgtaagggggtgggacattctgagaagaccaacacattaccggagcattttagtaatcatgaaaggtcttggttattggaaccgcgaaactgggttccaattcttccggtcttatacattccttcacaattaaaacccgggggggcttctttacccagttttccaatggggaaaaaaccaaccggtttcaccaacctatggtgaataacctttgaatattccctttggttaaccacggct

SEQ ID NO: 126846 - DNA, 540 bp, Arabidopsis thaliana columbia
  unsure (1)..(540): unsure at all n locations
nnnnnnnnnnnnnnnnnnnnnnnnnnnnnnnnnnnnnnnnnnnnnnnnnnnnnnnnnnnnnnnnnnnnnnctttttttttttttttagatcaaacaatacatactactgatttataaacaaccatcacttgtttttgtttctttttgcacatattttattgagtttttgagcaaacaccaaatccaaaataatttagaagagaaactaaagaaagaaagtcatcatcttttttcttcttatggactagtctctttagttaatatccacttgaggaactataccaccagcttgaatgatctgtttctcaagattgaacatatcttgaagctttgtctttaacgccttgtactcaatatccacttgctgcaaacatctcacacacccttcgtagttcttagcttcacaacattccttgaagctaacacacaaagttttgaccctcttggcaccaacacttgagctactacccttcaattgatgcacactagcacctacctgactaaaatctacagttcctgtcgtgtccaaagctctagcca

SEQ ID NO: 126847 - DNA, 539 bp, Arabidopsis thaliana columbia
  unsure (1)..(539): unsure at all n locations
tgacctatagnnagactttgacgtcgcatgcacgcgtacgtaagcttggatcctctagagcggccgctcttttttttttttttttggagaaacttaattttattggttattagcttccaaagattaatttagtggaattcataggggcttggtttttcttaaaagaaaccatgggtttgggaaaacctgaattcctaatccttttccgtagccgcctttccaccttattattaaatttattgggggaaaaaagggaatgaagaaaacttattgatagggcattagaaagataaagaaataaacaaaggagcaatatgtgtacttcagatgacagtgccggttgggattaaggcgtctttgataaccgttacaattccgctctttatgaaatatccatcagtctctctcgctgcctcttgcacgttgtcgctgtttatgatcttgacattgtcaccgatacgtgcgtttttgtcgatgatggcccttttgatgtgcgagtttttcccaatacctatgggtacacttcctttcgcgcttaa

SEQ ID NO: 126848 - DNA, 542 bp, Arabidopsis thaliana columbia
  unsure (1)..(542): unsure at all n locations
nnnnnnnnnnnnnnnnnnnnnnnnnnnnnnnnnnnnnnnnnnnnnnnnnnnnnnnnnnnnnnnnnnnnntcgcgatctagaactagtcccttttttttttttttttcagacaaacacaatttatttgactttaaaccatcaaagtatcctaaaggaccaacaaatctaaacaaaaactaaacttatcttggaaaaaagcaaataaagccacacaaataaaattcccaagtctcagagaacagagtcatagccattgatctaatgtacaacacccaaaagaagagaagattgattgtttgggctaagaaaacagaaagagcgtaaccaaccccgtagtagagagtttcagataaccttcttcttctcgaaaaacgtcttcaagtgcaaaaactgcatccctgcaactcctatgcagacgaaaaacgagagaacactcaaccacgccatttttgtgttagtggaccggttcaagtcttgcatctcttcttccctatctctaagataatacatctcttcatgaatcgagttaacagtatcaagaa

SEQ ID NO: 126849 - DNA, 460 bp, Arabidopsis thaliana columbia
  unsure (1)..(460): unsure at all n locations
nnnnnnnnnnnnnnnnnnnnnnnnnnnnnnnnnnnnnnnnnnnnnnnnnnnnnnnnnnnnnnnnnnnnnnnncttttttttttttttttggtgaatcttaaggcgaagcatcatgtgcttggtgttacatcctagggggatagaaaatgtcggaattcttggtaaacctacggctttccctcgacatgacacgccgggaaacccaaacctcaaacatgtatcgcacttagtttctaacatgtgcgtggcctaaccttcagacgtatggaaccgtttgtctgcttggacagtaagattgtagggaagagcaactctgaggagctttgggacgaataagcacgactaaactacggaagctggcctttcagcgttagaatcaagctgaaacgcataggctatgagcgcctccttggcctgtgctacggcagcagctactttcttcttgtactcttgcgccaga

SEQ ID NO: 126850 - DNA, 547 bp, Arabidopsis thaliana columbia
  unsure (1)..(547): unsure at all n locations
nnnnnnnnnnnnnnnnnnnnnnnnnnnnnnnnnnnnnnnnnnnnnnnnnnnnnnnnnnnnnnnnnnnnnnnnnnnnnnnctttttttttttttgagagaccttatttattacaactctggagaaacacaaaaaatgtgcggtgacacaccacggagaaggagtttttcaagttggtattactaatcgtgaagcacgagagaattgtaggacgagaaaccgaagtatatagacgagcacgatcaattgtgtcaagatatagaaaccgagctcacatgtgtttcctaagatgtttccacggtttgatacaggatcttctttcagagaatgtaacttcttagattcttggagtactcgtagtgaactcagagatcttgtgagcatcaaatgtgcgatttcagattcaatctttctctggaagatgcattcaagttcagattcaatctttgagttttcgagatcttggatcctagcttcctttgcctcgagagcagatctcgctttctcgagattgtgttccagaagttttaccttctccttcaagatcag

SEQ ID NO: 126851 - DNA, 527 bp, Arabidopsis thaliana columbia
  unsure (1)..(527): unsure at all n locations
tttgtgannnnnnnnnnnnnnnnnnnnnnnnnnnnnnnnnnnnnnnnnnnnnnnnnnnnnnnnnnnnnnnnnctttttttttttttttttgaatgaaatgagaaccagcgtcattgagcatcttgtaaagacaacagtgtcaattaaagcgacacactctcagcttttttggttgtccaatagtgacgaaattctgcattgcccacatcgaattgggtcccacgaatcatcataactgcatctctcagacaggacatcacgcttctgcgacacttgatttcttgtgggcgttgaaactgatgcattggactcttcgagcgttgtcgtgtccgctaatactaatgaaggctccagggcactactttttgcatttttgaatagctttcaacactagagcggaatcctctcattcgacaatgtatgctagcaattagtcatttccgtaccatcataaccaccggaagaggctttttgctcacagctcacactatgcgtgctcagcaactaattcactctaggaatccact

SEQ ID NO: 126852 - DNA, 549 bp, Arabidopsis thaliana columbia
tgcttaggggacctatagaagagctttgacgtcgcatgcacgcgtacgtaagcttggatcctttagagcgggcggcctttttttccacacgagaattctggtcttggtgagctcatcttaagacacctgggttattttttaacagatggggcggcccaaccaaacttcccaactgacaatggtcttcggccggatcgaaccggcgaagcgaggcttgggaaccaaaaccgggggttggccccggcttccaattaagggagtaggtaaattaccgttaaaggtaggggtttttaattggcgccgaagctcccacttatcctacacctctcaagtcttttcacaaagtcggactagagtcaagctcaacagggtcttctttccccgctgattctgccaagcccgttcccttggctgtggtttcgctggatagtagacagggacagtgggaatctcgttaatccattcatgcgcgtcactaattagatgacgaggcatttgcggacgcgtgggtcgacccgggaattccggaccggtacctgcaggcgtacc

SEQ ID NO: 126853 - DNA, 506 bp, Arabidopsis thaliana columbia
gtgacctatagaagagctttgacgtcgcatgcacgcgtacgtaagcttggatcctctagagcggcgcgccttttttttttttttttttttagaacataaaacgacacttaattatttagattatacttaaaaagagaagtaccttatacaagatcggagttgaacatgaaaccaggtgccaatgacaagaagcaggtattttaaaggtcaaagaactggttttcttttttgcttttggctttcaaccgaaacccattaaacccaccaccaattcccacttattttaaatggaattaaatcatgaagcgtattcaaagggttggggagggtgggggttattatttaccggcattgctggaggcgggggttcttgggccggcggtggtggaccaattggaggaaaagctggtggagttggtggcttcggcaaaaaaaggacctttggcttggggtcacgccaggctttgaaaagaaccaaacctgagcggggttgcttcactgggacc

SEQ ID NO: 126854 - DNA, 471 bp, Arabidopsis thaliana columbia
  unsure (1)..(471): unsure at all n locations
cccgccgngncggagcnggaccgttggcggcgcaaccccnnaaaaaaaagaagcccccgcggcgacaagaaaccccgccaagcccagacccgaggagcccacacccgcggggccgaaacgcacagaggagcgcgacgaggagaagaaccgaagccacgcggcgccctccctaagggggggggaacaaacaggaaggaacagaagagggaaaaaaacgaccancgcagaccagggagcaagaaacccacaccacaagcgaagggagaaggggaacaagcaaagcaggccaagaaaacacgnccaaaagaggaggaacncgacgcggacaacccgcaagaacccggccangaccacaacggacgagggagaaacacccaacacgagcagaggacaagacaccagcgccacggccaccgagcgggggaccaccngcgagagaacacccgagagagacgacggggggggacgaaa

SEQ ID NO: 126855 - DNA, 544 bp, Arabidopsis thaliana columbia
  unsure (1)..(544): unsure at all n locations
nnnnnnnnnnnnnnnnnnnnnnnnnnnnnnnnnnnnnnnnnnnnnnnnnnnnnnnnnnnnnnnnnnnnnnnnctttttttttttttttttttttttattccagaaggtgctattaaatttataattattggcgatatttttacttcacgctctaaaacattaaacagaaggtgccttttactaccctaaaattgggttaaccaatcaaccgccgtattatttcaaaaattaatatggagatatgtacctattccaaaaccatttctggttcacacatttctttaactactatgaaaattatggagcggttcttaattaatataagggttacttgccaattatggagttccaaaagaccatagaacccagtttggcctaatcgcctttgtgtaaaacacattcctgaattttgcctgaaggtgcttttgaaacatgggngggggcttttcacaaacatttgaaggaacctttcaacccaagctttgaacttaacttttgtgttaagctttcccaattaactaaaaacctttgggcatgaattttg

SEQ ID NO: 126856 - DNA, 546 bp, Arabidopsis thaliana columbia
  unsure (1)..(546): unsure at all n locations
nnnnnnnnnnnnnnnnnnnnnnnnnnnnnnnnnnnnnnnnnnnnnnnnnnnnnnnnnnnnnnnnnnnnnnctttttttttttttttttaggaaattacttattgtggaccaagctctgactttgagggagtctcagtaacaaagacaaattaactcaaaaaaaaaactgaaaataaaaaattcaagtatcagacgaccccaaaattttgacagagactgagacagcaagataagcaagattcaaatccaggatacaaaaccctctttggacactagaggttttagtttcgatggtgcgagctaacctctgaaccaacaactatcatcggatggatcactttgatcacccaacggtttgtttttatcccaatacccgtaagtccaggactcacagggtttctgatgatagagacataccaacactttcaagaagctcccgggactgcagccgctgcagtagcgtacatgtttgagtcctgattggcatatccattgttgtatccttgacctcttgaatatcctccattccattggttgccagagtca

SEQ ID NO: 126857 - DNA, 480 bp, Arabidopsis thaliana columbia
  unsure (1)..(480): unsure at all n locations
ggattacnnnnnnnnnnnnnnnnnnnnnnnnnnnnnnnnnnnnnnnnnnnnnnnnnnnnnnnnnnnnnnnnnnnnnnnnnnnnctttttttttttttttttttttaaatggcagcatgattcggacagattgatttacagaaaccatcctgattcattacacacttgacaccagagataccgtacccaacaatgatgcaacgatagtgaagatgcactagaaatactatgatatacatggtcttgacggaatcacgaaggtcaagatcgtagcactatgtgctactgcacagtacccacattcactcctcaaaaaagattacttccgtgagagtagcccatacatgactcagctgcatctggttaagctgcttcttccagcttatacgagctaaactgcgtgacatcaatggttcattttccttgcactgaaacatacgacacatagtgaggtacttgctcctgatgactactatcaaac

SEQ ID NO: 126858 - DNA, 543 bp, Arabidopsis thaliana columbia
tgacactatagaggagcttgacggcgcatgccccccttccttagcctggattctttaaagcgggcggcctttttttttttttttttttttaaaaagaactggttttccattccctaaaagggaaacccacaaaccaccgacgaaaatgccccccttggtttggaaattccaatggatttaaaaaaacaaaattactggacttttaaaagaaccccgcaaacagaaccttttttttttggcgggacaaggaaaccaaaaaacacccgtaacattaaactggtttctcttagttcatgaagttccgttcttggggtctccaagtatgtcccttaatcttggccgtacataagcccttaacccttgagcctcctgtaaaatagaaacacccactcgataatccatctggagtcttgctccagaagaagaaggctaatttttgcttgagtttgcgatagaaaacgtgccatataaggctaaggcaaaggtggatcttgtgggcccgaccataatccgtcatggggacgattttgacaccctgaaatg

SEQ ID NO: 126859 - DNA, 541 bp, Arabidopsis thaliana columbia
  unsure (1)..(541): unsure at all n locations
nnnnnnnnnnnnnnnnnnnnnnnnnnnnnnnnnnnnnnnnnnnnnnnnnnnnnnnnnnnnnnnnnnnnnctttttttttttttttgaaatggttaaaaatgaaacaagaattgaaataaaagccaaagaatgcttcttgggagacaactattgtggtaccacattgatgaaaattgagatgggtttttctatcccaccaaatggtacaacatcaaatcaatagtagtttctgtaatcattcctctggtaattctgattgtagttcggctgatttaattcagcagtaagttcagaggacaaggtactagtcgtcttcatagctcttccttcaggttccttgagatacatccggtcatctaagtacgctgtgatttcggctatgatcacaagtagatccgacgtgtccttcttcgcccgcaatttctgcaagaaatgctctctcacaacattcacaaccttcagaaactgagatttgtacctctgatgaagaccaaacccagccgtctggagaaaggagttcaaggctgtcgcagtggctctg

SEQ ID NO: 126860 - DNA, 541 bp, Arabidopsis thaliana columbia
ggtgaccactatagagagctttgacgtcgcatgcacgcgtacgtaagcttggatcctctagagcggccgcccttttttttttttttttttttttaaccagaaacagatccatgtttaaggaagatgggtttggcttcatttgtgatacagtgtttgagatccaaaaacaggtttattggctgagaaacaagaaagccttaaaagcttatccacgtctggattatgaactttgcttacaaataaaaagaacagtcacatcactagctttcctctgaagtaattcctctacgcaggtacttcagagagggtcctcttctttcctttctttacctctgttccctcattttctgcctgctctgccttcttctgcgcacggatcattgctcgccttgcgcgcggtcgcatctctctaactctacgaggcggcatcacaaatggctcaagtggcttgtccccaaaaggatgctcaccgccttcaaatatcctcagcttccgatccctgtcatcacgcaaattgttacttggaagcatgcgccagaca

SEQ ID NO: 126861 - DNA, 505 bp, Arabidopsis thaliana columbia
  unsure (1)..(505): unsure at all n locations
nnnnnnnnnnnnnnnnnnnnnnnnnnnnnnnnnnnnnnnnnnnnnnnnnnnnnnnnnnnnnnnnnnnnnnnncttttttttttttttttttttttttttttaaacaaaaatgttattttgaatcatttttaagttttggattcttggtttacaaaccattacaaaaaaattccttctcatcactcttctttggtcgctacttgtttctggcgaagagctctccaaccaatatcacgcctaaaaaaacctccaggccagttgatctgttgcactgccgagtacgctctttcacgcgcctcttccaagtttttacctttcgccgtgaccccaagaacacgcccaccagtcgctacaacactcccctcagaatctagatccgttcccgcatggaaaaccttcactccaggagcaactctttcagcttcttcaaggtttttgatgattgatcctttctcataagcaccaggataaccattgcttgccattacaccaccattgctgaatc

SEQ ID NO: 126862 - DNA, 544 bp, Arabidopsis thaliana columbia
  unsure (1)..(544): unsure at all n locations
gtggcactattagaagagctatgacgtcgcatgcacgccgtccgtaagcttggatcctctagagcggccgccctttntttttttttttttttttttttttgggaacccggggacaaccatatcttccaggagtttcttatgcatctccttttgttgagctatcagtgtcctgactagaccctccaaaaaccttttacacaccaaacctctctttctctttctacctcttcttcctcttcttctccttcaggaccatcatcaagcttgatgatgatgatgacttggcatcatcttctacgtttccaacttttccaacctcaatagagtttctttgattctccattgatgcttcttctacttgaccctgatcctgatctattaattggccctccgccattaagtcttggaccgtttctcccacgtttccttttccttctactaaatgggccctcttgttttggttatccccaacttctgatgaaacatgttcattgtcatgaccatgatgataaaactcttcaacctcactaaatatcctataatt

SEQ ID NO: 126863 - DNA, 554 bp, Arabidopsis thaliana columbia
  unsure (1)..(554): unsure at all n locations
gggtggcacctattagaaagagcttatgaacgtcgcatggcacgcgtacgtaagcttggatcctctagagcggccgccctttntttttttttttttttttttttttttttngagggcaaacttattttccccaacctacttgagaattccctttaagggggttttggggtacggtccttttcaaccattaccgtggccgttacctcggccagaaaaggttggttcttggcaaaaatatttccactacccggccggacatgtcccatttggccttacaccactcaacacactggctttttctgcatatatataactaccattcccatgccgaacatcatgctgccatgcacctatttacttatcaccattcgcatacgtgtatgtgccattgccatgacgcaagccatgctcccatgcacctacatacacactcttatcagggtacaccatagtaccatgaccatgtgcgttgtccattcacatacacaccagtgtactgcactgctttgttactgctatcattggcgncatcgttattatcatcatcatctgct

SEQ ID NO: 126864 - DNA, 173 bp, Arabidopsis thaliana columbia
ggagccccaaaaggggtggcccttttttttttttcttttttataaaaccttaaaattacctccaagaggctgataatgggtccttccaaggagagcgttaaaatttattttggaccggatttataccctaggaaccctgccacagctcattgaggagggaaccggccgggcag

SEQ ID NO: 126865 - DNA, 457 bp, Arabidopsis thaliana columbia
  unsure (1)..(457): unsure at all n locations
agcgggacctcagagggtcgcccggggggaaaactgctgaaaaaaagagccaccacagcgggggaggcagaccccgacggcgagctcacaggggcgcccgaacacgcggagcaccacaccggggcgacagaacaagaagaacaccaggagcacatcctcaaaaggagcggaccccagacggaaaagagggagggggaaagacccacgccccccggggcagagcaacccacccgcagcaccgaagggccagagcaaagaagaaaccggccccggacaacacaaaagaacaggggccgccgcggaggggagaacgagagggccaccggaacgacccagcgaaagccacccgagccgagccaacgcgaaagcgcgccnnngcccagacagacagnagcgccgacgagaacaaccaagagggggaaccaagcgcggccgccagcccaagcaaggaaagaca

SEQ ID NO: 126866 - DNA, 534 bp, Arabidopsis thaliana columbia
  unsure (1)..(534): unsure at all n locations
nnnnnnnnnnnnnnnnnnnnnnnnnnnnnnnnnnnnnnnnnnnnnnnnnnnnnnnnnnnnnnnngcgcccttntttttttttttttttttttttttaaaaaattattatggtgaatggtacttggggtgaaaacctttaccgaatttattggttattaccgggagggaattgggttttaatggtttcaattttttaaccggaggttatttttttgtccaaccaacttttcctcaaccattgtttggaaccgccggaaacccctgtacatgtggcgacattaaacccgcttgtcctaaaccggataacggctatataaattgaagtgattttacacacatacagcagtgagaagatcagttgaggccataaatgacatttgaccgctctcacaaccctgcagaagtagtttattacgtgcatcagagattttgtgaaacaagggattgtcttcataggggtttatttagtctctgaatgtcaaaactgaaacttacgattatgatttcatcgtgtttcctgaagtgggacgagac

SEQ ID NO: 126867 - DNA, 494 bp, Arabidopsis thaliana columbia
  unsure (1)..(494): unsure at all n locations
gggaggnngggagccccaaaaggggtggcccgcgtggtcaaacccctttttctaggccgaaagggaggcggaggagagaaaaaacaaaggggaaaaagacccaacccaaaaacggggggacaaaaaaagcggaaaacaccacggccagagggggaaggagaaccaacgccgtaggggaaaccttcctccggcggggggggcaaaccgagagaaaaaaaagcggcgaacagaaaaagacaaacggcgcggggaccaacgcccgggcgcggaggaggacaaaaagcagagggcggaccgccacgggcccgcgggaaaaagcacgggaacggggcccccgaggaacccccccaaaagaccccaaggagggggacccccccagggggggccgggagaaacaagggcccaagggacaccgcgggaggagaacaccggggaagagagaaaggaaaggggacccccgcgggcaccagagaaggagcaccgaccaccaagac

SEQ ID NO: 126868 - DNA, 491 bp, Arabidopsis thaliana columbia
  unsure (1)..(491): unsure at all n locations
cgcgnacgnaagctnggatcctctagagcggtcgccctttttttttattctttaagactccaactggctctctttcattaagactcttgttatcaaaagaaaatataagaaaatccgaaggtttcataaagactacaggcaaaattccatagaaatcacaagctctaataagaaaccacttcactnggcagcctcgtgctgggccttgnagcgagactcaagggcattccctgagttgaaagtcttcttgcatgaaccacatgagacttgactggccgactttgggctctggtttgcagcctttccccctttcttcttctcatctggtgtctgaggagtaactgctactttcgccttctttgctgacacaggtgctttaggggtagtttcattagctctcttcttgcttgatgcaggcttcttaggtgtaggctcttcttcctcagaatcctcaccatcagaatcatcttcatccattccgtcagaatcag

SEQ ID NO: 126869 - DNA, 508 bp, Arabidopsis thaliana columbia
  unsure (1)..(508): unsure at all n locations
nnnnnnnnnnnnnnnnnnnnnnnnnnnnnnnnnnnnnnnnnnnnnnnnnnnnnnnnnnnnnnnnnnnnnnnnctttttgttttttgttttttgaaataggctgtgtttattttaacgaggggagccttctcttgcaaactacacggcggggttatgaaccaccaccgagggactgcgttcagggacttctctggtgcatctcctttaaaggaaatggccgaaagcttacactcttcctaggggtttaagggaaacattcgcattttcagcagctgaggaataacaggattttttcttagcaggcctttccttaggccaatttaaagctgcactggctccgacgtatagacgtttagcactatctatgaacataggtcactgtcgactacatagaccacggctagctctgataccgctatcgtaaggagatctgtgcccataccagacaagggcggggactccaggtcgctcagattccacgagtcgggaacgtcagactgctgaaccc

SEQ ID NO: 126870 - DNA, 482 bp, Arabidopsis thaliana columbia
aggtgacactataaagacttgactgctgcccctactagcttgatcctttaagcggcccccttgggggtgtcaccagccgtctaacttttaggaggtttcttacggaacatatatttccgtggcatcttcccacctttggcacctttgggatggctttttaacccaacctgggaagctgcatccgtggatggtgggcttcctttggcggggcctatgacctaattgtcctacacttttacttgggaggagctagtattatggtccggaagggggacttagttcctctggcttgcatccttggttgctgatgatattcagctcctgttgcagctgcgactgctgtgttctagactatccaattggtcagggaagattccctgatggaatgcctctaggaatctctggtactatcagcttgatgattgaattccaggctgagcacaacatccttatgcacccatttcacatgttaggtatagctg

SEQ ID NO: 126871 - DNA, 486 bp, Arabidopsis thaliana columbia
aggtgacctatagaagagctatgacgtcgcatgcacgcgtacgtaagcttgggatcctctagagcgggccccctttttgttttttgtttttttaactaacctagagattatttaacgaacgggctgctttcattcatatatccctccgtggggttgcgaaccacataccaggagacccgctcaatgaacctttccttgtcctcaaaaaaaaaagtcatggccaaaagactccaccttttctggcgggtcagcggaaaccctagcatttccagggcttgagttcttcctaagaagtgtcattccaggcaacaaagatgggacaatcgtggactgcattggcgggcgacgtattgccgtataaggcacactgttaacgaagggtcatggtgaactacaagaaataggtcgaaattagtccccgctattgaggggaggccttatccatatccaaactgatggctagatacaccttgcttttcagagttc

SEQ ID NO: 126872 - DNA, 478 bp, Arabidopsis thaliana columbia
aggtgacacttaaagacttgacgcgctgccgcgtcgtagcttgatctctaacggcgccttttgttttgttgtgacaactgagttatttacgacatgctgcttcattattgttctagtgtgtagcgaacacattcagggaaattcgttagtgatctttacatgtcctgaacaaggagaggcatggccgaatgtttgagacctctgcttaacagctttcactggaatacattaccatgtccagggcttgagttctgtccagaagtgtctttccagggaacaaagatgggcactggggactgatggcgcgaggatttccgtgtagtgcacactgttgatggagggtgatggtggacttaaatgagtttggcgaagttgattcaccgctgctagtgagggaccctttcgctaccaaatcttctgctagttacaccttgactctcagagttccaacatctgattcgagaactctgttatttgt

SEQ ID NO: 126873 - DNA, 518 bp, Arabidopsis thaliana columbia
  unsure (1)..(518): unsure at all n locations
taggtgacactatagaaagactatgacgtcgcatgcacgcgtcgtaagcttgntcctctaagcgccgccttttgtttttggtttaaaatgaatctctgaatcaattaccaaacgccgnctttcatttaccggcaggcgagacagaaccacggtccaaaattccgtctaacaaaccagtttactcgcattaaaccaaaaattgcataccgggttcattcaaacatcagaacagaccaatctcagaaaatctgcagccatttcaccatcattgctatatgttgctttgaacttcactcttgcgaggggaaaactttgtcagtttcttcttgaagctatatgagtttcttgggatacagcaatacaatcaaactccatgaagtcttacgaacgagtaggctaatgcaccagtgaaaatgtaactatcaactctgtccaatatgccaccgtgtccagggatgagtgagccggagtctttgacacccgcatcacgtttgatcattgactcagttaagtcacca

SEQ ID NO: 126874 - DNA, 505 bp, Arabidopsis thaliana columbia
  unsure (1)..(505): unsure at all n locations
aggtgacactatanagactatgacgtcgctgccgcgtacgtagcttggatctctagagcgggcgcccttttgtttttggggtttttaaaaaanttttttggggagggacccatacggttatgaataaggagatttaaaggactggaaattggaattccatccttttcccaaacttaaaaaccgcaaggacctcacaaaaagatggccttattcaaacccttaaatattttaagggggggaaacaaaaaactcaaaattctctctcccttgatgcgcaaaaacaaggttaagctgttgaagcaactccctgggtccttggcttggtttcgggaccctttttgaaaccggacttgaacctgcgaggcacattgcgaagattcctcatccttccaggtccaggagtttttctacggatggccttaacactccagttgaaaggccttttgcgagcggtgggataagcacaatcaaagcaacgactgttctggatggggaaactgctacg

SEQ ID NO: 126875 - DNA, 414 bp, Arabidopsis thaliana columbia
tcccatgcccccttccttaagcttggatcctctaaagcggcctgcccttttgttttttgttcggaataattgggtaactgattttggaaaaaactgcgtcttgaaagcttgtttaacattgaacaattgagcctaaacaaaaagagcttttctctattgcatagggtactacctttgccctcctcctatgatgcatccatattgactcttgcttgagcgctgagaatcacaacgaaccttcttgttgataacgcacccttcggcgggatcctaatgccttaccgagagatacctttataggatcctaatctcttactatactcactcactcactagaaggcttactcatagatatcatatattaacctaaccggaacctcagctgactaatactactgcggacttcatcatata

SEQ ID NO: 126876 - DNA, 485 bp, Arabidopsis thaliana columbia
cccttccttaacctggaatcctttaaaccggccgcccttttgttttttgttttttgaaaattgcctgtgaaattttaaaaaagggaacctcttcttgaaaaacacacaggggggtcaagaactaaccacagaaaacagcgtcgatgaaccttctagaaaaacaacaccttttaaagatattgaagcaaagcttcacctttcctacggattggagggaaccacttccattttccacacctgagaaaaaacaagcattactcttaggaggccattccttagcccaatttaaagcctccattgaactcgcaccttagagacgctttgtactaatctattaacatgggttacatgtcaactacatagtcaaaggctgcggctgaaaccgcgatcgaaaggatgtctatgcccatactagacaaggaccgggactccagcttgttcagattccaccattcaggatcatcaaactgctgaaccctgggaac

SEQ ID NO: 126877 - DNA, 353 bp, Arabidopsis thaliana columbia
  unsure (1)..(353): unsure at all n locations
cgattgtttggtgactatagagacttgagtgctgccgcgtcgtagctgatcttaagcgcgctttgttttggtttaaaggaactttatatgggaactctattcaacacacgcggtatagacttcgacaactgactactacatagacttcttgtacacacgtgggagaatgactttatcaactttatggaggtaggaggatcttcagctctgcttagctgccgaagaacaagcattcttctgatgaagccttttggtagaccatattagatcctaaattggctactgcttcatgtacttctacaactaatccatgtaggatngtgttcatgataaatacttagtgcacggctgca

SEQ ID NO: 126878 - DNA, 494 bp, Arabidopsis thaliana columbia
atgacgtcgcatgcacgcgtacgttagcttgggatcctttagaggggccgcccttttgttttttgtttttttaacaagactagagtttatttaacaaacagactggtttaaataaaaagtgaatagtttggtaacgaaccacacacaggaaatgcgttgagggatctttacatgtcttgaacaaagagagccctggcaagatgtttgaaactctgctaacgggttgattggaccatcgccaagtccagggctagagtcatgtccaaatagggttataccagggaccaaagttgggtcattggggactgaaatggcgggcgaggtattaccggtgtgaagcaaactgttgctggagtgttatggaggactaatatgagccgggatacgtagattcatgctgttagtgagagagcctttcggtactaattgctatggctaggaggcatctcgactctcagagtgatgccatcaagaggcgagaactttgttattcg

SEQ ID NO: 126879 - DNA, 462 bp, Arabidopsis thaliana columbia
  unsure (1)..(462): unsure at all n locations
nnnnnnnnnnnnnnnnnnnnnnnnnnnnnnnnnnnnnnnnnnnnnnnnnnnnnnnnnnnnnnnnnnnnnntttttgttttttggttttttattaagatagagggattttaattagggacccccaacatttgctttcccggattttaaaaacaatcagcacaaggtacatcctataaaacttttaccaaagcatttggctaaagggttaagaacctaccccaaaaatttttgtagaggggtnaagaaaagaaacccttttgccaaaggatgaactaatgcanccattgtcggaacaaactttccatgtatcggaagtgggacttgaatccggaacctctgtatgtgcaggcacgttttctacggtggacaaggcctcaatgtccaccattaacaccactgtgagcttcaaatccgtagacgccattacgcctcttgcgcgcttaaaaaaaggcagtctcttca

SEQ ID NO: 126880 - DNA, 497 bp, Arabidopsis thaliana columbia
  unsure (1)..(497): unsure at all n locations
gacgtcgcatgcacgccttcgttaacctggattcttttaaaccggccgcctttttgttttttgttattacccaaccagcctatttttatttttaaaaagggtttattaaaaccacaagaacttaataaaaaaccttaaccggggttttttgggcccaccatttttttaaccaaaccaccaaccaaaaaccagagaaggggaaggcagaaccttaaccgaggatttaaaaactacaatcctcagcctttttcttaagtacttgaaatcctaaacgggaaggctctaagttgcaccttcaccgagctaagcatcacccttgtaagcaccaagtgttgcttcaaagttagctttgcatctgaccaaaaacgcttcttgagccttcttcaccggacgcgtggnnnnnnnnnnnnnnnnnnnnnnnnnnnnnnnnnnnnnnnnnnnnnnnnnnnnnnnnnnnnnnnnnnnnnnnnnnnnnnnnnnnnnnnnnnnnnnnnnnn

SEQ ID NO: 126881 - DNA, 508 bp, Arabidopsis thaliana columbia
aggtgacctctagaagagcttgacgtcgcatgcacccgttccttagcttgggttcttttgaacgggccgcctttttgtttttgtttaactcagggttaatcgttcttacccacccaccgattgtacaaagacattacctcgtcttaccactgtctttatatggaagggaggggttgggaaaaaaaaaaaagtttgtttatcggctgggaaattgctcttcctgggcaaaaaagtggctgctgatccactccactcatgcctttatttaagggcaaattggggagcttggattcgacataaaacatatatctgctagacaaggttgcttggtggctacatcctcctcaaaggccggaggggcttgcccgtatatcatctcgcagctcatgtcttcataattagggttcatggtgagtgggaggccaaactcattggggaagaaatcttgggttggaatcttgcacatattcacacacattcctacacacccactgttctccagatacct

SEQ ID NO: 126882 - DNA, 490 bp, Arabidopsis thaliana columbia
tgacgtcgcatgcacccgttcttagcttggattcctttaaaccggccgcctttttgttttttttttttttttgggaaaaccaaggctggtttcatatttgtgataaacgcacattttagtttcgattaaaacaaaagggggcaaaacatctaggggtcttaggggaaccaagggtgagaaaaaaccagttgcggggcgagacctcttcattcccaaggggaccaaaaacgcttgtctataaccattaaaccatggggtaaaggctatcaactttactccaaaccagcagctgttgcccatgagggtggcgcgggagcttcctatccaccatgtgccgttgcaaaaccggaatcactccaagaagccgcaaccggggcaccaaagattggagcctgaccttttcctggccatgcagtatcagggatctaaccggaggcccattggcctccacctaccattccatatactggagcaggaagggcaccatatt

SEQ ID NO: 126883 - DNA, 498 bp, Arabidopsis thaliana columbia
atgacgtcgcattggcacccgtcgttaggctgggatcctttaaacgggccgcccttttgttttttttttttttttttaaaacctttaaaaccattaaaaatcaaaaaccttttcttggaattccatacagagaatacaagttttcacttatcagctcctaaataccttaggaaacgcagtagcccacatttgcgtagagattatccaataaatgggctgggggggatcagcccaaaaagaatctagccccagtaaataatttttaactaacggggggactcggggagtcatcatctatcttatgtcggggagggggggaatctcatcgttattattccttccggggtgaacccgacgaccaattacgatctgttccaactcattgaaattaatggcggttaaaaaacaattcggcgaataaacctcgaagcgagtctttgtatgcggtggaggataaatcggcgtctggactgtttatttcctggacaagaaaggaat

SEQ ID NO: 126884 - DNA, 504 bp, Arabidopsis thaliana columbia
  unsure (1)..(504): unsure at all n locations
gacgtcgcatgcaccccttcgttagcttggattcctttaaaccggccgcccttttgtttttttgtggattaaataccaaaccgggtaaaaatttcactccagaaccaacccagccgaggttcaaccaaccaaaaaaaggctaggtccggttaaaaacattttcttacaccacatttaaggagaggaaaaaccgaagcaggacgatccaaaaaccaggatttatagaagcaagcttacggcttaataataacacagcgggggttggtcttacttgatgtatggagaaacccatttgaaaccttctccgtaacccattttcctgacaatgctgcacatgaaaacctccaatggcctaacgttcgaatccgttagattcactttaccctttcctgtantgaagttggagaggccgagatggtaacggagctcgtcctctgatgcagcatacggtatgtctatcttgtttcctaaaatgaggaatggaacgctggctagggattcgtc

SEQ ID NO: 126885 - DNA, 467 bp, Arabidopsis thaliana columbia
ctatagaagagcttgacgtcgcatgcacgcctacgtaagcttggaatcctttaaagcggccgcccttttgtttttgtttttaacaggccggccattttgagggactcattcatttcttatattctggcactgttactagatcaacaaaggaccagctacaggaatccataaccatataaccgaggaaagtaaaggtcctaacctgaccactttggagagggtgaagaacaacattccctttctcactgcctgaaacatacgaaaattttgtgccatgggaactaccatggcaatttcaaggtttgatccggcgcctagagttaaccggcctcgttcccaatggggaagaactcccatcttgcactaagatactctctggggagctctatacgggcggaccccaagtatccgtttgtccacttatagataggccctgccttccagaactgctatataccggcttcggg

SEQ ID NO: 126886 - DNA, 514 bp, Arabidopsis thaliana columbia
  unsure (1)..(514): unsure at all n locations
nnnnnnnnnnnnnnnnnnnnnnnnnnnnnnnnnnnnnnnnnnnnnnnnnnnnnnnnnnnnnnnnnnnnnnnnncttttgttttttggtttttcaataaaggtggtattaatttaaagtcattgccacacatcacatagttgtcacagtgttataaacacatagcacaaagctcgtgctctaagacgtaaacgaatgtaccaggcatgacagtttagaacctaactcagtgaattggggagaatggttaagaagagaaaccctgttgccaaagcagcagcagatgcagacaatgccgggacaaacatagcaccatcggaagtgggacttggacccggagcctctgtttgcacagccacgtttcctacggtggagaaagccacaatagccaccatcaacaccactatgagcttcatctcctttgactgcatgtctcctctttggcacttagaagaagttaatctcgtcaatagaatatatgatgatgtttcggccttctctttggcggacgcgtgg

SEQ ID NO: 126887 - DNA, 477 bp, Arabidopsis thaliana columbia
  unsure (1)..(477): unsure at all n locations
cttaaccttggatcctttaaagcggccgcccttttggttttgggtttttttatttaacaaaattgcaatgttattaaaattggaatcacatcaatggaatatcttcatcctcgggcccatttctcaattactgagcaataaaaaaaaacatctactgggataantttgttctccataaaaaaaaagtcaaacttttctaatgacaatttatacgtcggtccatttttctcaaaatgactaaattgaccctactcggcgatcgtgctcaaattagccgggaatcgcctcttccctttaccgaaacctcttccgccaccaccgtttgtcttaactccggcaatgtttttcttttggtaagttttttccgatgtcgttacatcgtcggcgccggaaacccaaccgacgccaccgatcttggtcaacgccgaactagctttcacggccaaggccgccatttcctccgcccttaacggatgg

SEQ ID NO: 126888 - DNA, 516 bp, Arabidopsis thaliana columbia
  unsure (1)..(516): unsure at all n locations
taggtgacactatagaaagacttatgacgtcgcatgcacgcgtacttaagctgggatcctttaaagcggccgccctttttttttttttttttttggaaaatggatgggttttggaccaggtccttacacttaaaagatgtaaaaccgccccatcaaccactgtcccaaaaccgaaatattaaatcgccaacttgaaaaattgacatgaaaaagaggacaagactttatatacacagactaaaaaaaaagtctttagacacttacgcactaaaacgacgtcgccgaattaaccttaattaacagctaaaactctcaccccctactacgattttcgaatgattcattaccatattcctcattctctaacgacgaagaaatcttcagtttcgttgtcattttcttaacctcatcgctcgaatatataaatatcttctttgccatcttgcaaaactcattccacggatcatcaccagcaagcatcatatctccttcatcatcagngaagacaacgatcca

SEQ ID NO: 126889 - DNA, 512 bp, Arabidopsis thaliana columbia
actatagaagagctatgacgtcgcatgcacgcgtacgtaagctgggatctctagagcgggctgcctttttgttttttggttctttagaactttttcctttgttacaaatttggcttaaaaagggccataaataaacccttggcccacttccttggagtaaaatcaccattagacctttgaagccacctaaggaaagggccaaaacccaaagaactgaatgtttttttttaactaaccttctgactttaaagggaatggttctaataacaaccacttggtaaaaagcaccaggtgcagctccaatgaaggggccaacccaaaacacccagtggtcatcccaggaatggtctttgttgtaaatgattgcagctccaaggcttctagctgggttgatgcctgtgccagtgattgggatggttgccaagtgaaccaagaaaaccgcaaacccgattgggagtggtgcaagaatagggacatgagagtcacgagcatttctcttggcgtcagttgct

SEQ ID NO: 126890 - DNA, 512 bp, Arabidopsis thaliana columbia
agtgaccttaaagacttgacgtcgctgccgcgtcgtagcttggtcctctagagcggccgcccttttgtttttttttttgcacgcaaagatcaaaccccttatgacatctgagcttatggggcaacgtacccgagtattgtctagggttttcagaaaaaaaggggaaaactcatattccgagtccacagcttctgggctacatgcagactcgtttttgtttgacaaaacacatccgtttgacgctactagacaacatgtacattcgaagttgtgaatcttccgattaagcttaggaatcacgataaattgattctaccgattaagcttaggaatcacgataaattgattgagccatccacttcagatgcagctgaagcttgcccgttttggattcgtctaatgggtaccagtctttgtactcctcttccattataacccttgtcaacgtgaggatacatctcccaatgtagtcctttccaaaggtgtcgtggtcccagacttcaaggactagc

SEQ ID NO: 126891 - DNA, 514 bp, Arabidopsis thaliana columbia
taggtgacactatagaagagctatgacgtcgcatgcacgcgtacgtaagcttggaatcttttaaagcgggccgcctttttgttttttgttttttttcaaccaggtgccttaattttttaaccttaaaattttattattccttgtaaagaaggagggttaatgattttccgcatgttcttaaatggacttcaatttttttttaaccacagaaggggtttacattgatccaataatcttgtcctggaaaaaaaggatcaaatgggttggcctttggaaacaacctgacccttgatccacatgtaaatagggattaacacaaaccaggcagctgctaaagttcccaggaggaagcgtcccaagaaggagaaggggttgttgacaggcttctctacgtcctcttcctttggaccaagctggagaggagagtcaccggaggcaggtttaacaccagtgacagaacatcccatgataaggccgtgcctgcaaacaccacggtaccacttggggccaatcc

SEQ ID NO: 126892 - DNA, 535 bp, Arabidopsis thaliana columbia
  unsure (1)..(535): unsure at all n locations
attgtnnnnnnnnnnnnnnnnnnnnnnnnnnnnnnnnnnnnnnnnnnnnnnnnnnnnnnnnnnnnnnnnnnnnnnnnnnnnntttttgtttttttgtttttcattaattttggtttaatttttaattcttttccccccaccccattggtgtcccaatttttaaaaccaattaccaaaaggttcttgccttagaacttaaccaaaggtaaagggcaaaccatttaaaaccctacctcattgaattgtggagatgggttaaaaaaaaaacccttgttgccaaagcagcaacagatgcaaccattgccgggacaaacatagcagcttcggaagtaggacttggagccggagcctttgtctgcgcagccacgtttcctacggcggagaaagccacaatagccaccatcaacaccactatgagcttcatcttcattgactccatttctcctcttttgcacttagaagaaattaatctagtcaatagaatatatgatgatgttttgttcttctctttggcggacgcgtgggtcgacccggg

SEQ ID NO: 126893 - DNA, 486 bp, Arabidopsis thaliana columbia
  unsure (1)..(486): unsure at all n locations
gacttgacgtcgctgcaccgtctaagcttggatcctctagagcggccgnccttttgtttttggtttattcaatctttttgaacctttacactggacctgggtgacctccacccacattaggcattagctatgcaaaattttttatataaacatacagccgacatcctgacatctctgaaagctgacacatcatagttttttgtgaggaccgtccatacatctctcgtaaatggtaaccgaattggctggatccgtaactgatttatcaagagctttaacatgaaattttatacaaattctcaaaaccattgggtgctccaagcaatgtcttcatttgatgacatataataaccgaccttcatgccttggtaactcctcatttatgattggatctccttctcaaacctttctaaccctggactatcctatttctacatcataagaggatccctatgtgccctaaatgcgaaattcattgttaatctc

SEQ ID NO: 126894 - DNA, 458 bp, Arabidopsis thaliana columbia
ggctgggatcctttaaagcggccgccctttgtgttttttttttaataataaatatgatggcatggatatgttacagatcaaaacttgattagtcttttacaatttatgttacacaatatgtaatcacgagtactattatacaagcgtgtatgtgtcaggttaattatacacatatcacatatgtaagaattatggctccttcagccttgaaagaaaggtacattgtgatcaatctcacgaggccggacgcaatctgatttcatccatccgattctccgtttcacattgtcgtacacgatcaagtgtccacgcatcgagatatctccaagaataatagtggaaccatcatgaacactgcttccatctaatatcccaagacagacatttcctttgttgctgatgatcaagtaatcctcgggttgaatcaaaagttttcttgatatgatcaaccatttgct

SEQ ID NO: 126895 - DNA, 508 bp, Arabidopsis thaliana columbia
  unsure (1)..(508): unsure at all n locations
agggtgacactatagaagagctatgacgtcgcatccagccgttcgttagcttggattcctttaaacgggccgccctttttgtttttttttttttaaaaaagaccccggttctttttaacggggaaccaccctcatagaaaggttccagtttttaaggatactaacaaaaagcgaggagctttatgattttctggaaactaggaggccataaagttaaaatcataagcagcactttttctcgggtggctgatgataggcggccttctcccaagggcatcagaattttctttttnccgaggctacggcacgatacctgaagtaggactttaacacggcccaagcttaagcgctggggcgtactcaacgttcggtaacagataaagagcccaggaaaacccaaatgcggtttatgacacccgaagacaaaagaaccctctagtgctcatcagaaaggtgggtctatgcagatgaatctcaaacgtctttgccttattatctacatagcctg

SEQ ID NO: 126896 - DNA, 489 bp, Arabidopsis thaliana columbia
gacgtcgcatgcacgccgttacgttagcttggattcctttaagcgggccgcccttttgttttttgtttttttaaaaggcgctttgaatttctaacggagggagcttcttaatcccaaatcactcggggggttgatgaccacccccaaaggactccttacataacctttttaaaaaccacctacctttaaggaaaaataggcaaggtctaacttttgcttggggtttgaaggaaccactcgcattttccgcagctgcgaaaaaagagcaatttctttaaagagcccatcccctagcacaattaaaagcttcaattggctcggccctaacggacgggttgccctcatccattaccctctgttccatgtcaaaaacatatccaacggcttgactagaaaccgggatagaaaggatgcctctatccatattagacaaggccgggtacttgagcttgctctgatcccaccagtcacgaacatcaaactcctgac

SEQ ID NO: 126897 - DNA, 515 bp, Arabidopsis thaliana columbia
  unsure (1)..(515): unsure at all n locations
nnnnnnnnnnnnnnnnnnnnnnnnnnnnnnnnnnnnnnnnnnnnnnnnnnnnnnnnnnnnnnnnnnnnnnnnnnnctttggggttgggggtttttattttatggcaattttaaatggaccttggccattcaaaggacaaggtcctttttttttaccttaccttcctataaaccatggtttccaaatcagggattccttcaaggcaaatccttattcacaccttttccagtttttttaaaaatggagtctccttcaaattatgaaccttttttttttttttgtttaccagggaaaggttcttgccagtacccaagaacataaaaggagtctaattcgcggtagtagaccaaatgaatgcttccaataagaattaaaagagaaggaaggggtttacacgagcggaacccgaaactgaccagtgatgatgatgatgatgatgaacacgataggagaactctgtagtagcttctacttcagaggatgagatttgaacttatcctacaaagcctatcggt

SEQ ID NO: 126898 - DNA, 411 bp, Arabidopsis thaliana columbia
  unsure (1)..(411): unsure at all n locations
tagnnnnnnnnnnnnnnnnnnnnnnnnnnnnnnnnnnnnnnnnnnnnnnnnnnnnnnnnnnnnnnnnnnnnnnnnttttgtgttttgggtttttttttttattcgataaatcaacttttgaaaaaaagatggcaaaatgctgaaataacaaaattttttgcaaaaggtttacttcccaacaaaattcaaaagctctttttccgacaaaaaggatggagacaaactttcttcttttcagcctttgggactggggacttcgaaaactacttctttcctggaaagttccctgtacacacccaccatggtctccagcttgaactcaggggcgttctttacctaactttccaaaaataccttcatgatctgggggccatcaagacggtttcgggttctctttcctacattctcagc

SEQ ID NO: 126899 - DNA, 469 bp, Arabidopsis thaliana columbia
  unsure (1)..(469): unsure at all n locations
tacgtaagcttggatcctctagagcggcctccctttgggggtgaggtgtttaaaaaacaccaaaaagcacaaaacccgcaaaaagcataaagctcgggggttaagttacaacacacccccaatccgaggaaaaggtttaaaaaacactgcaaactgttggaaaataactaacaggtcagcccaaccgattactanatagggggggcgcngcgaaaacacagggccctgggggaatagacatctccgggcagaaggtataaaagtgaccctaggggctccaattgtaccggcaaacgcggcaaattttctccaggggaaaagttacggtcaatccctcggagtggattcttaacgaccgactacaccaccgctgcatcaacaagggcgagggctcttcaaacccgctccaaaagcgggggccccggggctcctcagggtcgggcatcccaacaagacccctcaaaaaacc

SEQ ID NO: 126900 - DNA, 528 bp, Arabidopsis thaliana columbia
  unsure (1)..(528): unsure at all n locations
nnnnnnnnnnnnnnnnnnnnnnnnnnnnnnnnnnnnnnnnnnnnnnnnnnnnnnnnnnnnnnnnnnnnnnnnncttttgttttttgttttttccataaaactttgataaattttaactaacatgcagcctcacatatagtggttccagttttataaaccaaccaactccaaggctcttggccttaggacttatacaatgtttaaaggcaaaacagtctagaccctatctcaaagacttttggagagggtttttgaaaacatcccctgatgccaaggctagatcagttgcaaacaatgccggtacaaacatacacagatggggaagtgggacttgaacccggagcctatgtctgcccagccacgtgccctccggtggagaaggccactgtagccactatcaacaccactatgagcttgatcttcattgactccatttgtcctcttttgcactaagaagatgttaatctagccaatagaatatgagatgatgcatcggtcttctctttggcggacgcgggggccgacccg

SEQ ID NO: 126901 - DNA, 531 bp, Arabidopsis thaliana columbia
tttaggtgacactatagaagagctatgacgtcgcatgcacgccgtacgtaagcttgggatccctctagagcgggccgccctttttgtttttgtttttttttttaatcctaggtccctggttggccaaagaatgttattggacttggaaaaggggggggcctttccattcttattagaattttcaaaagaagcttcaccaattttttgaaaaccacttaaaaaaaaaataaccccttggttaaaatgggtaaaacctatttaatggttttttctcgttaaaaaccttattaaaaacacttagatcaaagtttattattaattcagcttctgacagacaacaaagaaggaattgcacccaagttgggagttgggttcttgcttgaagtaaaatctgaaattgtacggcctcttttaccaaagtaagaagaagaagtaaaagctctcattggacttgcaaatgaccatccccagcttctgttccttcctccaccaccatgacccatgttatgattatgatgatgatgatgttca

SEQ ID NO: 126902 - DNA, 497 bp, Arabidopsis thaliana columbia
aggtgacctatagaagatcttgacgtcgcatgcacgcgtacgtaagcttggatcctctagagcgggcgccctttttttttttgttttttcaaaaagactttattattatggttaacaaggttggggggaccaaacattacccttttgagggggaatattcccttttaccaaaaatcaaaagaaagcttcaaaaaactattaactggttttttaattggaaagaaattctttaatggaaggaccaaaccagaacttattgattggttttaattttccctttattaacttcatcacacttttttaattccaacaaaataaaaaaaaaacctttttttggaaaaaaggctaatgaaataccaatgcttaaagctggaggggtaacttgaaccatcccccaacagcaaattccaacacagctttatttacaaattaaggaaccttcgatcacttcaaaagtctccttccagcttgaaatggatctcatctaagctccatag

SEQ ID NO: 126903 - DNA, 514 bp, Arabidopsis thaliana columbia
agggtgacactatagaagagctatgaacgtcgcattggcacccgttcttaggctgggttcctttaaagcggccgcccttttggtttggtgtttcgtaggaggttttttggaaatcttagggggttaaaatttgaaaccacaaaagggggtcttggtaaatagacctttaaggatggggaacaaggacttgattcaaaaaagttcccttcatcctaaatcccacaaagcataaccttttgctcggtttcactatccttgatgggccttcatcatcttttttcaagcttcaactgggtcctcaaaaacacattctttgccagtaagtttacggtacacaccgaccatagtctggagcttgtactctgggtggatcttttccttggcatccaaaaagaccttcatgatcttggaaccttcaagagggaagcaagtgcgctttccaacaatctcagcggggaaagcaacatctcggacgcttgggtcgacccgggaattccagaccggtacctgcagg

SEQ ID NO: 126904 - DNA, 417 bp, Arabidopsis thaliana columbia
gcccccttccttaagctgggatcctttaaagcggccgcctttttgtttttgggttaaaaaaaaccttcagaagatttggaacagagggatgggcttaaacattggggccacgacgtttttaggaatgggaatggttaacccatacatagactttgatcacacagcataggcgatagatacggatttggaggctcccttttacatgggcgggaatgggaaacattgtagtcatcaaaaggtgatgtaatagtggaacctttctcataaacccaaactgtcgcctgaactatacttacagacggctccttctataaagactttgggtgccgatggtggatcttttatgcatgggaaaaatacaccaatggttggatcgaataacctgacagactggatgacttgcgaaatggataacct

SEQ ID NO: 126905 - DNA, 486 bp, Arabidopsis thaliana columbia
attccccccttccttaacctggattcctttaaagcggccgcccttttgttttttggtttttttttgaacccaaagtccctcgatggacaaacaataatattgaccttccaggggtggggtgccttcacattactaatagaatcatcacaaagagcttcaccaaatatttgaagaactcctacaaaaaagtgaacctctttgttgaaatggaggaacctaataaaaggtattctctccttgacgaccttattggaaactctggatcaacgtttatcatgaattaagctcctgactgacaacacagatggaatcgcacccaagtttggagatgcgtactagcttgtggaagaacctgaaattgtacggcctcttttcccagagtacgatgaagatgtaaaagctctaattggactggcaaatgaccatccccagcttctgttccttcctacaccatcatgacccatgttatgattatgatgatgatga

SEQ ID NO: 126906 - DNA, 517 bp, Arabidopsis thaliana columbia
  unsure (1)..(517): unsure at all n locations
nnnnnnnnnnnnnnnnnnnnnnnnnnnnnnnnnnnnnnnnnnnnnnnnnnnnnnnnnnnnnnnnnnnnnnnnnnctnnnngnnngggggnnnnnannnnnnnnnnnnnnnnnncccaaaaatcagttcatgtttttgctcaagtttcagaaggcttattaaaacaaaaattctttttcctcggaaaaattcaataaatttacaaaccaccaggaacctgtaaattggaaggaatgaaaaaccctcaaaagaggttttttcaaaaaaaccgagtttaaaaaaggtttgggcggaagcctcttttccggaggaagcagggaagagaaattttcatttcatgtctctagtttcagtacaacaccagggatccctatgggcgatttcggtgggaaatgctcatccgtatccactttttcgatctcctggactacatcctctcccttaaggactcttccaaacactataagttgatcattcagatccgggattggggccgttgtgatcagaagctcaaaatc

SEQ ID NO: 126907 - DNA, 521 bp, Arabidopsis thaliana columbia
aggtgacactatagaagagctatgacgtcgcatgcacgccgtacgtaaagcttgggatcctctagagcgggccgcctttttgttttttgtttgagatacacccgttaccacaaatgatttggggtttttgaactttgggtcaaaaggacaaaaaattaactcttttaagtcttttctgctacctacaaacttttttcattcctgacaaaccctatcagcaaaacaaaagggttaggaggacctctgatataggctcctgttatggccctaagattcatcatctattccattcatagtctcctccatagttaggcaaagcgttgttcacacggcttgtctcttctggtttgatggagtttgcaaatgcatgccagcctataaggtaaggcaagacaaaattgaatgcagagataagaacagcaaactctgctcgagtaattggtatgtaaatgctctcatccacattcacaagcttgttttgaacacttaggttgaagaaatgaccagaaccatctgggaga

SEQ ID NO: 126908 - DNA, 512 bp, Arabidopsis thaliana columbia
  unsure (1)..(512): unsure at all n locations
nnnnnnnnnnnnnnnnnnnnnnnnnnnnnnnnnnnnnnnnnnnnnnnnnnnnnnnnnnnnnnnnnnnnnnnnnnctttttttttttggtcggcaaaaatgggtaaaagaaattagagaaaactgagttgaaaaaacttagtctttctataaacggtgtggcttgaacagcactggcttatctggattgcatatgtaaacgagctatgacctaaccttaggcgccgagaatttgcatctgcctgggacacagtagatacagacgagcctaataaatccatactcacacctccacagaaaactaaagatatatcttgagacacgcgtgggggtgcctgtcctacttccacactctgttcctaaataataagcttcatgatcatcatgatgttctgctttaaccaaaaacgcaactcacaagaaaactggcgaatctttatatttatttacatgtcctttgacctttaatacaactctgagtggttggtctttgatattatgacatgactgccga

SEQ ID NO: 126909 - DNA, 497 bp, Arabidopsis thaliana columbia
acgtcgcacgcacgcgtacgtaagcttggatcctctagagcggcctcccttttgggtttgtgtgttttaatttggaaaaaaaagatgtggatgatccatttcaaaggtttgaaacttttttatacacatacctttctgcggatgtgggtggttctaactttcaaatataaaaatttaccaaaacaatgggtatcaatcatttcctacttgtcatttgagggcatccccactccccggcgccggaaacacctggggaaatcagcccccgaaacgatcttcaggcacaaaaccccaccacgactggaacaaattcaaattccaaaagaccttgactcctaggatacaccgggaggaagctttttcatctgaggttgataatgatgtacctgcctcggaggagatccaaaagtcgtcggacttgatccccggcgacgagtcaccctccggaagaagacccttctccgggcaatcacaaccagcggaacagccttagttag

SEQ ID NO: 126910 - DNA, 400 bp, Arabidopsis thaliana columbia
  unsure (1)..(400): unsure at all n locations
aaaaaacttataacttccaatgcccccttccttaagctggaatcctttaaagcggccgcccttttgttttttggttttttaaaaggagttgagtatatttaacaaacggacgcctttacatgacatgtatcaagcggggtcaagaaccaactacaggaaatncgttcatggacttttaggagtcatcatcatctagagaaatggacgaaaactttaacctatgctaggggtttgatggaatacattccattttccagcggctgaggactaacacggatttttcttttgagggctttccctatggcaacttaaagcctgcagtggctcgcgacgtattaacgctttgtacacattattgacgtcggcgacgtgtcactacattgaccaaggctgggtctaa

SEQ ID NO: 126911 - DNA, 486 bp, Arabidopsis thaliana columbia
ccccttccttagcctggaatcctttaaagcggccgcccttttgtttttttgtttttgagaatgggctttgttaactttaagaaacgtgcccggttcttgaaactcagaaagccggacacaggaactaaaaacgggaatggggttcagggattcttcggccgtaaactcttctaagggaattgacagagaccttacaccattctacgggttttaggtaaacaatgtctttttccaccgctgaagcacaaaccgcagtttgctttggaggttatgtttaactcaaattttagctctgaatgagatcccatgttatacaagcttttgacaactctgtgaagaagggcgacctttgactactttagccaaggctatgttctaatcacgccgacgtaaggtgatctatgctctacccactctacggccttgaccccaatatgctccaaatctacggttcgggtttgacggattgctgactccagagaacac

SEQ ID NO: 126912 - DNA, 527 bp, Arabidopsis thaliana columbia
  unsure (1)..(527): unsure at all n locations
nnnnnnnnnnnnnnnnnnnnnnnnnnnnnnnnnnnnnnnnnnnnnnnnnnnnnnnnnnnnnnnnnnnnnnnnccttttggtttttttttttttaagtctagcattaagaatcttaacccgcaagtgtattacgaaaatttaatgatgaaaacatatccaaaggaaacacattttctcttcgatgtgggaagaacgcgatatctaagagatcgaagactaagagagggtatcataagagaccgagaaacttacatcacctcttgaacaattgcctcagaaacatcattaagatcctcaaactcaacttttttggcttcatactcatcttcttccacatcactaacttcaccatcccgaagattttgcctcacgagtttctcctcttaatgcagagacttccactgcatcacccatttgtgccactcttcattcaatgccctcctctactctgtgggttgctcactcaatagcaacgacacgtcctgatcctctgcctcatacctattgcctgaattcctcaggttctt

SEQ ID NO: 126913 - DNA, 510 bp, Arabidopsis thaliana columbia
aggtgacctatagaagagcttgacgtcgcatgcacgcgtacgtaagctgggatcctctagagcgggcgcccttttgtttttgtgtttttttttttaaaaaaagggggcctggcttttccttttctaacgtataaacacccttgctgaatccaaggcttcgatttcgtaaaactaaggcttgctttatgtacacgcatccatatctaaagtttcaagaccttaaaaaccataataaaggcgtttgaaatgaaatgaattaaggccacgtgtaattacatcacacgccttttctttttctcaggggttgcgtgtacttgagctttgattccatacgttctcatttggaagttttcaaatgcctcagaaactgcttctaccaattctggttttttggcatatactctcactatcatgtcttgatatgttggtggtaacaagtgactgactctgtcctcaggtatcacaaacttctctgcactatcataatccttatagaagttgatgcattca

SEQ ID NO: 126914 - DNA, 477 bp, Arabidopsis thaliana columbia
  unsure (1)..(477): unsure at all n locations
cttccattccccccttccttaaccttgattcctttaaagcggtcgcccttttgttttttttttttgaaaattggcaattttaaaaacctttcacgttcgttttttattcccaaattaacaccgaaaaaaataactttttttaaaggtccaaaatatggtaagacctaaatgtcccttttgtttccttaataaaactggtttttcttttttggggggagaacttgggataaatatccttctgatccagtttccaagcaatgactggccaacacattctcaatccaattcttcacccctggtcttaaaattacttccaccagcaccaggtgctcccgagcctgaaccagagccattttgtctcctgaacggccaaggaagttgtatactaaacctnggcgtgtgctgaccctcaaccgatccttgaccatgaccactcctctgacttccttgactcctgttctcataaacaggatcatc

SEQ ID NO: 126915 - DNA, 516 bp, Arabidopsis thaliana columbia
  unsure (1)..(516): unsure at all n locations
tgacctatagaagagctatgacgttcgcatggcacccgttcttaggctgggttcctttaaaggggccgcccttttggttttggggtttttttttttttnaaacccacacaaaatccttttttactactttcaaacaaaagtcttattattgttaaaagacagacggttacttcttcaccttcaccaaaaaaagagtcttcatgacttttttaacaatgaacaaactaaaatgagtcatggtgatttttttaacaagaccaaactacaagtcttatagaagttttcttcggtattggaagcagtttttgcaggtcaaagcatgcaatcagttcttgcaggaagccttctgaagaaattgagaggaacggatggtagtttgtatctgaacctcggatgtctcagagcatagattccaatacaaagagccacaacctggaaaggtgtccatagagaatgactgcggcaatcaagcagaacaagacgaagagcgctgttgcacgcggatcacgccagctt

SEQ ID NO: 126916 - DNA, 458 bp, Arabidopsis thaliana columbia
agacactatagaagaatcttgacgtcgcatgcacgcgtacgtaagcttggatcctctagagcggccgccctttttgttttttgttttttttttagaaaaaaaggattaatccttaagagagaacaaagatgtttgttaaaggaatttcagaaattacatgacatacaagagcaattaaccacccttcccaaagccttttcttaagggcccaatgatggctcaaaaagtgaacatctgtgaatccagcccaagcaaaacctgaatgccatgattcaattactccggactcatcattcttcggctacatgatttgaaccggtaccccagtcactaacaccaacgggttttggagccccttggttcttcctcctggtcttaactttcttagctttcattccacgtttcttcttcactgaatccatccatttggaatctgaagggatcaagaaagggtcagc

SEQ ID NO: 126917 - DNA, 485 bp, Arabidopsis thaliana columbia
  unsure (1)..(485): unsure at all n locations
ccccccctccttaggctgggatcctttaaagcggctgcccttggggttgggggggtttaaaattttntataagggaccttgcggatctctctgggagatcacaaaaaattcaatttagctttccctaaaaaaatctatcacatcccaaaagaccaacctcttaatttgggataaagagtccacaaaatcccccacctcctccaaaagcggggttcctttaccaatacaaccaatccaaaagaagagacccaacacattgggtagtacacactttctttataccataagagactccatcttcatcaaccggaaccacacgggttcacaaggttctagggatgatctcttctgctaaaattacaaaatctgcttcttattgggataacctcgaagcaagccactatcccaaattttatgaacaaaatctctcacaaaaatgacaccatttgggtatcaaactttgactttgaacccaagcttaaaat

SEQ ID NO: 126918 - DNA, 481 bp, Arabidopsis thaliana columbia
  unsure (1)..(481): unsure at all n locations
tgacactatagaagactatgacgtcgcatgccgcgtcntaagcttggatcctctgagcggccgcctnntggttttgggttacaaatacagcacgtatacanatcacggtgagatcctcgtcacactctggtgctagattcaagacagagactctttggattctcacgacactcttatgctaactctnatcttcatttgctacaccggggaagactagaccnggctaatatcaacactggtgggtacaccgactactatatgcttagccaaagtagcacagggggatggaccattaagaatgcctcagcaactatgcacctgtgcctacataacatccctcgatgcctggaatctctacgatcacaggaactctcatctttgtgctgggcaagaaacatgcttgctctgctttcactagagcggttgcttctgttagatagctcgagactgttttcgcaactatcttgataacctggatcgg

SEQ ID NO: 126919 - DNA, 206 bp, Arabidopsis thaliana columbia
aggtgaccttagagacttgacgtcgctgccgcgtcgtagctggatctctgagcggcgccttttgtttgggttttaacaggcttagtttattgaacgaagggcgatctttatcctatccaaatagttgtacatagcaccacgtccaaaagatacgataccaagactgttacctctcataacgtgaagaagggtggccgcttgctcct

SEQ ID NO: 126920 - DNA, 501 bp, Arabidopsis thaliana columbia
  unsure (1)..(501): unsure at all n locations
taggtgacactatagnagagctatgacgtcgcatgcacgccgtacgtaagccttggatcctctagagccgcccgccctttttgttttgggttttttaaaatggtttttttttttcttaaaagggatgccttctcaattcatttaataaggggggtttataactttcttgggcggggaacccccgccaccttattgaaaccncctcttttttttgccaggggggcaaactttaactttttctcaggggcagaaggnccccctacaattttcaaaaaacaaaaaaaaaatttttttacttgggaaaaaattttttttcccaaaaaaaaaaaaaaaaaactcgccccggcctttttggactatttttataaaaccccgatggctggggggtaaactctgtgttatggggggctggatcttcctcttgcactcaaaatgtgacccccttgataaaaaacaatgttggctcccttaaaatttttttttccccacaggggaggggat

SEQ ID NO: 126921 - DNA, 517 bp, Arabidopsis thaliana columbia
aggtgacactatagagagcttgacgtcgcatgcacgccgtacgtaaagcttgggatccctctagagcgggctgcccttttgttttttgttgggaagaactatccacagattcttttaacggggaaagcctcccttaaaaaattattgagctgcagggtttcggattccccggggtgagctattgaaatatttggttactggttcctatcaatttggatcacggggactctcttttccctgaggcgtgctttacatctggcccaactggaaagggctccagttttatctactttttgaggtttcccaatacatacctgaagcaagagcttgtttaagccatagctcaaactcttcttcgtcctcatccatcatcttcacatctatatccaatgggaacctagtggatttagatctctgcgtggtctttagtaacccaaccatgttcacataaaagcttggtctatgcgtgttgggcctacaagccattccctgacaattggcctattctgagacgtga

SEQ ID NO: 126922 - DNA, 511 bp, Arabidopsis thaliana columbia
aggtgacctatagaagagctatgacgtcgcatgcacgcgtacgtaagctgggatctctagagcgggcgcccttttgtttttgggttttttaataaaaccctttttcttaaggaagaaaacaccattccaccttgctggggaaggagacgaactcaaacttcacaagtcattattcataagaacttaataagttttttaaaaagaaagaacaaaaccagaaggctcgaaatttgttatggggaagaaaaattctgctagattccctcgtccttctcgtcctcgctgctgcagctattgttgctgctccattcacacttcaaggtagatctaggcgatccacagtacttaccaagcttctcaaacgtctgatacatcactgttccactctcttctcctagagactcaaatgtcctctctctgcacccatagtcttccaagtctacagtaatctctggcttgtatgagttcgctccaacgctcgagtgcacagctacagagaattgcttgggct

SEQ ID NO: 126923 - DNA, 483 bp, Arabidopsis thaliana columbia
  unsure (1)..(483): unsure at all n locations
nnnnnnnnnnnnnnnnnnnnnnnnnnnnnnnnnnnnnnnnnnnnnnnnnnnnnnnnnnnnnnnnnnnnnncttttgttttgggttttttaacagatattttaccaccttacatggatgctttcttccttttgcccaaggacatgtttacaacttactgggaactgttttttatcaagtcccaaataacacacctatcgtttaagcttttgataaaaagaaaaccttttattgaggatagctgggtaaatcgagagatttgctcacattagtgcaatgaaggatttctataatccactgttgccgttgatccctgtatacacacacgggacagcttactaacctgatcgatcttggctcgactgacgggacatccccagttctaggatttgatctccgttaagcatgacatacatcccgagacgtgtccactcgggacacagactgctgtagatggctcatccagacatatcgcacacgttcca

SEQ ID NO: 126924 - DNA, 519 bp, Arabidopsis thaliana columbia
tgcactatagcagagctttgacgtcgcatgcacgcgtacgtaagcttggatcctctagagcggcctccctttttttttttttttttttagataaccgaccataagaaaaactcggagttccgcggcatacaaactaggacaagccattaaatccagacaacacaggaatctgcttcagcaaccgacctacaatctatagactcaaaccaccccaaagatgctcggctggttctaggggggacaccacacgacagggaccccgagtgcttctcacgtcggaccgattggactggagagacttccctactcaggaacaaattagtccctgagctcaaaaacaaatccagaaacctagtggggatcaggcaaggacttatccacgctgtcgctgggcagacactccttacccaaaagaatggttttgggaacctcagatgcgagactgaagccagcaaacttctcctatgctggaaaccatgtgtcgaacgagtcaacgcaatgtttacatacccaaagtca

SEQ ID NO: 126925 - DNA, 524 bp, Arabidopsis thaliana columbia
  unsure (1)..(524): unsure at all n locations
acgtcgcatccacgcgtacgtaagcttggatcctctagagcggcctgccctttttttttttattctaacttcaactagaaacaactttattatgcaaacatcgcaaataacaacttaaataaacacaaaggcattacattatgaaactttattccgatagtttctcctcttaaacttaaggcacttcattacaaacgtaagtgtattgttanatcacatacacacgtaagtgtatatataaatgaaatcgtacactcatggtggttgatatattatgtacatccagtgaccagactgagtctgaaccgcttctccggcatatgaacaacaccttgagcagccatggtaacctttgtagcagcagccgtggcggcagtaacttccccctcctcttgtcgcccaccgactccttggtatccgcctcctcctccttggtatcctccccctccgtggccaccatggaccgctcctncttggtatcttcctcctccattgtcaccgaattcaccaccatgttgttcagg

SEQ ID NO: 126926 - DNA, 404 bp, Arabidopsis thaliana columbia
  unsure (1)..(404): unsure at all n locations
cccgaaagcngggacccccaaaagcggctgcccggggggtgagagaccccnaaaaaaggangggaaataagataccaggaaanagggccgcacagtaacaaaaggccctccaccaacaaacggaacaagtaagggaagaggctaaaggagggccaacacaaaacgcgaatgaagcaacccccgagggaaacaaccctcaacaggggggcgcaaaggnaaggacaagcngagaccacaaacaaagacaccccagacgggngaggagagggccccccacaagcaaaagggcccacgcagcaaggaacgcaaacccccgaagggcgccaagggcgaaaacngcgcggcccccccgcagcgccaccaaaaaacacgcgccgaaaaagcgcacaancccagcagccaac

SEQ ID NO: 126927 - DNA, 541 bp, Arabidopsis thaliana columbia
  unsure (1)..(541): unsure at all n locations
gtgnnnnnnnnnnnnnnnnnnnnnnnnnnnnnnnnnnnnnnnnnnnnnnnnnnnnnnnnnnnnnnntccctttttttttttttttaagtttaaagtttaaatatttatatataagattttaaattatatatatagtttacaaaaattacaacataatacaattctcaaaagctaaaactcttttaaggtacatcccacaatttccaaaattgaaaggacatatcaaacttctaactactactctggattggcctggtttagcttcttccgttcggtctactggccttaaccttttccggggggcaagggaaaaacttcaaagccagggggggaatggtccattccccttttaagaatgttaccagctccactaacttaaggccgaacttttgaacttttctgcaaacaacccaaggccaggtaattgcccaatcttgctccttcttggtaataccaatccttcattttctggtcaaccagctaaagaacgttccctgactgagccagtggcctacaccagctcaccaaattggcttttcaa

SEQ ID NO: 126928 - DNA, 512 bp, Arabidopsis thaliana columbia
  unsure (1)..(512): unsure at all n locations
actatagaagactaggacgtcgcatgcacgcgtacgtaagcttggatcctctagagcggccgcccttttttttttttttttttttttttttggaccaaaggaaaaaaagtcggatacatgtcactagagagaactaaaacagaatgaattcacccaaaacaaagcctttctcaaaagccgttcgcaagcaaatgtttcttcttcaggccattttattaaaattgtataccntggngaattactaatggctagaatccaggttttggacacacaggactggggagctttaattgaatacacaacacgtgcatcaaagaggcagaatcactttccaactaggcaaagagaaaggtggaggcttgatcagctgtttccttaggagcgaggcgagatcgactctgcagtaaaggctctttttggctgaattcgaactaagaacgaaacccgggtacttcccccgcaacctttttaaacagacgtagattatgaactgaaacatatcgttcccctcc

SEQ ID NO: 126929 - DNA, 419 bp, Arabidopsis thaliana columbia
  unsure (1)..(419): unsure at all n locations
tatagaagagctttgacgtcgcatgcacgcgtacggtagcttgggatcctctagagcgggctgcccttggttttttaattctttttttttnnaaaccaagggaaaaaaacggccttaatggcccttggagagacctaaaccggatttaattcacccaaacaaaggcctttttaaaaggccgttcgcaggcaatggttttttcttaagtccttttaattaagaaggtacctgggggaatacctaagggcaggtctccagtcttggaacacacaaaactggggaactttaatggaatccccacgacgtgaaccaaagagccagaaacactttccgactagtcagagaaagaggtggaggcttggtcagctgtttccttcaggaggttggcgtgatcgaccctgcagtaaaggctctttttg

SEQ ID NO: 126930 - DNA, 521 bp, Arabidopsis thaliana columbia
  unsure (1)..(521): unsure at all n locations
acgtcgcatgcacgcgtacgtaagcttggatcctctagagcggccgccctttttttttttttttttttttttttttttttttttttttttttttttttttttttttttttttttttttttggagggggaaaaaacctttttaaattttaaacgactcaagaaagtcaggtttgaaccccaagccagaaaccaaaaaaaaagaaaattttttttaaaaatcccaccgacttgaaaaaacaaattccccccctggttttatccccttttctttaaatcttcccacaatttagaggggcctttgcccttttttccggggggggaacccccgaaattgaaaaagaacccccnctttaacttgtaacgaaacttggtttttgaaaaaaggggaaattgaaaccccgaaaagtttggaaaaaaaataactgggatttaaacttttaagggcaaaaaaacgggtccctttaaggtactaaagctccttccatgtttaaagggtcacgggaattttttttttaaaaaaa

SEQ ID NO: 126931 - DNA, 275 bp, Arabidopsis thaliana columbia
  unsure (1)..(275): unsure at all n locations
nnnnnnnnnnnnnnnnnnnnnnnnnnnnnnnnnnnnnnnnnnnnnnnnnnnnnnnnnnnnnnnnnnnntccctttttttttttttttttttttggtaggaaaggaaatttttatagtcacaaatcccgaagggtattgaatgacatggggacccaaaagattctctaaccaacccgactaaaattgtgacatgatccctcaatcttaccagacaaaagtaacaagttttggtgactttatgctgaatgggaaaattacccaatttgaggtttttc

SEQ ID NO: 126932 - DNA, 527 bp, Arabidopsis thaliana columbia
gacgtcgcatgcacgcgtacgtaagcttgggatcctctagagcgggctgcctttttttttttttttttttttagctttgggcagaattaaggcctgggtgatgaaatgggtccgaccaaccgaatggagcttttggttggaaattaacttaattttcccaaagaaaaaggctaagcttattattggttaaattggaaaccttattaccttttctttacccctttggtattaaaaccaggccaccatggggtatttttggggttccattaattcttaaccatcttcctccttttaatggcaatcgtcttcttctcccctttcgtcaccatcataatctccatcaaaatccttttcatcagcatcattgttgaagtaggtgagagggttggaccagagatcttccttgataatatcagcaacctcatcatgaatctcatccccagcatcttccttatgttgagcatcagtaaaccaagtaaagaaactctcctctggcaatgcacgtttatttcctttcttatcatcat

SEQ ID NO: 126933 - DNA, 484 bp, Arabidopsis thaliana columbia
  unsure (1)..(484): unsure at all n locations
agcnngggaccncnagagcggtcngcccggggggaaaggcccgaaccaaaagaaaagacaaannncncgaaaacaaaaaacaacnncaannacannngcacacaanaanaccaaggcgcaggcnacacaaagccacaaacananacaacaaggacannacgaacnngacacngaaagaagaacttaatgggtggtgagggcganggccgaganganganaagaacgangaacaagagaaccgcgagggaagcacccacaaccgcggggcnaacgnncnggcagaagncnccaaacggcngacaganagggagccagnnggggcnnnggnggccgnngngngcaaggaaggaganngangcngccgcngcggcggcngaggggnngaagcgcacgaccagagnancgcaaaggaggaggancagccggggcgcgacagcagggggacggacaaaggacacgaaggaaaagggaagnngaaggacg

SEQ ID NO: 126934 - DNA, 558 bp, Arabidopsis thaliana columbia
  unsure (1)..(558): unsure at all n locations
nnnnnnnnnnnnnnnnnnnnnnnnnnnnnnnnnnnnnnnnnnnnnnnnnnnnnnnnnnnnnnnnnnnnnnnnnncttttttttttttttttttttggttgaagtctacatttataaatgagacccgtagacaaaaaaaaggaccccacgaacacaaactacttttgttaaaacttaattcctaaccttgaacattattaagaatggctggctttaacccaaaaaaaaaaaaaaaaaaagtttttgggggttaaaaattaatttaaaaccatggaatggttgttttgcccaccagaaggcttcctggccccaccatagtattcccgattttccgacttcccgtctgcaaatatattgggtccgctcatttcccgctttttggctgagctttgcatcttctctgaataaccaggagggattttatcagatttgaagataccattgcttgtgagcccctgaaactgagacttctggttatgtatcttctttgatgacttcacaacatgttcttcactaaacaatctgttgctgctttgcccgtttgaggttttgacagatc

SEQ ID NO: 126935 - DNA, 558 bp, Arabidopsis thaliana columbia
  unsure (1)..(558): unsure at all n locations
gattacannnnnnnnnnnnnnnnnnnnnnnnnnnnnnnnnnnnnnnnnnnnnnnnnnnnnnnnnnnnnnnnnnnnnnnnnnncttttttttttttttttttttgaatcaagtcatatacagtataggagctatcgatatactacagagatccatcaacatcaactntgtctttacaagttctcctcttatttaaatccacctaatgtaggtggctatataataatggactaactaaactggtgcggccaaaacaattaactatacagtcaactaataatttaccctgcccttgtactaatctatgttaataagccttaaacctgcaacaaaatgtttagcgttgtacagacactgttctcaccgcattctcctgacaagctatgctttggtgttctgattgtggcatgtcctgattggcagctaggtctttggtttcatctgattctcctattatttactccaaagatttggcatcagtctttgtttgcctgattttccatattgaagcgccactgtcatcatcaagttggccttttgtaatggtcaaaagggctaaa

SEQ ID NO: 126936 - DNA, 533 bp, Arabidopsis thaliana columbia
  unsure (1)..(533): unsure at all n locations
nnnnnnnnnnnnnnnnnnnnnnnnnnnnnnnnnnnnnnnnnnnnnnnnnnnnnnnnnnnnnnnnnnnnnnnnnctttttttttttttttttttttttttttttttttttttttttttttttttttttttttttttttttttttttttttttttttttttggggggggggtgggtgggaaaaaaaaacccttttttgaacttgaaaaaactttcccccaattcccggtttttatccaaagattttgaaaaaatggggggtgctgtttcctttggaaaaaccccctttgcttaaaaacccgcctcaaaaaaattttttaaaactaaattggttgaatgattcaattgaagacattttttgctcctccccttaattttaaaaaaattttttttttttttttaaacaaatcaacttaaaataaactccttccgggtcctttattaattccgcgggaaaaccttttttgaaaatttttcctttggggataaaacgcggacccctgggtcgaccccggaattccggaccggtacctgaa

SEQ ID NO: 126937 - DNA, 552 bp, Arabidopsis thaliana columbia
  unsure (1)..(552): unsure at all n locations
tgttnnnnnnnnnnnnnnnnnnnnnnnnnnnnnnnnnnnnnnnnnnnnnnnnnnnnnnnnnnnnnnnnnnnnnnngctgcctttttgttttttttttatagatgtatgtaaaattatacactcagcatcaagaaacgatcaaagagttagaggggggcattaccttaccaacccaaaccgggaaaaaccaaccaaatttccaaaaactggtcacttttttcgggtttttggtgggggaatgtttaacttaaccaaaattctgattccgcttcccaagatgatgatgatgatgaggcttacctttgaatctgagacgtggtctgagctaaaacgatgtcagaagtcgtgagagttcctgattcatcgtaatcaagttgctcgaactcatccattatcccagaaatatctttctcatcaatcttacccatttctttcagtttatacacaataaactctgcagctccaacaactccatcttcatcgagatcagctgcttcgagatcattgtttgtgattcttcgcgttaaaacccatttcaccaacgccctctgt

SEQ ID NO: 126938 - DNA, 516 bp, Arabidopsis thaliana columbia
  unsure (1)..(516): unsure at all n locations
tgacactatagnagagctatgacgtcgcatgcaccgcgtacgtagcttggatcctctagagcggccgcccttttttttttttttttttataaaaagacgttatattgatttattggctctatggttcgcaataaaatctttcatatacatagatgctaattaaacactcatcacgtgcgaaatctggctctgctgtgttctgaagtaccataggcgggattcgttcctttttgcttggagaccttactgatccgctcctacgtattgtgcgcatgatataagcatcaaaccgtgatgcctacattgcttcaccgaggcttggggaacttactcaagcttctttagccaaagcattctggagccgatgctcttcttcattaacagactcttggagcaacttcttaatgtctctactccaagcggcttgtatgaaacaagcggccctgggcttacattgctgcgagtagaacctgaaagagtgtctgaaatgtttgctgtcaagacgtatgaactggg

SEQ ID NO: 126939 - DNA, 494 bp, Arabidopsis thaliana columbia
  unsure (1)..(494): unsure at all n locations
agcnnggatcctctagagcggttgccctgggggtttaagtctactcatactaaacatggtttcccattcttattaaaatgttgcttgcaagttagaaataacagaaatccaggccctcaaaaagaaaacagaaacaattgacttgggaactatgcgatatgggtacaagaaaaantcgatctcctaatgcaagtttgaancccncgcccccccacaggcacttaaaaagcaagtgcacgtactttggtgtcaaaatcgccaccacgttattccgagaaccaggaagatacaagggattcagaagaatctttatataaagctcatgcaccctcttgaaagaaaccttttgatgccgtcctcattccgtgaatcatgaaggagcatcagtcgggtatggcctgcggtaacatatacctgacacaaccagatcggtaaacctgttcactgacttcaggaacatggcacttgtagcccatgctaggtcttggacaaca

SEQ ID NO: 126940 - DNA, 547 bp, Arabidopsis thaliana columbia
  unsure (1)..(547): unsure at all n locations
nnnnnnnnnnnnnnnnnnnnnnnnnnnnnnnnnnnnnnnnnnnnnnnnnnnnnnnnnnnnnnnnnnnnnnncttttttttttttttttttttgattngcgngnntaaaaaaaaaaagacatatcattcaaatgattagtcagtaacatgttcaatacatcacactgtcctaaccaagataaatatggctgcaagacatttaagagagatcatttaaatagaagctacttttttatgaactttgtaacttctaatccaatagccgtaaaggccaagaccgctaccgcaaaaccgtgaccaccattccaactagttccacgctttagccaaatgactaccgtacaagatgttaaaactagctcaggtgaacagaagacttcctatgttatgatgataccaatcccaatattttcctgatcacgagtgcttatccggccgatctagcactgccagcatctgaagaacgcccatgacaagtatggttatcccaaggcctttgtgcttggaaacattattggccttgagccggttttcaagaaccaaaccgt

SEQ ID NO: 126941 - DNA, 552 bp, Arabidopsis thaliana columbia
  unsure (1)..(552): unsure at all n locations
nnnnnnnnnnnnnnnnnnnnnnnnnnnnnnnnnnnnnnnnnnnnnnnnnnnnnnnnnnnnnnnnnnnnnnnnncttttttttttttttttttttttttttttttttttttttttttttttttttttttttttttttttttatccaaaaaaaaaaaaaaaaaccctttgttttttacccccgtttttattttagccacttttggggggaaaaattaggcgacttccccctttgttcttcctggggaataaaaatggttttaagggggggggtttttaatttgggtttaaaaagattttttggaatcaaggttaagcccaagtttaagattcttggggatcctgtttccaaaggggtttggtttataaggggtgaacccaaaagggaaaagaggggttttaaagaggaaaagcccagggtccttaaaagacttgtcgtttttgtttgggtaagttcgttttttaaactaacccaggagggagtttttgggataaatccccatgtgttttttactcgacagggacccagccttgttgttgtttttaagggtttgg

SEQ ID NO: 126942 - DNA, 489 bp, Arabidopsis thaliana columbia
  unsure (1)..(489): unsure at all n locations
nnnnnnnnnnnnnnnnnnnnnnnnnnnnnnnnnnnnnnnnnnnnnnnnnnnnnnnnnnnnnnnnnnnnnnnnnctttttgtttttttttttttaataaaagcagagctaatatatcatgatacgaactccatatcacctgatagttcaggcaaaaagagaaacatacactctcatcttcaatcgactttactctcattcttatgagtgcccaatttcccgatgaagaggatctttttaccggggtgaaccacaacacatttaaccaaactgagtacagacctggcgatcatggccaatgaggatgccgactcctaacttactatgaactcatggttagacctgaaccgctatgtctaaatgcctatagacatacccgggagactcaaagcaaactaaagcgtctaattttccaagaaagtggctctatgagttttaataatgaggcaagcaccggctaatgaaccacctgtagagaaaacgatataaga

SEQ ID NO: 126943 - DNA, 449 bp, Arabidopsis thaliana columbia
  unsure (1)..(449): unsure at all n locations
ttaggtgcacactctagaagagctctgacctcgcatgcccgcctacctaagcttggatcctctagagcggccgccctttaagtttaggtttttacaggtaaattctttttttcttccgcaggtacctacccaaaccttgttaccacttctcctttccctaaaggatgggggtgaggggacctctacccaccttctcgggcggcgaaccacccccgtcgcacagacccgacttttaacgtagttattaaancngggggaggcgcgggcggtgaggntcaatgccncggacgtacacaacgccacctgatgcagactcttagagcaaccggggaaaaccggaccggtaccggcatgcttaccccctctccctattttgagatcaattatagcctggccccaagacggaaaaagctgaaaactgcgtgaaaccgggtcccctaacaattcca

SEQ ID NO: 126944 - DNA, 277 bp, Arabidopsis thaliana columbia
  unsure (1)..(277): unsure at all n locations
cgtaagcnngggacctctagagcggtcgcccggggggggaaggccccgaaaagaaaaaaaagaganggggaagggggcaagatgacaaaagaaagcagaaacgcgcgcnagacacgacgcacgacgggaaacagagaaaccgacacaggagaccacacggaaaacgcctcgacgccaaaagaaaccctgcaagagagaggacgannaacgcacaagagcgaaaggagacaccccgggagacggaaagggaggggcccccccacggnggacaaaaaga

SEQ ID NO: 126945 - DNA, 549 bp, Arabidopsis thaliana columbia
  unsure (1)..(549): unsure at all n locations
nnnnnnnnnnnnnnnnnnnnnnnnnnnnnnnnnnnnnnnnnnnnnnnnnnnnnnnnnnnnnnnnnnnnnngtcgaccagggctgccacttcggtttcagcagggtttccagcgcgcgactgcgccattccaccgccacgccgaggaaatgcccctcgtcgacaatgggattggcgatcagctgatagcgcacaccgcaatggccgatctcgcgttcttcacgctggcgcactccggccaggctggccagtgccggatgcaggcgtaccgcatcgctccccaccagatcttcaagccggagttcaagctgttccagcagcgccggattggcgtacgccaccaggccttcggcatcgaccaccatcagcccggtctgcgcactgtccagcgcctggcgcacgcgggtgttgccgcgcgccacggcacgctcggtttcgatgcgcgcgcgcaggcgctgctgcatgtcgaccaggcgtcgggccagctggccgatctcatcgttggcgttgtagacgcgcagggtggtgtcgaggcggtcgtcggcgatgtc

SEQ ID NO: 126946 - DNA, 523 bp, Arabidopsis thaliana columbia
cacttcgagagtatgggtcgacgcacgcgtacgtaagcttggatcctctagagcggtcgccctttagtgagatctcttacccgggatattccggactctggtttcctgctggcgggaaaccaaatgtgtatcaaaatacaacaatttgttaacaattccagacgcaatcttttctaaacagcgcaaaagaccaatccaattccagaaaagacaacaacctttcctgattggggataaaaaccctaaggcgtggagacttttgcaccaacttttataaaaggctttgtagctacttcacgtttatctttagggaaacctgttttaaacttttttggaaagacttggataacgcccttagatagcttgaacgccaagctgagcaaagccctaacaggtttaattaccgcgaaacgagaactactcggaacgttcttgataaccacatcgaactgtgttgggtcctgcagtacaggcggggggccaccagggggtggaacaacaacccgcggtggtgaaggggcta

SEQ ID NO: 126947 - DNA, 547 bp, Arabidopsis thaliana columbia
  unsure (1)..(547): unsure at all n locations
nnnnnnnnnnnnnnnnnnnnnnnnnnnnnnnnnnnnnnnnnnnnnnnnnnnnnnnnnnnnnnnnnnnnnnnctttttttttttttttttaagaagaacttggaagcttttaatccatttaccttgttagaatgctttcttccccccccccaacccaaacaatttttaatcggaaaagatctaaaacccccccaaaaaaaacagagtaagaaactgaagccgatcatttttttttttgggcaaaggccaaagcttcaacggaaggggtaaccctaaacaccctggctgaaccattttcaggggggggaactacttcccatttaccttttgacttaagcgggttgaatttttggaccccttcggttggacaaaccaatggaaacattgtggatttttggggatgaacccgttttaccaagggatggaacttccaattggttaaaaaagcttgccaattttccaagggattggcttttgaaccgaattcaaaggttggcaaacttaagaacccttatggaaccgtcattaaacctggggtatataattgg

SEQ ID NO: 126948 - DNA, 551 bp, Arabidopsis thaliana columbia
  unsure (1)..(551): unsure at all n locations
nnnnnnnnnnnnnnnnnnnnnnnnnnnnnnnnnnnnnnnnnnnnnnnnnnnnnnnnnnnnnnnnnnnnnnctttttttttttttttttaggttaatggaggatttagtaaatcattttagattccggagaaacctacggagatcccaaaggcaaatctggggtcaaaaaactttactgacaagtttggcttcctttttcacctctcaaatctgaaatctctctcgtttccttcaaaatattacaggtctcaaagctcatgccatctgattatagtttccgacagaatctgaataataaaatgaagaatcataataatatgataaaattcttaacccataatgaatctttttattctatttcctcctcagcccaagaaactgttggatactcaaaaacacctaacatttactatcttgacatctttctctccttagatgagtcgatcggacaagcttggcaaccgccggaaaaaattgagactagccgtaggcattgtgtctcggaacatcggatgccgaagataataaaaccctagagccaccgccaccat

SEQ ID NO: 126949 - DNA, 402 bp, Arabidopsis thaliana columbia
  unsure (1)..(402): unsure at all n locations
taaaaagaaaacgggacaactaatcaaatcgagccggggaagggaaatttgagttcctcatgaagtggggacgggccaccccgnggaaccaaaaccaaaaaacgcccccccgcgccaaggggggggggggggacccccccccgccccacaagagggaaaccgcancaaaaaaccaacaagaggggggccgggcggaagacacccccccggaaaaccgaaacccccaaaacaagacgagccgggacccacccggacacccaacccgccggaggcggggacacaaaaaaaccccacaaaaaacgaacggcacacggagaaagaagaaaccaagccccaaaacccccggacacggcgggaacccaaagcggccgcaacgcccaacgaaaaagacgaacccgaaac

SEQ ID NO: 126950 - DNA, 279 bp, Arabidopsis thaliana columbia
  unsure (1)..(279): unsure at all n locations
cgcgtacgtaagctgggatcctctagagcggcttcncctggggggngaatncnnaaaaagaaggnngngcnnnnngnngggggcaccaaataagaacccatagaaaaggacctaggaaacgaagcaaaaaaaactagagtttgtcttaacattacacaacacaaattgcaatgagtcttgaaggaccaacacctccttttccggggganaaannnggcaccaaaacanannnaaggaagagacaaaccngagcaaagaaggcccagacgcaggcagaga

SEQ ID NO: 126951 - DNA, 544 bp, Arabidopsis thaliana columbia
  unsure (1)..(544): unsure at all n locations
nnnnnnnnnnnnnnnnnnnnnnnnnnnnnnnnnnnnnnnnnnnnnnnnnnnnnnnnnnnnnnnnnnnnnnnnncttttttgttttttttttattgaataacgccagatccggtcttggaggcgtagggttaatacataaatttaactggatcaaaagaagaattacgggtggtgataagtgttaacagattctaatgaaggtgcgtttataatatccgcactacactggagctgttcgcgagatgggtaaactatacagagcattttgactttactaattcgcaggagtagcttagccctatgaggctaaaacctgaactaaaaaagttaatggctttcagtaggcatttaaaaagcctgaactactgaagaggcttgttgtagaatgacgagcccggattgtttacattgaccgggaactaaccggactaaaagaagtcttttaaggttaacacccgagatgcgttgttaaaataagttcaaaagggactctctccggatgcgcaaatggtggctgatggtactaaccaccggaatgtaggcc

SEQ ID NO: 126952 - DNA, 357 bp, Arabidopsis thaliana columbia
  unsure (1)..(357): unsure at all n locations
cgcgtacgtaagcttggatcctctagagcggctgaccagggccggacactgccggccgcgccatgcaccgcgtggtcaccgacgagaacagcgatccgaactcgccgctgttccgcaagaacacgctggatgagatgactgttggccggacagagaagccggtacgcggcgccgtgccggaaaaaccggctcttcccggtgctaccaaccggaatgacgatgccatcatccgccgcgagcgcagcggcatcggctcctatgaggacgcaaacgatgcgcgcaagaagcgccgaccgggcaaaacgggacgtncggggcgggagatcagaatactcacccccctctgggctggcgacg

SEQ ID NO: 126953 - DNA, 497 bp, Arabidopsis thaliana columbia
tccggggtcgacccacgcgttccggacttttttatcttccgccttctttaatctccctcgtctggttattcttttgaattaccttggattggagcccattattaccagtggcttaaagaatatgggggtggaggtgggtttggctttttggccccttaaaatatttccgccgttttgtattaaaatttgccaaagggccagggggtttattggtggaaaaggcctctgggaaaaggccggaaaagtgaattccttatccaacttttgcagcatggattctttaattcagttaataagtctacctggaaacttgcttgggtcgccgttggtgtaataggcaaggttaatgttccaggaattattgtaccattgattaagtaaattaaagaaccgctaggctttgctggtcttaaatacaaactttgggaccgcgactagcagaacaaaaaataaaaggggcggccgttttagaggatccaggcttacgtccccgtgct

SEQ ID NO: 126954 - DNA, 517 bp, Arabidopsis thaliana columbia
  unsure (1)..(517): unsure at all n locations
gataatnnnnnnnnnnnnnnnnnnnnnnnnnnnnnnnnnnnnnnnnnnnnnnnnnnnnnnnnnnnnnnnnnnnnnnnnnnncttttttttttttttttttttattttttttttttttccaaaaagcacgatggatcacttcaccacatgggcatccaatgataacagctttagtcaaaatccaagaaagagaaaaagatcacatagtataacatctgcttatgtgagactttctgcttctactaagacacatgtatttgttattcatcaacttcgaactgaaccagggaagagagagacaacaactgtttatcaagcatcgtgaagtttgcagatggaaatttttgataaccaaatcgacctaaaacatcccaacagtagagacaaaagaaagtgctttggatcttttaccattggaatacacccgagaatggaatagaaactaagaaattactgcaaaacttgcaatgtgattcgttggttgaaaaggaagtcctgttcttggaatgtatgcgtta

SEQ ID NO: 126955 - DNA, 391 bp, Arabidopsis thaliana columbia
acccgcgtcggaaaagggggaaaggttaccgagggaaaggccgggaaacaccccggggggaagccggcggaccttcaaaccaaccaaggcacacctccgaccaaaaccggcgccttaaagggacgggggaggtggggcccgcacccagagaagagaaggggccggggtgtcctccttaaaggggggggacccacgggggggggcgacggaaagaaaaagccgggccgaaggaagcggggcccgccccaaacaagaagaagcgggggaaacgagaaacccccacgggggggcgggagccgcagcgaaaaaacagagaccccgggcggagaggagggcgacccgacgccgaaaagggggggacacagggcacacccccaccccagacgagaaa

SEQ ID NO: 126956 - DNA, 465 bp, Arabidopsis thaliana columbia
ggacccccaaaagcggccgcccttttttttttttctttttttgaaccaaacagggaaggggggggaggcgccgttaacacacaccaagatccccaagaaggaaaggaaagagacccaccgccgggggataggctcagtccaacaataaggactgggcagggcagcgacgagaagcacttttttacagcggggaaggcccccaaaactgacacatcgtagaaacgggaaacggaacctacgagtacgcaaaccgagcaccagacccgctaaaaccgagcggaagggcggcgggggaccccccaggggaagcgctcgcggacgaaggacaaacccgcacgggggaagagcaaagagaggccccggttccagggggagagaacggaacgaggcgggccgcgaacaagaacgaaaaacgcccacgggagaaacacaaccagaacgccggaagggaaagggagacggaca

SEQ ID NO: 126957 - DNA, 515 bp, Arabidopsis thaliana columbia
  unsure (1)..(515): unsure at all n locations
agtaccggtttgngattcccgggtcgacccacgcgttcgagcacttactgaccactccattgtggatcaggctctcagaaagcatgggatcatctgcgttgaggatcttatccacgagatcatgactggtggacctcacttcaaggaagccaacgactttctgtggccatttcaattggaggcaccactcggtggccttaataagaagagaaaccacttcgttgaaggtggtgatgctggaaacagggagaatttcattaacgagcttgtcaagaaaatgaattgatgaaagctttcttctttatctttgccaatttcaaagattttgggaccgaatttttttttttttttgtcaagttattagagacttgtgaacttttatatcgaaatagcgttgttttgacttgtccaaaggaaagaaaaatccggaaagatctggaaaaaccatagctgggcggccgtttttaaagatccaagcttacgtacgggtgcatggcaagttataactttttttt

SEQ ID NO: 126958 - DNA, 511 bp, Arabidopsis thaliana columbia
  unsure (1)..(511): unsure at all n locations
nnnnnnnnnnnnnnnnnnnnnnnnnnnnnnnnnnnnnnnnnnnnnnnnnnnnnnnnnnnnnnnnnnnnncgcccttntttttttttttttttttttttttttttttttttttttttgagtaggcataaaaagcctattttgggtaaaagatcacaaggttttgataacttggaccaaaaaaaaaaaaacttgggcccaaaatttttggaatttgcaaagataaaaaagggagctttcattaatttattttcctggcaagctcggtgatgaaaattttcctggttgcaggattaccccctttgacggtatgggttttttttttttttagggccccggggggggcctttaattgggatgggcccagggaggtggtgggtttcttggaaggggggcccaccggcattgttttcggggttgaaatcttaaaggcaaataatcccttgctttcggagagcttgatccacatgggggttgtaagtaagggttcggacccgtgggtcacccggggaat

SEQ ID NO: 126959 - DNA, 481 bp, Arabidopsis thaliana columbia
gcagtaccggttcggaattcccggggtcgacccacgcgttccgtttggaccgcctggtacggggaagacaatgctggccaaagctggaccaccgaggctggggccaactttatcaatttttcaatggccagcattaccttcaagtggtttggtgagggagagaagtaccttaaagcttgtttctctttaaccagtaagatagcttcaagcctcatttttgttgatgagggtgatagcatgctgggaagacctgagaatccaagaaaacctgaagctatgcctaagatgaagaaccaattcatgataaactgggaccgcttacccaccaaggattaagaaagggttttagtattggctgcgtccaacagaacatttgaccttgaccaagcaattattagaccgcttccccgaaaggtgatgggttatttggccgattcaaccaaccaaaccaagatactggacctgatttttgccaaagaag

SEQ ID NO: 126960 - DNA, 484 bp, Arabidopsis thaliana columbia
  unsure (1)..(484): unsure at all n locations
gacgtcgcatgcacgcgtacgtaagcttggatcctctagagcggccggcccttntttttttttttttttttttttttttntaaagaagaaaggtaattaaatttggggttttaaaatttttaaacttttttttcctttttttttttttttggaaccttttcccttaagcctttaaattgagtggacctttgaatttaaaaattttttttggaaaaagaaaaaaaaaaattggaggcgcttccaaccaaaccttttttaaaacattcaagaaggggccggccttttttttttttaattctttttggccaccatttaatttggagagagattnatntttntatatatatatatataaaacctaccaaaccccaccctttttgttttctttttacatgaagaacctcagggatgtttttttcctggagcctccttctccataaagctcgtcccatggctggagctcattcatgttcgatgaatcaaa

SEQ ID NO: 126961 - DNA, 518 bp, Arabidopsis thaliana columbia
gggatggttttggggacactatagagaatcttgacgtcgcatgcacgcgtacgtaagctgggatcctctagagcggccgccctttttttttttttttgtttcggccggttagtaattgtgcgagctagagagaattaattaccgcatccataatggcaagatttagcaagagaaccgcagagcaggaatgcttcttgaaagcagatacggtgacaaatgtagatacaatgctgtaaaagcatgccacggataatgctaccacaaagtatctacacattagcaaacgaaaaaagtggatttagttaattaaatactacataaattaaaagatttatacgatatttaaatcatctgatacaaagatgttttttaaaataggttgacaaaaaagaaagaaagaagctgctttatcattatcactgaacatttactataattttgagtctttttcgttaactaaagttcgccaacttacttttgactttccacaacctttgtttcgaaattcaactactccc

SEQ ID NO: 126962 - DNA, 425 bp, Arabidopsis thaliana columbia
agtaccggtctggaatcccgggtcgacccacgcgtccggagaaaatgggattccgatggaaggacttgattacccttctcatgactctatccgttgtctaatagtatatccacgtcatagtcgccgatgatcctgctatccggcaagaactgcccggtcgacgatcatgttcttcctgagatgacatgacatctaccgtcaagactgcgtcctactattacttagtgactgtttcacacgggaagggacatgcacgggattccgttaccagtcgttgtagcgtctggtcatgtattatcgtgacaacggatcaagtgacaacccgggtaggctatgggcaggtgtacccggctattgccttcttggcgatgcgatggactactggctgatgaccctactgggggtgctgcccgcatcactgcggt

SEQ ID NO: 126963 - DNA, 517 bp, Arabidopsis thaliana columbia
  unsure (1)..(517): unsure at all n locations
cgnnnnnnnnnnnnnnnnnnnnnnnnnnnnnnnnnnnnnnnnnnnnnnnnnnnnnnnnnnnnnnnnnnnnnnnnnnnnnnncttttttttttttttttttttcgaaacctataaccgaaccgtctctttgattgttttctacgatctcggtcttcggactgaggctaatgactggaatagagtcttgcttcggaagataaggatgcgtttccgagatacctagttgggaatattaacacttgctgaccgatatcattgacaccaatgcttccaccctcttgggaacacctaagggaggcagtgtgagattccttgacggaggcctatccatgaccgaccgtttatcgagatctacattatccaatcttgcctaccgtcatgttgcactcgatgtcgaaattactgccgggagtagaacgaattatgaacgtactgttggcttcaaagggccatggatgctgaatcatgatttgcttgtgtataatggtgctcactccgactaacgcttaagatccat

SEQ ID NO: 126964 - DNA, 446 bp, Arabidopsis thaliana columbia
acccttccgggaaaaccaaaacgaaggttgggcaaatgggggacttctatttatcaaatggaatagggcgcgttacccttatgaaagtggggcgagggggcttgaagcttgaagaaacctcccaattactcagccgctggcctgtggtcattttcggaacatctccaaggcgtccaatgtggcctttctctattggagacctcaacggggcccaccacaacggattggtaaggggggtaacaaactctgctggagggacacgacatgcattttcatctgtggcaccctcatggggaacacctgattaggagcgggcttcacatcagcaataatgcccggtcgggtaatatcgactactcaatccgacaccctcatgcaaccgctactttatacttggggagggggattggacaagaagggaccttggtagggctacaccggtcctg

SEQ ID NO: 126965 - DNA, 486 bp, Arabidopsis thaliana columbia
acggcgcaggcacgcgtacgtaagctgggatcctctagagcgttcgccctttttttttttttttgctcaattggaatctgaatatttatgactggcctttatcgtgagtgtgctggcacaatgcaaatctaaatattgatgacgtggcctttagcggcaatgtacacagaagtaaatactaatttgcgacactgaagcgctatttatattttctatgacaacaatatgattggattaaatgggcgacctacactcattgatcttaggtgctcttccgagaacacaatgtagttatgtctgctcccgtttctttgacctcaccccacaagagctcgtagagacctattatggtccctactgatccaatgacactttcgaggtataaaggagtgtgtaacataaggaaatcgactggagtctgcgatctgagagaaactggcttaattgctgatgctaaaacagctcctaatctgtgtataccccatg

SEQ ID NO: 126966 - DNA, 574 bp, Arabidopsis thaliana columbia
  unsure (1)..(574): unsure at all n locations
tgcaggtaccggttccggattcccgggtcgacccacgcgtccggtgttgctcttttttctaaaaaaaagccgagctcctgctaaggccatggcatgcgtatgagactagctgatgagcatcgccaaggtgagtatggtacctgacaggtagaattttctatgcgctgatggtcttcttggattgatctagagatccgcagagtgctgtaaacgggtagaagtgtgcgtggaagaatagtggtntcatgacgccagtttagcgtcttggaaagaaagccctgatgagcttgtgctataatacgcaagtcttttcgaatgtgatcgcatcgctgagaatggagctatggttatggagacagcatgcgcttcagtcatttccctgaaagcctttaaaccaaatagtgagcgctatactgatggcgcttgagcgctggtctggatttatagacatgatgactatgtcttattgcatggaatcacatgtgaactacatttgacaagaacatacctatcaaccttgtactcgccgtagatgctgaggttgttctcctcggtggccccgagtactacagaa

SEQ ID NO: 126967 - DNA, 531 bp, Arabidopsis thaliana columbia
aggtgacactatagaagaactatgacgtcgcatgcacgcgtacgtaagcttgggatctctagagcgggccgccctttttttttttttttttttagaagggaggttttttaaccttggccaaagggggtaccatccaacaaaggtgaccatctgggagcctctaacaaaaatacaaatggcctagaaagtgggaagctttctcgcaagtcccagcatataatggaaagaaggtggttcccaaagggatcactgggattcttaaggagggtatcaaccaggactttctccgttacatacgctgggataaagaacccaagcatcgcaaacatggctaatctcccgtcctggacctctttgactacgagaagagctccttgctcagggtcctaatcaaggcctagaggatcaaatggacctcctgggtgtagttcgccctcgaaatccagcccgtgggtgattttgtagtactcggctccaccgtggagaacaacctcatcatctacatcgagaacacggttgatagggatgttc

SEQ ID NO: 126968 - DNA, 277 bp, Arabidopsis thaliana columbia
  unsure (1)..(277): unsure at all n locations
tgcaggtaccggtccggaattcccgcgtcgacccacgcgtccgtcattattgctcacctgggatcaaagctcaggaaattgcagagctgtcgcgggatgtctatcctaaatgcctagatggatcatggagagagcttacattgtcaagggtgaaatggtaggcgcagacagaaacatcttgaagccacagcntgttgcatgcggagactacgcgagcagcgttgtgtattacgatgctacgatgcagtgctgactactagaaagagaatctcatgtt

SEQ ID NO: 126969 - DNA, 503 bp, Arabidopsis thaliana columbia
ttgacgtcgcatgcacgcggtacgtaagcttgggtccttttgagccgcccgcccttttttttttttttttttttacccgggtcccaactctggagacaccagggaggagaaatgaatacccttgcttgggatcgaaaaggacataccttggtacttggccgaaggccaaaatcaaaaaacaagttgacttgggcttaacccatccctcattttatatcccacccaagaaacccttggggggtttggcgcccccaatttgaacatctcgaaacggccatgaaacatcgctctgcctgagccacgaaaccggggggctttcctcacaaaggaaccgtaaccccaagggtggtttaacatggctcaacccacactggggggacccggtggtccccaatatttacaatgcttaactgtgtgtcccgaccctgacattcaactacaattggcacctgtgttgacacaggctgggcattgtggatgacaattttttactttaagcaaag

SEQ ID NO: 126970 - DNA, 487 bp, Arabidopsis thaliana columbia
tcccgggtcgacccacgcgtccgagaaattaaggacaagcactacattgatctggatgttcttagaatttttcccacgagaggcgttgctaatatcgatgctgcttgtaaccgttaccaccatgttcatggcgaggaaattctcacgagtcttgaagaaggacatgtatatgacaagtgacttgcacttgcgaggtcaattcttctgtgcttgacgtgaccagagctatacttggtcgatgttcgccgggcacgccctcgcgtagctggaactgtcgaaggagtactcactacaggaagctgccgcgggatctgagattgacttgagggtcattgcagaggagtaccagctcatgaacagcattcctttggagaaagctattaccaaagacactcgggtagattacgagaagatgcccgccgatcttctcggagaagatgatgcttaatcaatctatcctccacagagaaatcatctcggctctaca

SEQ ID NO: 126971 - DNA, 496 bp, Arabidopsis thaliana columbia
  unsure (1)..(496): unsure at all n locations
ctatgacgtcgcatgcacgcgtaccgtagctttggatctctagagcgcccgccctttttttttttttttttttttttttgaggnnaanggaaggcaaagcgccctatttgattacaacctaaaaaaaccacccgggtgcctaaggcctccgtttttggctttcttagggaccacaaaaccgaaacaaaacaaaacaagggttttgggggaaccaaacccgagcgatgcgaacccctttaagaccagtgtggggggaagatgaattccctgaacccggggggccctttagttttcttgggggaggatgaaatgctcaagcatgatcccccccgacaagtgggaccaccattgtctctaaatcaagacgagggacttgcgggatcgcttcctccaaagaaaagctgtaactgcactgattctacttgccaatgaccttaaactccatatacttttttgaggaaacaatcttagacaaggctcctttattagaaccagg

SEQ ID NO: 126972 - DNA, 372 bp, Arabidopsis thaliana columbia
gggggggggaaaagccttgtttatgaggcgtgcgcgttgacgcgcggggccgtctgcggagaacgctaccataaacctcgcgatgagcactgggtacttctgagaggaagtacggggacatcctgcaccaaacgggcagaagaggcgccaagaatttccctcccttggggaggggggccggcggacgcccgaacccgaggggcagcaagcaggcacgaacacgcagcggcgggggcagaggcagacggcgcccaggggagcgagaagaggaagagccagagaagccaccgcggcaccccacggcgacccgagacacggacgcggcgcccagacgcagcgccaggcgcagaagtgagagccaacaaccggcac

SEQ ID NO: 126973 - DNA, 473 bp, Arabidopsis thaliana columbia
gagcccccagagctttcgccctccttttttttttttttttaaatggtggggggagaagcacagcggattgattagaacagaagatggtacaataaaaataccccggcctagttaaggattgtatcacacgcacttgtttttaaatgcactgggcgccccgctcaatggaaagggaaactttactcctttacgggggggacgggaacacccggggactccccggcagggaccaacaccctggggtgagcgggggcagacacacttcattttttagcatggcgttacgcctcaacaagatgccgccgatccagcaggctgaaaagctgaacagtccaccgggccccgccccccctaagactttgaacctgcattaggggtgtatcccatcacaaaacacaccgtcctcgacgtcactccaaatcttggagccggagaccgccccgaaatacaatttcccctctcggggaggcagg

SEQ ID NO: 126974 - DNA, 517 bp, Arabidopsis thaliana columbia
  unsure (1)..(517): unsure at all n locations
gaccacgcgtncgattagcttatagccagtaagttttgtctgtttctctatctctcgtagtcggcctacttcgtcttactaatagcattgtttcttcattgtttctttctgcttcactttactcgatgatccctctggcaccagnccgcgtatcatgacgtatgcaatgctgcttgcgtcgcagcaancagtctcacgtcgccgtgtctggatttccaattcgccggcgttctaatcgtccggaaattatttggccacgacgtntttaatccataaccggatgccgttgtagcttgaaactctcggcggggcgccgccttctttcatatcttaatggcctaagatgctttcctctgtctactagggaattgggtctccaaagtaggacaccgactttagaatacgaggtcacccactctccggtcggagcttcggagaaagaaccaacagttttcgaggcgtatttcgatctgggaatcgttgggatcggtcatgctgatcgggtgttgaaaagagt

SEQ ID NO: 126975 - DNA, 501 bp, Arabidopsis thaliana columbia
ctatgacgtcgcatgcacgcgtccgtaagcttggatcctctagagcggccgccctttttttttttttttttttttttagcgttggaagacgctggtcaacgcgttttatacattaaaatttccaaaattcatcaacgggttgaagcaggcttacacaactcagaagagctttgttagtaaaaaaaaggtgattcaagattcgtattcacagggaccgatcatcacaagagtgaccattgaccaataactttggttgaagttgagagtctacgcatgaaaaccgagctggacttagacgctcatggaactcgttgtgatcgttgttatggctgctagatatgttacactgcttcttccttctctgtacctcatccttgactttctgaagcatcatcaaatcgaactttggctgaccaatatgctctacagtgatggaaccaaagaggttccctaacaatgcagcatcaggaacagtcaaaccttcaacaagcccaacaatca

SEQ ID NO: 126976 - DNA, 491 bp, Arabidopsis thaliana columbia
  unsure (1)..(491): unsure at all n locations
cccgcgtgcgggcctgagagaggnttttttggatggaagaaactcgtcattgcaattaggggaaaatgggttctctacattcatacactgctgtacatcggaaagaaacatggaaagaaaacgacggttaaaactgaagaccgtgttcacgtgctgcagcaacaagagcctcaatacgtccatggtttttttttaccaccagggagaaaggctacctaggagacacctggctccaagcaagaaaaggctatcactagcccaactttcttcggtacctcaatggatggaccagaggtgagaccgaactgtggagagatcgggttgtgctagggggaagctgggactaaggcgtggcctgagagggtgataaattactcagacaataagatgcttggtggatgcgaaacacgatacccctggttcttgggggtggacgattgacctaagtgccagtacacgaggggggggcgacactaacgtaactgatggac

SEQ ID NO: 126977 - DNA, 472 bp, Arabidopsis thaliana columbia
gcgaacgaagccggggacccccaagagggtccgcccttgatttaaatctaggctttaacaaacagagagcgagccagagagagtgatgtaagagagaaagacgagcgtgagtgggtgtggttcagtgagtctgataactaaccgcagtgcgttcttgggaaacggacttcaacaccgagccggtttttcctaattatgggcgggtaccccgctccagtctcagtccatggttgtcgaagccaaaaccaaaacctgcagcgatgacagaattgcccgccactctcgtatccttaagaaggttaatggcacaacggagaggccacggctatgtgtctaccgatcaaacaagcatttatatggtcaaggtgattgatgatcccaagattcacaccttaactgcagcttccactaaggcgaacccaatctgtgagaagttagattacacctttggacaaaccatagatgtaccaaa

SEQ ID NO: 126978 - DNA, 496 bp, Arabidopsis thaliana columbia
gcctgcaggtaccggtccgggatttccgggttcgaccacgcgttccgaaaaagccgaagccgtacgttatgaaaaagggggcgccgaagaagggtttggcaacaataacttttggaaccgagatgggttggtggtaccaaccccataacccgaccatttggtttcctatttggcaacccccaccggtttgggaatttattcgccggggtttggacccgaaccaccaggacggtaacctttttattggaaggtttaatgtgtaccacacacactgcagcatggattcctttccttaccattatttgtggaacaggaagcaaactcaatacttatctagacttcgtacgagataaactaaagtgcaacgtgaccatcttccacggaggagacgacgaactcatccctgtcgagtgtagctacaacgtgaaacagcgaattcctcgggcacgagttaaggttattgagcacaaagatcatatcactatggtcgttggcg

SEQ ID NO: 126979 - DNA, 436 bp, Arabidopsis thaliana columbia
ccggcccgaccccccgtccggaaagggccaacattgtttacggattacttaggccccttgaaagggatcacattgacttccggaatcaatgggctcctattggaatggtcgatgaaatagagcagcctatttgggtacgcggttgatttatcataccaaagacttaccagttggcagatattttttttgttgaagtgttaatgggtgcttgaccagtctgctgactctaaactccatgagggctggtgctccatccttttgtgttaaaacgttgatgttaactgtatcactaatgcgtatggttgggagtaaggaaaaccgtgtattgctataatgcttgataggcgagaggcgcaacaccatactggtatatggaagttgctgagtttggtttaaaaacccttggcacgattaaggctatcgagcacatgaacca

SEQ ID NO: 126980 - DNA, 402 bp, Arabidopsis thaliana columbia
acgtcgcatgcacgcgtacgtaagcttggatcctctagagcggccgccctttttttttttttttttttttttttttttgaatacgcataaaaaacaaatgcgaatgaacaaaaaaatactccatttcgtggaaattcacatgaaacaaaaggattgccttcattggaacttatccaactattaacactttctgtaccaacccattttttataacactcgaacatgacacaagtactctcaggaaacattattttagctagataaagtcttcaagactattggagctatttgccatcctgatgttgcctgccaacgaccatagaaatttgatcttagcggtaaacaaccttaacatgtgctatattaattcaatgataaaacaatgaccttcacttaaaaggg

SEQ ID NO: 126981 - DNA, 469 bp, Arabidopsis thaliana columbia
ttaggactatgagacttgacgcctgccgcgtctagctgatcttaacgcgcctttttttttttttgggttgttgacttctatgataccgctcgccgagatgaacagttcttctgtcctcatgaagagaaagaaacaaaatagaaaaaaaagaagcagaaaaaagcctaggaggaacaatgaatttagaaaaccaaaccatgacagaaaagtctgcgggattctctggttagctctaggtgatgatatgatcaagtttcgtcctcactggctttgtatgaagggaaaagaagataatctaaaagattcgccaaaagacacagatcgttcaccgtgatggctcgcctacaatatcgtggtaaaacaaaaacgattgtactaagtagcaattcctctgtttggttgtctcttgttcacactgtaactgccaacataacctggagatgaacttctagctgaaacatctgaagaa

SEQ ID NO: 126982 - DNA, 388 bp, Arabidopsis thaliana columbia
gctggacaaagggaagataaccagggccgcaaccaacaagggatgccgaggggtatagggcccaatgtggaactgtcggggagaaaccagggcaaattgcacttttttcttagggggggggacaccggggaaaaagggaccccgggaatttttagcctgggtggagacgaccccccccccataagaaaaggggccggcaaacacacagggggagggcccgggactgcggtgggctccaccaaccggaggggaggggcctggcaacgcagcaattggaggggccgacccaaagcggagtgggacgcgggcccaaaaccccccccaaaaagcaccggagccaggaatatgccgcgacggggggcaaggggggcgctctaaaaactacgcc

SEQ ID NO: 126983 - DNA, 469 bp, Arabidopsis thaliana columbia
ggacccccaaaagggttcgcccttctttttattttttttctttacagcccctcgaggaaggaaaggcggaaatttaaggggttcgaaaaccccaaccccggaattgcccgaacacggaatctctccaaacccacggctctgtgtgggcaaaggccaaggacaagacgacttcaaaatcttttttttttggagggggaaaaaggaaccgaggcgcccccggcagaaaaacgcccaaacaaagaagagtgggggggcccctttcgggcgagcaggaaccctggccatcgctaagcggtaccgtgagactggggctccttacccccgccaccgggggctacccgggaacggccttcgggttctccctgccccaagggagcccaatgggggggggccgcgcaggaccgccggagaaaaggcgctcgtggcctgcgtggagccttctcggggcgcggtgattttccccgcctac

SEQ ID NO: 126984 - DNA, 502 bp, Arabidopsis thaliana columbia
ctgcaggtcccgttccggaattcccggttcgcaccccccttccggtttaatcaagttgtagcctttgcccttcctgaaaggtggggtgttaccatcccctatcctatctccacaagcaccacctgccccaccttcaagtgaagtggggaataacaacttcattcgcctgaggagtatggtttcgtatacgtaaaataagacggctatctaagctgatatttcccttgtctttggaggactggaaggctttgaaatcttttgctttgttatgttgtgtacttgggccttaacatgtttaagatatgatattttatagtatcgagcccttattaaggaaactggaagtggtttgttggaaacacgccatctggagaaggggcggccgctttaaagtatccaaacttacctccccttgcttgcgacgtaatagtttttctattggggcacctgatttaaatacactggccgttgttttacaacttcaggactggaaaaaccctgc

SEQ ID NO: 126985 - DNA, 514 bp, Arabidopsis thaliana columbia
  unsure (1)..(514): unsure at all n locations
nnnnnnnnnnnnnnnnnnnnnnnnnnnnnnnnnnnnnnnnnnnnnnnnnnnnnnnnnnnnnnnnnnnnnnctttttttttttttttgttttaaatttgggtttagggcctttggcctaaaaagggccccgctcctatattttatcattcggaaaacttgttggcaccccttatacccgctttccaaagcaaaaatgggcagagccttcaatgcaaacaacaccaggggaaatgtcatcttacatagcacttttattttacttttccaaaaccatacttttacggcaaatgatgcaatagtccccaaattcatttgatgggggcccattaggagctattggaaatggaaatggtgatggtaacaccgcacttcccacaaaggcctgtggctctacttggattaacccggacccatgggttgacccgggaataccggaccgtggcctgcaggcgcaccacctttacctatggtgagaaccattacagctcggcgcaaacataggaatatgttgtgt

SEQ ID NO: 126986 - DNA, 463 bp, Arabidopsis thaliana columbia
  unsure (1)..(463): unsure at all n locations
gggggaaccccccgccgaaagcngggacccccaaaccgtccgcccgcccggagaagcccaacacacaaaaccaccccggggcaggggcgggcgggaaaacaaaaaaaaaccaggcncacaccccaagacggaaaaacgggaccgcggggcccaaagggcaaaaaaacaaaagcccacgggaggcgccaagacaacccacacaaatttttttttctgttccgaagaaaaaacggcggaaagcggggcccccccccaaccaaaaacggcctagacgcactcagcctcggatcctccccaccctgaaaccgtcgggggggcccccacccgaaaaacaccggcgcgcacagaaccccgggcggcgtcccatcccggacagcacagccccgcaaaacacagcccccggggcctgacccacttttctaccacgagcgcaaacggaaggagccccccgccgggggcccct

SEQ ID NO: 126987 - DNA, 492 bp, Arabidopsis thaliana columbia
aatttccgggtcgacccacgcgttccgggaaggtacatcgtattttacatcatccttcccggatctttccaacctgaaccggctgattactttgaacaccccaaggccagctttttgaccatcggccttggctgagtatttaaattcgtagtcaaggaactaaaccatcttttccaatgcccccatccgatgtcggcatttgcttttttttttagccatttagtggtggaactaacttgcacacgccattccatgcgaatggctagatacgtctttgcttgcaaattaccacaattttgttaacctcctaggaggaacgcgatggagatatccatcgagatatgttcggaaggcaaaagaccttaccagtttcaagtacatgggtggggcattgagtctgagcagtctaacaccctgttgggtgagctttgtttctgaaggcatatagattatcccactgccgttgcacgaagggttcactgaatcgatcta

SEQ ID NO: 126988 - DNA, 500 bp, Arabidopsis thaliana columbia
gcaggtaccggttccggattcccgggtcgacccacgcgtccggctattttcacgttatttttgagggaggtttcatggagatcaacacgaatctatgacggactggagcacctggttacgagatgggctgccgagctcgccaactcaagcgtctcttatgtgggttcatcctaatgatttattagcaaatgctagatattataaaacgggaatctgattgtttgtatttgcacaatgctactgacgtgcagagttcgtatgtgagatggacgagtcgtctgtagacacactactcggacaatgtcactctgatttgatgtgctgactgaagatagaagaggggaggatatatccagcacgggactcggacatggtgaaatcctaaacgatagcgaggctatttcatgagactagtgtcatagagtgagacacttatatggcccttctaccagacggaggactatcgctgcactacgagggacatgcattgtatgacacat

SEQ ID NO: 126989 - DNA, 480 bp, Arabidopsis thaliana columbia
cccttccgtaggcttgattcttttagagcgcccgcccttttttttttttttttttttagcgggttaaaattggtgcgagctgaaaaattgatttcccgcctcgctaagggcaaataaagcagaaaacctgcagagaaggattgcttcttgaaagcggagacggtgacaaatgtaaaggcattgctgcaaaggttgcacacggtgattgctgcaacaaagtatttacacattagctaactaaaaaagtgaatgactctaatgaagtcctacataaatgagaagatctatccgatgtcccaattcattctatacacagacgttttgtacactaggttgacaaatttgaacgaaagacgctgctatatcatgttcagtgagcatttactataactcggagtgtctatcgttaactatagttttgcaacataggatagacttcgcgcaacctttgattcgaacttgggactactaacacgggaa

SEQ ID NO: 126990 - DNA, 501 bp, Arabidopsis thaliana columbia
agagagctatgacgtcgcatgcacgcgtcacgtaagcttggatcctctagagcggccgcccttttttttttttttttttttcttttttttttttttttcttacgcaatgtttttgtggcccccacagtaaaaagcccttggggcctttagaattcgtaaaccaaccttttcaaagggggcgggggggaaaccaaaacacaaaggggctggggggttttcttagaaaaaatcttgggaaacattttgtttgagaatatatcttttggtaaaaacctgggggaccgccctgtgctttcttgaccctcaaaatcccccttagctacctcttttgcttttgaagaacgcatccttttttagaacagaaaatttttgatccttgatgagggaaaaacttcgctcggccccaatatttggaaccccgaaatgcctattcttggcgaatcctttggtaaaagggaacacacccggcaaattttttattcgcatctggagcacaaaaag

SEQ ID NO: 126991 - DNA, 495 bp, Arabidopsis thaliana columbia
ctgcaggtaccggttccggattcccgggtcgacccacgcgtccggcttttttcaggcttggagaaaatgttcaccactttcactcttgaccaatgtggatctaatggagctgctgggaaggatatgctgaccgagacctatctaactgatcttttgaatggtaaagactatgtgcttacttatgaggataaggttggcgactggatgcgcgtttgatatgttccgtatgagatgtgcatagatgtctgctagaagctgaagataatgatgaggtgtgatgctataggcatagctgcagcttcgagagcaatggaggattcgacgacgagagcttaaactgtggtacatgacagagctttctaactgtacaaaatatgagcgaccatttggtggtgtttctgattttcaaaaataagtgtgtttagttgatgacttgtttggatgtattcagtgagactacgattgtgaggaatgagagaagaactaaatgtgatc

SEQ ID NO: 126992 - DNA, 250 bp, Arabidopsis thaliana columbia
  unsure (1)..(250): unsure at all n locations
tagaagagctatgacgtcgcatgcacgcgtacgtaagcttggatcttctagagcggccgccctttttttttttttttttttattactttttttataccacaaaaaaactgccgaataacttcccgcatccttnaaacccatagaagggatatgataacaacgaacattctactgctactggaaagcaaagtaaactcataactgtttgatgtttgcatgctttatctttccgaacgttctggcatatcat

SEQ ID NO: 126993 - DNA, 487 bp, Arabidopsis thaliana columbia
ttccgggttcgacccacccgtccggaacagcgggaaggcttttatcctttccaaagttactggattctggaaggacgggtggggtcaaattgatcttgttagaacggagcaggctcttaccatatctctgtctagttgggcacccacatagacgattgagctcatggaggacacaggttggtttgtgactgagtttccgattttacaggacgacattgaggctaaagcgaataagttgactcctgactggaacacctctcctcggcccgattgcgatctttatagttatcaacaccagcgtcttgaacgtatatctcagctgcggaggactgtgccttttcaagggcccgggcttcaagcaatatgttacaactgtaagtcctcctgcaacagtgcttgtgctttcaatacaacctggtccccagacacatgatatttaaaaattgactcatgcgcgacagctttttatgtttaagagctcacatgt

SEQ ID NO: 126994 - DNA, 484 bp, Arabidopsis thaliana columbia
cgtcgcatgcacccttccgtaacctggaatcctctaaagcggccgccctttttttttttttttttttaagcaattttacttatttatttaaaacgacccatgaaggccatacacttcctgagccaatcaacaaccataaaaaacaagactttcccaaggccagacccacaaggacatcaaatcgatttaacaaaaaacacaaaaccacgactccttctataaggcgacctgtacatataactagcgttgctactccatgtggaagccttcaagacctcattcactggctgtgaaccgctctccaagcagccgataagactccgagtcaagcacgctagcatacctaggacacgggttactcacatttgagctatcaaacatctaaggctgctgcgcttgagtcattcctgacatttctagtgcctggagatcaggacgtattgaaaggacaagacctgacgcaagaggatgaatagttgttaca

SEQ ID NO: 126995 - DNA, 496 bp, Arabidopsis thaliana columbia
ccggggtagatcccgcctcctgttcgatcttggttcttccggcggggttacccaaatttccgtaaaggccgtcagggcaaggggtccggattcccctgttcccaggagataagaatgtggagggttctgtaaatggggttggtgaaaggaaaaatttcaatcttgggtccgttcttgcaccgaaggcatttgatggagtttcttggaaatcaataccattagcggcgttcctttggtttctggatagctggctcctgctttggacattttttatctgcatgtggcacatggaaggagatagctctcaaggttatgctttccttgttctgggaatcctaacttttctccttggtttctacaagacccgaatggcttactactcatggagaggagctgaggggttccgttttgcagccattccctcttactgacctcatgtatctggagaagtaaagaatattgtgcatagaaaaggttttagagattgtaatccaaa

SEQ ID NO: 126996 - DNA, 514 bp, Arabidopsis thaliana columbia
tgacactatagaagagcttgacgtcgcatgcacgcgtacgtaagcttggatcctttagagcgggccggcccttttttttttttttttttttttttttttttccaacaagattcacaaaatataacaatttttggaggatttgggggtttaaaaaccaagcttttatctggctaaacttcacctgaggaaattttacccaggaaattcctcaaaccggttaagttttgttgtactttttggaatacaaactttaaaactttttctttggcccatattttttacttttccagttacctgaattcaataaaaaggaatgggttgaaaacgggacccttaaagttcttttcattaatgagaaacaatttggggtttgtcaaaacccgggagaaaagggagggtcccaaaaacaaggaacgccttaccttggaagcttttttctttccttgggcccggggagattaaaaacctccaaaggaggatccaggcacccaaaaaccaaaaaaaccacatttat

SEQ ID NO: 126997 - DNA, 381 bp, Arabidopsis thaliana columbia
ttttttttggctctcttgaaaaatttttttacggggccaggccccctaccccaaacctggagcccctataggggggcccgcccctttatttaagtagtttcgcggcgtgcacgactattttcataaaagagagaccatataaatgcataatcgcggttattacgttgattcaagacagaatcatactgacgatgcgtcgaataatgactcgtcgttaggtctgaggcattaagaaacggtaggtctcatacggatcttttgtaatggcgtatcttgtgaacaaatcgtcatgtagatcccagccgaagtattgggagcatagtggaggatcttccttcccgagaccatagacgcgttacacatcgatacattacagaatca

SEQ ID NO: 126998 - DNA, 501 bp, Arabidopsis thaliana columbia
tatagaagaactatgaacgtcgcatgcccccgtccgtaagctgggatcctttaaagcggccgctcgcgatctaaaactagtcgctgctgcgcgccgaccagctgcaccacgccgaaggcaaggacgacatcgatttcctgcagccgatcgtggccgatgccgaagccggtttcggcggcgtgctcaatgcgttcgaactgatgaaggcgatgatcgaggccggtgccgctggcgtgcatttcgaagaccagctggcctcggtgaagaagtgtggccacatgggcggcaaggtgctggtgccgacccggaggccatcgagaagctcaacgctgcgcgcctggccgccgacgtgctgggcgtgccgaccctgctggtggcacgtaccgatgccgaagctgcggatctgctgaccagcgacatcgatggcaacgacaagccattcgccaccggcgagcgcaccgtggaaggcttctacaagacccgcaacggcctggaccaggc

SEQ ID NO: 126999 - DNA, 473 bp, Arabidopsis thaliana columbia
  unsure (1)..(473): unsure at all n locations
accccgcgtccggggttgtgannngtctgtgggggggggaaagatccaantgaaccttatcagagccatttgtaagaggtctttttggataggaagggaacaatcggagaaacggacttcgtcttgtgttttgcctcaggactgggggaggtggaccaacaggtggataaaagcgaacgcgtttcctcttttggggggggggagccccgcgccaccggggggagccgagaggaaagggaagccgcaccgcgccggggaccggagccacacagcgggcccgacccgagagacaacgaccagcgcgcggaaaaggcagagggggcaccagaagagagggcaagcaacccgaacaccggagagaggggacggcaggggggggagacccccgaccgagaacccagacgcagccaaaaaaggaacaagaaggggccaagaacaccccgagacggaccgaggaacggccacgcccaggg

SEQ ID NO: 127000 - DNA, 415 bp, Arabidopsis thaliana columbia
agggggaagccccccgaccgaaggctgggaaccctctaaagggttggcccttttttttttttttttttttaaaaaggttgtttcctttaatatagactcaggcaaaacggtgaaacctgagccgggtaatgcttgttagataaatggaaaaaccgtctcggttaaacaaaattaggccttgaatggtattaggctttaaacgaagaaaaaattttttttgttcgccctgttaaaccaggcggacagggccaccaaatatagcaaggaaattgcatttggggtcgaggaccacgaagcatgtttttagtggcacaacacgaattggtcttttctcccattacgagaagggatttgtgccacgtccacccattaaccgaggggtacaccggggacaaaacttgtgctagggtttttg

SEQ ID NO: 127001 - DNA, 482 bp, Arabidopsis thaliana columbia
acgtcgctggcccccgtccgtagcctgggttcctttaaagcgtccgcccttttttttttttttttttttttttttttttttttttttttttcccataaaccggaatttttttaaggaaccggccccattcgtttccccccaattttgtaaagggcaccaaccttttaattgccaaaccatggcttgagggccccccgtacctcctatggttttaaccggggcccatttaaaaaccaaaaacccttttatttacccttaacacctggaacgggacttgttgcttttgcccccacttgatggctccccctccccagcaagatctttttgaaaaaccccaaccttggattgccaaaaacaagggaatcgatttttaaattttcaacggcttcacaaagtttctcctttggatctccccaatacacctttgctacaaccttcacttttttagccctagagagagtttcaagaacttcaaaaccctc

SEQ ID NO: 127002 - DNA, 519 bp, Arabidopsis thaliana columbia
ggggcccgcaggtaccggtctcggattcccgggtcgacccacgcgtccgctcttatattcaagcttcgattgggtctaagtaacagaggtggttaatcgaagatcttttttctcttttgagattaatagatccgtattagatccttacttctgttttgtagttgttggaaaaattcagatgaagctaatcttcgagtttcattcgacttagtttcagtttccggcagaatcgatggcttcacggcgaaggatgatagatggaaaactttcgtctcctcaggttacatgtgtattcgatgctaacacgtgtctgagatatattagcttgatccaatcttcttctctaaatgtaatgttgggccagttggacttaaaatagtctctgtaaaccgttttttgttgttgggcttttgctcgttcgttgtatgttatgttcatcttaataaaatcgtcacttgtgaaaaaaaaaaaaaaaacacaaacacacaaagggggcggccgctctagaggatccaagct

SEQ ID NO: 127003 - DNA, 496 bp, Arabidopsis thaliana columbia
tccgggtcggccccagccgtccggtttgaatagaaagatctcctgggttggcacttatctgggaaaggtccatcgccgcaggaccggaatgggattggaccttatctcataaaacccgacaggagatcttacccactcaggatctacctcacactgatctcttcaggaccgcattaaacgaagtcatcgcaatggatcaagatgaactgggtaagagatcactggtcatccatctacttcatcaggttcaaagaagaagaaagctgccacgaggcattgcataaggaaggatacagtttttcatctccaagactgagttcagttcaaggctctgatgatcctttctatcaagaacatatgtcaaagagttccagatgcagtagtcccggttagggagtctaaaactggtactagaccagaacccaacccaatgttcatagcaatccaatccatgtaatcttccttcacatttcttgtacatgtcattttctctctt

SEQ ID NO: 127004 - DNA, 510 bp, Arabidopsis thaliana columbia
  unsure (1)..(510): unsure at all n locations
agtaccgggtcggnattcccggcgtcgacccacgccgtcccgaaaaacccaaagaagaagagaaaccacaagaagaagtaatggcttcctttatggtcttcttcaccggtgggggtaccttcccggctcaagccaccatggtcgcttcattcaccggcttggagtcattcgcttcttttccgggcacccggaagggccaccaccaccttactttcattacaagccacggaagaagaagtagctgcgtgaagggggggccccccatcggaaagaagaaggttgaaacttttttctaccttcctgaccttaatgaccttgaattggcttaaggaggtgaccacccttttccgcaccaggggatttcctggggtgaaatccaagtggaaccccgagttggggtcccggaaccccggaacccttcccggttcctataatggccaatccggaccatggtggaaccttccatggttcgaatgcaccgcctccgttaaatggtggaatgaagtggaa

SEQ ID NO: 127005 - DNA, 467 bp, Arabidopsis thaliana columbia
ttccgatttttttggaaagcgcatttattcttcatccacaatcatttcaacccttttaaggggaacaatgaaacctttttcttgcttggtaccgtggttcgtagaatggctttgaaaatagggcctggcaggcactctagtggcaatgtactaaccgaggaggaagaacccgttgaaacttttttttttcggagattggtgctggtaaagcttccgaagttagctgaacagggtcttgtaaaacatccggaagggtcatctgacgaggcaaaggctgctggggcaccaccatcggcttcagctgattcggccccgaggttgccagaagacaaaatcctaacctctgcggttgaggcaggtgtggctgcaatcgtcagttcgattgctggcaactgcaatgcgcgtggaatgacccagtcagaggtccaaaactaaggagatagtccgatcgatggacttgagctgag

SEQ ID NO: 127006 - DNA, 457 bp, Arabidopsis thaliana columbia
  unsure (1)..(457): unsure at all n locations
atggnnnnnnnnnnnnnnnnnnnnnnnnnnnnnnnnnnnnnnnnnnnnnnnnnnnnnnnnnnnnnnnnnnnnnnnnnnnnctttttttttttttttttgcgaaaataagtatttggagtatagacagagaagctaaatggcatcaaactcggagcaaaaaaaaactgagacaagtaacaaagactgaagaaaagactcaaagagagtaacagcgatcgtaggatttgattacaaagtgtctgactatggaggaatgagtgatgctactccgtgatgtatacactcatcacaagtccatcgaagcatctatgtctttactcttggacctatggttgctcattgacagatgatgtcaagtaccaaccagtcgaacggacgatagcaggcacacgtggcacaaccgcatagagtctggagattgtcttctgacggctctggacctgactcaggtgatgca

SEQ ID NO: 127007 - DNA, 399 bp, Arabidopsis thaliana columbia
ccacgccgttccgcacaacaccagggcaaaccgtgggaaataactttttcctgacaaaccttttgaagaagacatttttggttatggttctacggcggtgccggctcctattaaaacgggaacctttacttggggtttgcaaaccctccttctttaggaaaccttaatcatctggttcgtacgggagctcccttattatagaccttttatttgagccctaccgttgactgattctcaagggcggcttagcgtggaagcttataatcaattgggggtacgctaattgtatgattcaagcttttgaagcttgtatggtgtgctttgtgccaaatctggaccctatacaacgggggagacccctctataggatcactcttgcgttactcctccgtgcaacga

SEQ ID NO: 127008 - DNA, 484 bp, Arabidopsis thaliana columbia
attcccggggtcgacccacgccttccgcaaactgtagctaattccttaatggtaccaccccggaagcgacaccaactctgttggggctattataggtttttatgaaagggctggaggtttatctgccttaagttttgacctcaatgctttaccaccaccactgtgtgggagctggcaaaaatggattggcagcatgtctggctcttgcttaaccgggatttgccgtcctaatgagccacttgtcaggtccgtggaaccttgcactggagagatagctgatcgttgtcatgctcctgaggaatgctaactgatatacttgatcatagcgcacatgtctgcagacgacagagttgtgattgctaaaggacatctgtcggatcggcacgtaagtatcaaagtgtatttgggcgagtgcaatgtggatgacctgtacgcataacacaacccaacactttctctaactccaaactgtcattgtgtccag

SEQ ID NO: 127009 - DNA, 495 bp, Arabidopsis thaliana columbia
cttgacgtcgcatgcacgcctaccttagcctggattctttagagcgggccgcctttttttttttttttgggttttaaattcctttaattattttgaaaccaaattccccgaagccaatggattctttttaaccggggaaccaattaacctttaaatgggggggaattccttaaaaccgactcctttaccatatttatatatttatatatatttggatttcctatcacgggtggtttttcaggttggggcaccgacttctgtctcatcatgctgattaactctgatgtacagaggctggagcatacgccgcagcaaaagatacactccatacaagtcctaaaacaactcattatggcttcggggttgacgcccttggagtttgtctccactgctgctgccggaggatcacccaccaccgcatctctagtcggataaccaattggtggcggacttgtgtacggccctgatgaagtctctgaaggtttttgcacggaa

SEQ ID NO: 127010 - DNA, 494 bp, Arabidopsis thaliana columbia
cgggtcgacccaagccttcggcttcagcttgtgcccgacaggctgcaaattcttcaacacaaacttaaccacctggaacaacacccgcaagtggtccttatgccaattccgtagatctttttccaacaggcttggccaatggtggaaggaattctggtgcttgaaccattgactttttgccccacaagccaccagttccatcttttgcaaccatggtgccagccaacccttaaggtcttgaagccattccttaaggacctggaaaaccaaaccccaacctggttgcggtggattcagaaccaccaagctgacttcttacgcttattcattgaccccgttgaaggaggggaagaaggtggcaccctctttggccaattggcggcggaattgccacagccacaggcgattcaggtcacacatgaggaccgtgaagccattgaccggcttgaagcgatggaatttgagagaccattggtgttggaagtgttctttgc

SEQ ID NO: 127011 - DNA, 489 bp, Arabidopsis thaliana columbia
tttgaccgcgcatggcccccttccttagcctgggttcctttaaagcggccgcccttttttttttttttttttatctggctgaagtaacttggatcaatcagatccgaacatgtcaggttcctgaacgttacattcctcaaacagaattccaaaaccaacaattcgcatatgaaatttcaacttagtattttactgaaaaatatacttcatacatcatcagagaagcttacatgatttgcatgatatatttattcaaaaggtttggagtttggtctgatcactgaactcgaactggaacgagcttgagaggtactttcttgactattgtaagagtaccagcttcttcagtatcgatatctttatgtgtcatcccatcaggcaacttccaatcgaagaagtaaagtaagttcaagagtcccaattcgacggcagcaatccccattggcatcccgggacatatccttcgaccggacccaaatggtaagagct

SEQ ID NO: 127012 - DNA, 505 bp, Arabidopsis thaliana columbia
gtaccggtctgggaatgccgggtcgacccacgcgttcggttgactctattcacattgttttggaaagaaccttaacccttcattaagagtgtcttggagagtatccttattatggtcttgaaaaaaagacccgagatgggcctgaaggtggacttggatttgatttaaaccaggaatgccagttgaaccacagatttaaagaggtttaaagctttgaaaactgtttctggccttttcaaagaagaagattttattttttccttggaacaccggagagttttgctttcaccgtttgggaaaatggttccggataccagggggggggttggcccccgttgggcgttgggcctggaaatttgattgaaaaagcccattacttcccccttccggggatgggggtctggttgggggagggcgaaaatttagttgggaccttttaagggcagcttttttcccaaaaaaaaacctcaccttttacaaattaagattccccaagttttggggg

SEQ ID NO: 127013 - DNA, 491 bp, Arabidopsis thaliana columbia
  unsure (1)..(491): unsure at all n locations
ggagacaaagggaaaaacacttcaagggggcgggggaagagcgccnagaacaacaccgcagccaagccagggaaacccagaaaacaaaacccgagggaaccccccgaacaaaaaaaccacccggaggagggagacaagaaggccggggacccagcccagggccaaacaacccgagggaatcctcctaaagggaggggaacccccccggcggagagggaccgagaagaaacccaaaccnaaggacggcgaggggagaacccggaaaaaaaaacaagaaccggaagacggaccaccacgaaacccccggccgaggaagaagggagcaggaaagccggagggaacccggccccggggagggcggggaaccgaaacacgcaagccgggcggaacaaacacggcccagcccaaaaggggcccaagcacgcagggaagggccagcgcaggaccccaggaggggcgacgcccccaacggaacaaaaggaacacggaaa

SEQ ID NO: 127014 - DNA, 485 bp, Arabidopsis thaliana columbia
tcgggaattcccggggtcgacccacgcgttcgggattgagaaaacgtacggagtaaaaatggagatttcgttgagcgtcggagagacctgtagctaaataaccaccggggaggcgggtgccaattagaaccagaagaagttctacgtcatgggttgctattgatgataaccaaaaccggtttcatggctcggaatggtgatggcggttaatgctaaacgctggttttaagggccaacccggaaccgggtcaggaaggcgcttactttcgttgctttgttgtcaccccaggtaccttcgatttatttaatcttcttgttgaaccggtttttgcggtttttccaacaaatccgaggccggatcaattgaggaagccccatgatcatagtccaacaacctttttacctcggccattggagatatgccgaggcaaaatggcgaagacagagactatgataggggagggagatcctaaggatatgatatg

SEQ ID NO: 127015 - DNA, 475 bp, Arabidopsis thaliana columbia
gaaccaagccgtccgcaaggtcctaagaacaatttaagagcccccgtccttctggccaaaagcattggaaataaaagggccaatggggcattaagggcccaaaagaaggagagggaaaaaaccgcggccgccaaaaaccacggcaacaaccacaataagggccaccaggccttggacgaggccagccacgattttctccttccacagcgggctggaaaaggcttcaaggaggatggccgcctcaaaagaacagggacgggtggaaccgcgagcgctcataaaataacggcggcaaccggacccggcgattagccatgggcgggggcgatggcacagctcgaatggaccgctggcccggcggggaggctaaggtccaagatggccactcttcactccgccacactggtgagggactgctacagaaccggcgaggcaagggccggcaagagaaactacactcacagggacgccggcc

SEQ ID NO: 127016 - DNA, 204 bp, Arabidopsis thaliana columbia
  unsure (1)..(204): unsure at all n locations
gacccacgcgtccgngtngctctgatacactttgcgtgatcgggaagatgaagaaaatcgttggccgattactcgacaagaagcgtgagcgaaaacacaccgatggctatccatgggtacaaggagggtaggatcaggatttgtagctctctaaaagatagcgtttctttggccgaactcatttattaccatctcgtgtaatag

SEQ ID NO: 127017 - DNA, 486 bp, Arabidopsis thaliana columbia
  unsure (1)..(486): unsure at all n locations
gagggggaaacaaccgcgccgaaagcngggagcctccagagcgtccgcccttttttttttttttttttagacgggcgtaaaatattttattcttagctaccttgctaccaagcccaggcacaataccaataagagcaccgttggtccttagaatggctacggtgagaatatcatgaaaagagtagatctgtggaacacagcctttttattccaacaggtaaaaaataaaacaggccttgctcagcgagttcagatcggattagaccaatgcctgaacacgtcccaaccctgggcatgggcttctgtcttggcctcggaatccacttcaaacgttacacctcaaacctcaaccgaactgaatacggttggccccggatcaaagctatatgagggatgcggtagctcctaaaacctccaaaggaggtaaagagacatcctgcagggattggggcaagggattaaccaccgccctcattgacagtcgaa

SEQ ID NO: 127018 - DNA, 505 bp, Arabidopsis thaliana columbia
tttagaagaactatgacgtcgcatgcacgcgtccgtaagctgggatcctctagagcggccgcccttttttttttttttttttttttttttttttttttttttcccggattacctttttgaaaatgagcccttttttttttggccccctttcctggtggggaaaacatctttaaaacaattaggtttttttaatttggcctcctaccttctttaccaatggatggattcaattcaaacccttaacttgggggaccggcttttaattaattggctttggttccaaaaggaaaagcttttggtcccaaaaaaggctactttatccttatggggtcgggctttccgggttaaggaaagtttcaaaggtttttttattccacaattttggacccaattaattggtttaaaacaaaaaacccctttggggttggtggattcaaaattagggccttttttaaaacggtggcttaccaggcaagggaaccttttgcccttctggattcttggt

SEQ ID NO: 127019 - DNA, 312 bp, Arabidopsis thaliana columbia
gtaccggtctcggaattcccgggctcgcccacgcgttcggattggtcgtagaaaaaccattgaggctttctcttattgtctaaacccaccaagtctttcaggattttagccaaaaaaacctgaggctttgattaaggacatggcaaccttcggccgtttcttggtttgtcatcaacccaagtcaaaggggttggtcctaggccctgaaaggcgcttcttttacgacccactttcctttctttctccagaacggaaactcctggaattgtcaagggcttatcttgggttgataagtgttctaaaaggggaata

SEQ ID NO: 127020 - DNA, 396 bp, Arabidopsis thaliana columbia
aactatagaagaactatgacgtcgcatgcacgcgtacgtaagcttggatccttctagagcggcccgccctttttttttttttttttagtcaaaaacacattttgtaacaacattttttcttatcaccagtgtttcattggcaaatggatggaatctgcctatcctcaatttaccagacaatgggtcagaataatataaaagaaccttctttgaagatattgaatttgatttttgggaatggtatggccaatggaaacaccaccaccacctttgggacctttggggatcgtcattcactttttaactggtccttaagttaacagaagcctttcggttggtggtggtttacaatacacaacttccggtggtgggccgttgctggccttaattcctttt

SEQ ID NO: 127021 - DNA, 480 bp, Arabidopsis thaliana columbia
gacgtggctggcacccgtccgtaggctgggatcctttaaagcggccgcccttttttttttttttttttttaaaccaaacaaattagtggtggatttaacattaccaccaccaaaattccaaaaaaggaaaggaaaggacttccccaactgtagatagtctcaatccaacattaaagactaagcaatacaatttttttttttacctgcttacatcttctaagtcccttttactggcatttcttataaactggaaacttcaccttcttctttcataattttctcctaactcgctttaccttttcataattgggttatttaacttcaaggtctagctctcttgttactgcaagttgggcatttgtaatgcttgatgtgttctgcttttgcaggtgttatcttcacacattttccatggaaccatttctcacacgcgtcgcagcaaatccagaactcatctgtaccgtagttgtctccacaagc

SEQ ID NO: 127022 - DNA, 338 bp, Arabidopsis thaliana columbia
  unsure (1)..(338): unsure at all n locations
acagcagccggcgcaagaacaaaaaaaaaaaaaacgtgaagcaaaattttntttttttcccaccaacaccctctttcgggggggaaaccccaccgaaccgnaagccangggaaccccccnaggagcgtgtccccccccggggggagcaaacccccaccnaccaacaaaaaaccaacacccgccaccaccaaggcgggaaaccccaggcgnccaaacccagacgcgagcgcaaccggcgacaccagaagaagacccccgaaggcgaccagagccagcgaacccccaccccgggagaagacagagcgaggcgcgcgaggagcgagcaaggagccagcagg

SEQ ID NO: 127023 - DNA, 459 bp, Arabidopsis thaliana columbia
ccgggttccaaccaagccttccgcttaccgatggaggccgttctgcctacgtcatgcttatggtggcagatcttatggagcttgttaggattataatccaaaccctggtgcagatgatcatagagggcctgctatatgtaccctacacgggatctagggcagtgaactgaggctacatttaagtttgaaggtggcttttttctatgaccagtaacctctgtattggttatcgcgtatttccccattcaggcggagaacttaacttgcaaaaatccgtcgaaggaactttaaaattttaagacggacaaaactgaatactggaactggttcgctggaacacttgcattagaaagagaatttggtgactatcacattatgaccaaacccttgcttcactgtgcgctgacgagaatactcatgatgtccaggatacaaagaaagaagctgctccgaatacag

SEQ ID NO: 127024 - DNA, 515 bp, Arabidopsis thaliana columbia
  unsure (1)..(515): unsure at all n locations
cggattgatttaggtgacactatagnaagactatgacgtcccatgccccccttcgttagccttgattcctttaaaccggccgcccttttttttttttttttttttaaattgggnggaaggccccaggcccccttaggttttatctttagaaactatgtccatcattttactttattgccgccttaaagactttcccataattaaaaaagggaggcagaggcattgctacgccccctgctgatccgaatttcttaccaaagacatgcagctgcattttgtcttatccagaatgcacaccagctccttcaattgtacgcaaaatgcaggcaccttctccttcgaaaagtgacttggctccttcttcttgaggatctgcttgtaggcgtacaaagaactgttgctcttgacagcttcaccacacgtactggtgattcttctgccgacagagccagtggggtaggatgcatgacccgcaccatcggtgataacctatccaacagcgaagctattgaaga

SEQ ID NO: 127025 - DNA, 482 bp, Arabidopsis thaliana columbia
  unsure (1)..(482): unsure at all n locations
gacccacgcgtccgntgataaaaaacagtttttggaaagcttactttgtcccaaacgaccctatgcgagagaatctcaggggataacattgatctcgggctagatctcgggtctaaaagctttttgccaacatacaacaaaatgacatccagctgatatgctgacaagctgatgcaagtggactaatgttttttttcctgacacagctgggaccagatttattcaatcccttgactgggacacagatatggacatcacctttacttggggtttttaacagagaccgacctacaggcaaggagactgtgaaatatgaaagaagtgtcaaccctctgcaccttccaaaacgctttgatatccaaatggttctcactgggtcgatgggagggatctaaagtgcataattttgaccccaaagtttcttccgagttactgcttctgggcgatgacacgtctttcggaggataagacggatgaaagtg

SEQ ID NO: 127026 - DNA, 493 bp, Arabidopsis thaliana columbia
  unsure (1)..(493): unsure at all n locations
agcnagggacctcaaaagcggtcgccctttttttttttttctaagtaacgaggagcgcgagtgacatcaaaagagatccctaagtataaaccgcctcagtatgaacaaacatgacaaagggttaccttagcgcgagagactggtttcggacctaagcataataaattgagctatgcacacatgatttttttttgtgcggggagacaaccaacgctacaccagcggtgggtccaagaagctacgcctactacaaaggtgacgtcccggctgtagccgagaaacaaggcctcacaaagtggcatcaaaacatgctcacaaagagacacgatctccgaaagggagcctcaaaccggtggggtagacgcatatgaacctcaggttaacaaactccaaccgcctcgtaaacactgggaataaagagggggcaatgaacctgaactttactgggggatgccacccacgaacggccttctgagggaacataatccaaaaa

SEQ ID NO: 127027 - DNA, 483 bp, Arabidopsis thaliana columbia
ccccaaaagcggtcgcccttttttttttttcttaaaaaaaaaggaaagagaatctatcataggcatacccagggtatgaaaaacatatatcgaaaccacactgagatcggctaagccaaagacaggaactacaagggcgccgaaatgtgttcatacggactgaagaaccaaattacttccttttgcagtgggagagaccaaacttctacctgcatgggctcgtacgtataaggacacacaaccagggggtggacatcgccagggaacaaccctgaactctctcgatgaaaataagaagttgcttggaattgaattcgccctacctgtgctgcctcgaccatgtaggaggagctgtatggattgcgtatacaggagtatacggtgcccgtgcctctggttgtgctagtgacatgcaatgcagccatcatcttaaggactggcctcgaggcttttggctagacacccattcgagccaggacaaag

SEQ ID NO: 127028 - DNA, 516 bp, Arabidopsis thaliana columbia
  unsure (1)..(516): unsure at all n locations
nnnnnnnnnnnnnnnnnnnnnnnnnnnnnnnnnnnnnnnnnnnnnnnnnnnnnnnnnnnnnnnnnnnnnnnnnnnnnnnncttttttttttttttttttttagagatctaaagcatgatcgttcatagaagcagagaattaatacaaactttctggtacttttagtatatacataactttgtccatatctagtctcttggcttattatctgccgtacaaattttatagattcagtaaccttgaaagagcctagcatagaagcctaagcaaatttgatggtttaaacagttttgtagagctgtgatcgtgtgggtgcatgaacttgcagttgggacaaacaggagttgatgtacacaacataaccagcatgtggcatttcatgcaaactgttgttaccatctcttgccccttgtgatcaacatcgtcggacccgtggnnnnnnnnnnnnnnnnnnnnnnnnnnnnnnnnnnnnnnnnnnnnnnnnnnnnnnnnnnnnnnnnnnnnnnnnnnnnnnnn

SEQ ID NO: 127029 - DNA, 485 bp, Arabidopsis thaliana columbia
ttaacgcgcatgccccccttccttagcctggattcctttaaaccggccgcccttttttttttttttttttaaacacaaaaccaaactttgatgcaccaaagattcgccttgattccaattcacgagattaataaaccacaacctttttcacttcttataaggcctttttagttaaagagtggatctgatacttctcctccccactcttttatcctaccctaagccattgcagcctctgtgtcccaattggttctacagatcatccatgttaagactattgtctgaaccacggttcctgtcaacattccgcaccagattcccattacaccaaagttaagcttgtagcctagtaacagaccaaatgggattccaaacacgtaataacatactatgttaacgtatgccacaactgcttgccatccagctcccacagccacccctgataagacaggttggactttgttgatgacaatagagactgcgag

SEQ ID NO: 127030 - DNA, 445 bp, Arabidopsis thaliana columbia
cccgggggccgggaaaaaagaagacattttcggggagcgggaaaacccagcatggaacaccaaaggaccttggcggaggggggaaaaaaaggggccagaaagacctacgggcgaagaagaaagcaggaaaaggggaaaacgaagcgagaagggggaagcaaacgaaaaagaaaccggagggttccttctttagggggggtgggaaaaacaaggaaacggcgggaaacagcaaaaaaacaccagagaaccacgagggggcgaaagagcgagagaaacagaaaagagaagggcagaagagagaaccaggaaggggcgagcaaggcgagcaacagcagggccgagagcagagcagagcaacgacaggaccagaagaggaaaggggaggaaagagacaagaggaagagagaagaaagagaggggcgcaccgaagaaaacccgccgaagg

SEQ ID NO: 127031 - DNA, 331 bp, Arabidopsis thaliana columbia
cgcccttttttttttttttttttttaggtatggggagacaaggggggaggtttttgggaggaacgtaaccgccatcgagacggccaaagcccaaccacatgaaacaggttaagaaaacatattttaaatcccatactggcccccacctatgagtttcacaatttcatggtttttttggagggctaaaactcccggagaccgcgggttagaaagcagaaaactcaccatacttcttggggagagagccaatggtttcccttatcaatgtccgccatacggcggacgcccatatagatggtggtcaggcaatgtcaaaatcctaatctggaat

SEQ ID NO: 127032 - DNA, 499 bp, Arabidopsis thaliana columbia
gcaagcacgcgtacgtaagctgggatcctctagagcggccgcccttttttttttttttttttaaatataatacaagtacttttttatttcgttacttttttttattacagtttaggtttaggatgctgaaaccacaaactttaataaaaaaaatccccccataaaggtgggggagctaaatttgactaacaaaccctttttttttttttaaagaggaaaaaggttggggggggggttaaaaaaagagtcaaaaaaaaattttttctgggaagcgtttttttataaaaaaaaaaaaaaaattttttttgtcgcaccatgtccattatttgggtggtggggagaaaattaaacgcgcttggttagagaacatctttttataaaagactttttttgcgcccataaaattatatttgtgggaaaaggtgtttttttttgtgaagcgaaaaaaacggggggaggtttttctttcttcttttttgtactcacaaattcctagtga

SEQ ID NO: 127033 - DNA, 485 bp, Arabidopsis thaliana columbia
  unsure (1)..(485): unsure at all n locations
ccggncggaaacaaaagaaaagctaacacgggaagaagaacggcaaacaanacggcgccccccagagggggacccccccggcaaaagcaacagggcgggcatccacggcgagaagacaccgctacggaccggacccccaaaggcaaaacgacaaacggccaccctcctccttgagggggggaaacaacccaaaaggcgagcccccaaacaaaaaacaaaaacangggaaccgggccacccacccgaacaaaaagagcggggaacnggcaaaaggaggagagcgacacgaaaccggaccagaagagacacaccggaacaaaaaaaaaggcaacaacacgcaacggaaaaaccggaaaccccgcaaaacagagcacgaaaccaaacagagcaccacacccaagcaacaggcaacaaggcgccaaacggcccagaagccaccaaccacccccccaagggagagaagaaacagcgaaaaagccgaaaaa

SEQ ID NO: 127034 - DNA, 540 bp, Arabidopsis thaliana columbia
  unsure (1)..(540): unsure at all n locations
ggcgaaacccaacgaactacaagaaaaaaagaagaaaacaaantttttttttttttctcaaaagccttgtacggggggaagcacacgaacgaaagcnngggaccccnaaagcggccgccccgggaggaaaaccccnaaccaaaaaacacaagaaacaaacggggagggccaaccacaaccaaacgaagacccacccccaacgccaaaagaaaggagcgagaaaaccaccacacgacccaacgggacggaaaaaacccaccaaagacaaaaaacccttttttntccgggggggggaaanccagagcgggcgcaaccccccagaagaaaaaaccccaggaacgaaagaaaccggagcaaaaagacagacgccgaagagcaaccccgcacaaaaaccaggcaggagcccggcacgaagcgccccgccacgcagaaagcaccaaaacaaacgaaacagaaagcgcgaaaaacgccaaaacccagcaacaacgccgacacccggaaacccacacgacaaggccacgccaaacacacccgacccca

SEQ ID NO: 127035 - DNA, 332 bp, Arabidopsis thaliana columbia
ccggaccgaccacgcgttcggagacccgttactggttttagaatttcacgttaggtggaccatgtcatccagcggataatcccggggatgagaagctcgtttactgccgaaccaggcgcacggcatggaccaaacttcgtatcctggattggacggaggaacctggggtcaacggcagtggggagccgcccataagatgtttctcctcttggaggggcaagcctaaaaggcccccccgtggaccctcaattaccaaaatttttcccggccacggggaaaactatcagtaatgggtggcccgttcttagaaggcccaattccaaatgtccaaa

SEQ ID NO: 127036 - DNA, 378 bp, Arabidopsis thaliana columbia
  unsure (1)..(378): unsure at all n locations
acgtcgcatgcacgcgtacgtaagcttggatcctctagagcggccgccctttttttttttttttttttttggtttttctttnnaggacanacacaacgttttggactgcttatttaaccgggggcctccagagtgaaagattctcaaggtgacaaaaattttgtggcaaattttgggcacggacattgggaaggaaaaagttttttatgtatgctaaaaggtaaaatcattgcctgagcaccaacattcacgattgtgttaataaacaaattacggactatctcgtatgaaactgtgaccggaaaaattatagcgccttgcctggctaagcctgtgaacttacgcacccttccagctagcttactcttattcaaaatg

SEQ ID NO: 127037 - DNA, 434 bp, Arabidopsis thaliana columbia
  unsure (1)..(434): unsure at all n locations
tagagagcttgacgtcgcatgcacgcgtacgtaggctgggatcctctagagcggccgcccttttttttttttttttttatttttttttttttttttttgtttgttggattttttttaaatgtttgaaatgttggaggattttgttccatccattccagttgtgtttgaggggagttcaaagagccgaaggaattttttttaaaaaaaaaaaaatttccaggggtgggtttgttgggtaccacctcaaatattcaacccatgaaatttgggggggtataaaaaaaaaaactggaaagggggggcnattcagaaaaagcatacggatattttttatttcggacttgggtaccccgaaatttttaaacgtgcgtcggtgtgatggaaaaattaagggagagggaagagatccaaaattttttttattataaattttc

SEQ ID NO: 127038 - DNA, 264 bp, Arabidopsis thaliana columbia
  unsure (1)..(264): unsure at all n locations
tcgacccacgcgtncgggatccaccacccacagcccctgatggtagcagacactgatgccccattctagtcatgcatccagacaacgtctgcgtctgacgcatgagctacatgatctgcttcgttgatgcccgcttgctctaactctggtgacccctgagtagagctacaccccaaagggcgtatcttaagagtgatggggtgttcttttgctttaactataatatcactgtcaaagagttcactttacgagaagatgatcgac

SEQ ID NO: 127039 - DNA, 451 bp, Arabidopsis thaliana columbia
ccccgggggggaaagggggaaccctggcggggggggaaagccccgacaaaaaacgggggcgaaaaggggccaccaaaaagaaaaagcccgaaccacagaccacggggaggggccctccaagaggaagaaaacacacgggccccaagaggaacacgaacggcggggaccccctcatacgggggggggagacacccccaggaggacgggcgcaaaaaaaacacaggaacgggcgcgggggcgacgccaagaaagaagaaaacagaccaaggcaacacaaagaaacgacacggagaacaaagaaacccgaggagggggaaacaagaacggagaaggagggacaggcaaacgcagcgcacacggacgcggagaacaagccagacacacccaaacacgaaagaagaagcgacacgccgagagacagcaggaggacacagggaaagagcgaaaaaaa

SEQ ID NO: 127040 - DNA, 335 bp, Arabidopsis thaliana columbia
  unsure (1)..(335): unsure at all n locations
cgcgaacgaaagccgggaccctcaagagcgtccgccctttttttttttttttttttgaaaaaattgagatcttttgggcggaaaggctctttaaacggccgtaagctttgctgaggccgacgcaacaaccctgcaacaaactaagaatttatgctgttggattatgcctaacaagcgacataataagtggacagttatcaagaaacgccttttttctttttttncggggattcgcgcaacagggtccacaataccgatgcggtgtgctacatcggtggggtgagctaatcagaaggactttcaactgcgctatgccgcgggagaccggctccccc

SEQ ID NO: 127041 - DNA, 341 bp, Arabidopsis thaliana columbia
  unsure (1)..(341): unsure at all n locations
tttttggggggggggatagtctcgaaagaccaaaaggccaagtgcacggcggaacttgttcaagaaagagaaaactcgcacggtttcggtaagggggtcgggttatagaacaacaaaaccacttccagtctctccttgcaccagagcccgccgaagaatttttttctttggggggggggaaccccccggcgccggggcaaaagggaaaacacgcaacgcggggcggagggaganaaggggccccggagcgacgaggacggcgcaaacaaccgaggggggggcgaccggggaggggagggggccccaggggaccacccagggccacccccggacccgggggg

SEQ ID NO: 127042 - DNA, 520 bp, Arabidopsis thaliana columbia
gaagccggaggccccaaaagcgttcgccccctgtgtaaagcccatcaaaaaaaccccgggcacagcgcccgggcaccctaagccccccccgacaccaccaaagagagaaacaaaagcccgaaccccaggaacgcagagcaaccaaccccccaacgaaggaccgggcccaccgacaccccagacagtgttgtctttgtcccggcggggaaccccacaccgacggccccgcccaccggaagcgcgcccgggggaccaaccacgccgaagaaccgcccaacgctacgccggaagggcgccagccaataacgagccacagatcgcgcccgcctgagaggctgccccaccgctaggcaggacccgaaccccctacaggcgggcgaacacggaaggcgaagcccccggaaacccgaggcaccgccccgaagaccgggcaagacccccccgagcacgacagagcaccacaccccccaggcgggccagagcagcgagacaacccccagaccaacgcacacccgaaccg

SEQ ID NO: 127043 - DNA, 529 bp, Arabidopsis thaliana columbia
  unsure (1)..(529): unsure at all n locations
nnnnnnnnnnnnnnnnnnnnnnnnnnnnnnnnnnnnnnnnnnnnnnnnnnnnnnnnnnnnnnnnnnnnnnnnnncttttttttttttttttttttgttacaaatatccatcagaaattagaacgcactaaacgatgtcggtgcagagacaaaacacagcagccagacagaaacacatcgacatgtaaacatctgatgtttatctactaactgaatccatgcatatatggagattgtgtggaacgtatcgcaagcacaaacacctgaatctgataagataaccactaatcactgagttgcagaattcccatactagggaaggatccaaccgttgaccatggcatgactagcatacagctgacacttctctaacgcgtgcggtctatcaagcgacaggtcatcgaggctgactgaaacactaccaaaccctttcatcagttggctagatgaaatcaatccttcaccatatcactcgtaaagcagattcaggaaccgatcattctgcttgtgcattgccatcaccaaagctt

SEQ ID NO: 127044 - DNA, 515 bp, Arabidopsis thaliana columbia
  unsure (1)..(515): unsure at all n locations
nnnnnnnnnnnnnnnnnnnnnnnnnnnnnnnnnnnnnnnnnnnnnnnnnnnnnnnnnnnnnnnnnnnnnnnnnncttttttttttttttttttttttttaatctcgaatttttttggagacaagaattaacattagtggaattctctgaacataacgtaaaaacaaaacttagttctactaagtacgggaaaatagtctcaacttggatctgaaacagaattgctaatttttattttattgtaccgaaactaagcatccaagggttggtgagtcgtgctaatccgactcattttttctctgttagcaaaccatggagcagtttgtctagcgatcgggagccacaaacgccgtcttatctgctacgtctcattcccaccggtttgtaacgcaaacacaatctctggggatgaaccgctgacatctccatgaatcgattgctgagtctaggaaccgcattgatgtcctaccccgatcttcgtcctggttcgatcataacgcttcttgattgcgaacc

SEQ ID NO: 127045 - DNA, 518 bp, Arabidopsis thaliana columbia
actatagaagactatgacgtcgcacgcacgcgtacgtaagcttggatcctctagagcggctgccctttttttttttttttttttgatctgacaaatagcttttgttaaaatacaatcataacggccatagatagcctcaactgtagtatttgtaagccgtaagaagttgacattttagataacccacaatgggatttggcttctgtcacaatgcctaagtttttttctaataagctatgggctctcataacattcgaaaacatttcacatctccccacactcagtaattacaaccgcaagtttaggccggttattgggtccaatagccacgttctcaatcttccgcataaccaacaaaccatctccaagcactctcccaaagacaacatgcttgttgtcaagccaatcgcattttgcacaagtgatgaagaactggcacccatttgtgtttggcccactatttgccatggagagcaatcctggtccagtatgtttagcagtaaaattctcatcctcaa

SEQ ID NO: 127046 - DNA, 529 bp, Arabidopsis thaliana columbia
  unsure (1)..(529): unsure at all n locations
nnnnnnnnnnnnnnnnnnnnnnnnnnnnnnnnnnnnnnnnnnnnnnnnnnnnnnnnnnnnnnnnnnnnnnnnnnctttttttttttttttttttattcaaaaatcaaaaataagtcgaatgatgatcttctttttttcttgcacggagtgtgtaactaagaaaacttcaataccacacatgacacaacaggtctacactctaaaatatgagaacatgagctatgaaactgcccttttgtttactaactagatatataacgagtactggcaaatacaatggcctgatataactgaaaatgacgatactcataggaaggtgcgtacggcaggaggacatacaagggctctaatgagattagcgacttcaactacttcggcaagctctgtccctatctttgcctatgccgncgatctacactcctccgntgtgctatgcgctctcgacacattgctatgcgactcctccatcgcattgagtaatctatgctctagctacctatcaatcttgttcatccaagagttgaccttg

SEQ ID NO: 127047 - DNA, 510 bp, Arabidopsis thaliana columbia
  unsure (1)..(510): unsure at all n locations
cctatagnagagctatgacgtcgcatgcacgcgtacgtaagcttggatcctctagagcgggtcgcccttttttttttttttttttttaaagtagagattgatcttattccggtatacccaaaggtaaccctttttttttaaccatcggtccttattatttattattttaccaggcagccaaagaattcttaatggatgtctggaaatattaaccaccccggaaaatttcttccttgagccacttaaaccttttttaaaacccttgaaaaccccacctatttaatctgggaattaactcgttcttgcttgactttgattcaatccactcggcaaaattttcgtgcaacagtacgtactctcggctgctgttgccaaactttatggtgtctttctcaaaaagctcataatatctttggggctcaatgggactttcattgatataagttttgttggtactaccaagatccattatgtaaggcttcacttgcttcccatcataccatctggttt

SEQ ID NO: 127048 - DNA, 516 bp, Arabidopsis thaliana columbia
cacactatagaagagttatgacgtcgcatgcacgcgtacgtaagcctggaatccttttaaacgggccggccctttttttttttttttttttttttttcccatgaattaccggattatacctaatggtacctggaaagtggatttccggaatttttttataatgggaaaatccctggcttttatataacaaaaatttggatataaccatataagcctggtaatcttaatttttcctaaggggcctaataaagaaccattttaagtttccttttactaagcggccttggagtgagggaggcaccaccagctgcagagtcatcaccccaatctgctaactcgtcatcctctagttcattatctgatgaaaggttggaatcttctggcaatgaagttgaaggaccattgccgctgatgtgaacgtctgttccaaatggtctactttccctggggatgtagctttgatcattgccctcttcttccccagcggtaggctcatgcagactagtttcattcctt

SEQ ID NO: 127049 - DNA, 510 bp, Arabidopsis thaliana columbia
  unsure (1)..(510): unsure at all n locations
gtcacactattagaagatcttgacgtcgcatgcacgcgtacgtaagcttggatcctctagagcggccgccctttttttttttttttttttttttaaacggaaaatttgtcttttgtgatcattacaaatttcaagaaaaataaaagtttgaatctcaaaaaaagagctgaagactaacccgaatagtttagcaagcaatcctctgtgactgtgaaacttgtacaaataataaaaaaaactatatatattgtagaaagacaaatagtgacgatcgatttgattgaacgccaagcaattgatatgtgaaaagaaagaccagtggtggcttaatggttgagatgaccactctgctctctcttgtgacagagcacgagaagaccacaggctctgctattccttaattgtacanacttcattcaccattatcctgtaacaccgttagagaaaacctccaccggtccaagcagtgtctgatttcccattgtgacctacagatttcttatcgcttgc

SEQ ID NO: 127050 - DNA, 514 bp, Arabidopsis thaliana columbia
  unsure (1)..(514): unsure at all n locations
cacactatagaaagattatgacgtcgcatgcacgcgtacgtaagcttgggattcttttagaacgggccggcccttttttttttttttttttaaatttatttttttttttnttttttnttttcaaaaaaggggcaaaaacaaatttggaaccgggaaaattttttttaaaaaaaaatttttacccccccccccttggagttttttttaaaaaaaaaaaaaaccttctttaaatttttaaggcccaaacctttttttcaaaacccggggggatttttaattggaataaccggtttacgggggaattcccattttgggtttggacctctaggaccgggaaaacccatttgttttggcccccccgaacttggaaaaatcaaacctgttcctttaacccccccctttttggggcggggattccaaatcgggaaaaaaaaaattcctttgtatttggagggtgggcctttaattgaaattttaacctttaaaaaagggggggggacccatatatttgggt

SEQ ID NO: 127051 - DNA, 502 bp, Arabidopsis thaliana columbia
  unsure (1)..(502): unsure at all n locations
cctatagaagattatgaggtcgactgcacgcgtacgtaagcttggatcctctagagcggtcgcccttttttttaattcttaggacaactagtctcctgaaaatagcttaaaatggtaaaataccaaacaagcagatgacggaaaacacgaaacacaaatacattacatctcccatagctttatatgagccactacgtcccttctccattctatttgctactatgtagtcgntactattatcttttgtttttttttcccttcccttataaaactaagattttcaggaacaattgcggccttaaaagtgttctgtaacaaagcttggagaagcaacatagccctgcgccaaggtgtccctaaagtcccttcttaaattctcacaaatgttttcacttgctaaaggtcatctccgagtacctacgaggctgcttgcttggattgttgctttgccgttctgaaaccccattctctgcaacctcaggactntacatgggtttgacca

SEQ ID NO: 127052 - DNA, 511 bp, Arabidopsis thaliana columbia
ctgtgggggcccgcgcgcgcgcgcgaacgctgggcccctatagagggccccccgggggtggtttttttaaaccggaaggcttattggcaagcgaacactggtaaaaaaagactcctccattcaaaacattgtggatggaacaaaaccgcaacctccatatcgctgaagtgattttcgcaaaaggggctgggggagcccccccgacccatttttttctgggggggagaacccactaaaggactccaactctataaaaaggtatcggccaggccttcccgggagggccccccacaggccccaagagaggggggccgctggggcaagcttagtaatagcataagccccttccggacttacacccggaaaaaaagccgcacccaccttcctcccctccactacaagaaagctccccattttcgggctgaggcaatgcccggtccacggggccgcaaacaccgcgcgttctgcgagggtgtcaccgaaacaaggccaagacgaaccaatagctgca

SEQ ID NO: 127053 - DNA, 513 bp, Arabidopsis thaliana columbia
  unsure (1)..(513): unsure at all n locations
ggtacnnnnnnnnnnnnnnnnnnnnnnnnnnnnnnnnnnnnnnnnnnnnnnnnnnnnnnnnnnnnnnnnnnnctttttttttttttttgtaaacacactggtgcgttattcatgatatattaaacgtgcggtattctctctgttttgtgtctgaattaaagatgctttgacccacactaagctcanaggtttttagcctcacaccagacgatgcacacaactaccattctcttttctaaggctggacctacttattacatcaatctacttatttggatacgtagcacctctagccctggagaccattgatgcttcaagcaacacggacgactgtgtgaccagtaaccatgctgagttcatggcctacctttccgaggtcatcagggtctgcatggacaacatcagccttaccatcaatagagttagctccagtctgaggaatctggcaatcagagatagtgaaggtggcagttcctttatatccaacagtgatgtaacctagatcaccagcgt

SEQ ID NO: 127054 - DNA, 351 bp, Arabidopsis thaliana columbia
actatagaagagttatgacgtcgcatgcacgcgtacgtaagcttgggatctctagagcggcgcgccttttttttttttttttacccaatttttttttattatatatcaagactcattattatttgagattacatttaaacccaaaaaaaaaaacagaggggaaccccacaaaaaaatcaccgagtgtatgaaaatttggcaattagggcatccccacttttatttgttatgaagaattaggcaatggaggccatcgcactttaatcaatcttcttgataacagtttgggagtcacttaaaggaccttcttagcagaagggcctaaagtgatgtcagcaacccaagcactga

SEQ ID NO: 127055 - DNA, 463 bp, Arabidopsis thaliana columbia
  unsure (1)..(463): unsure at all n locations
gcactataagacttgacgtcgcatgccgcgtcgtaagctggatccttagagcggcgcctttttttttttgacactgttttgaacccacaccaaaaaaatctactcgacagaacagatacacaaagcttattccacaaagcatgaccaataaatggttctttctataatcaacgatgcataatcaatttataaggaatgcaaagaaacaaaaggaatcatcagtagaatttgagagctacaagggcgatgctgaagaagacaagagatggtgagagtgcgtaggcggatgaaggagtctcanaaggtcgactggtgcttcctccgtcgtctgatgttggagctccaccgtcnacggatggtgtaaatggtcgggttgtatcaaactggggtgtctgagctgcccgagttggctctggaacaatggatccgtctctggtctggaacatcgatgtccaaatgtagc

SEQ ID NO: 127056 - DNA, 488 bp, Arabidopsis thaliana columbia
  unsure (1)..(488): unsure at all n locations
nnnnnnnnnnnnnnnnnnnnnnnnnnnnnnnnnnnnnnnnnnnnnnnnnnnnnnnnnnnnnnnnnncttttttttttttttttttagacagctaagccccactctttatcttccttctatccaatttactcttttctttctttttttcaatttcgtattctcctttttctaaggagaaaatatgaaaataataataacaagaaaaaaatctcttttattttccacactcctttttctttttggttaccctttcatcaatccttagcaaaaaaagggtggaccaatttgggttcctctaaagaccaatctcttcatcttttggttactgagactctaggagaagtcaccggggatagaggaagaagtcgaggctctggatccatcggagttggttgccggagatggattgcaaataaagcccttctttttcattggcttctcctccgcagcaagctcgttgggggcttgggttgatgaccccgatcgat

SEQ ID NO: 127057 - DNA, 510 bp, Arabidopsis thaliana columbia
cactatagaagagttatgaacgtcgcttgcccccttccgtaagctgggatcctttaaagcggccgccctttttttttttttttttcaccagagaccaaacaccaaacgaatatccttgtaatgtagtaattgaggactagcaagacaagtgagttttgtttttaactgaaacacaacagagaatcagggatctgagacacatgaccgtccttactaggcaaatattttgaggaattcctggtttctattcgtcccttgttgcagggtccattccagtcgaagggctatcagcaaaatattctggatgcttcacgttcacaccatactcacgcaaagcttttgaaagatcttccattgtcaataccaaacgcttatccttttgctgttttttgtctttcacaactggtgctggtctagccttgcaatgctgaagggcgtcactggcaacatctgcaacaaacttttgtgtagccacagcaactagccttatcctgtcaaacaagtaaacaa

SEQ ID NO: 127058 - DNA, 520 bp, Arabidopsis thaliana columbia
gacactatagaaagactatgacgtcgcatgcacgcgtacgtaagcttgggatccctctagaagcggtccggccttttttttttttttaaaataatctcattcttcttcttaataagttacccacttttaaatggtaaataattggttcccatttttcaagaactggttaaagtcttttccaccaggcttttaaggtcttttaacttaaacaataaaactttggttttttttttattcttccaaaccaataacataggtttgctctttcaagctaacctaaatctttttggtcatgggacttccatggattggaatctaaaacactggtcctgctcctctaagccccaaaacactcactttttcaataacccatccttggttcaatgcaaacttaccttctttaactggtgaccacatcttcatggtcccgtttccgaccgaagcgtaaaagtcaacgtacgtggactgtccatttcctagcttcatttccggaagctcgtcttcgtctagatagagtttc

SEQ ID NO: 127059 - DNA, 526 bp, Arabidopsis thaliana columbia
  unsure (1)..(526): unsure at all n locations
atacctannnnnnnnnnnnnnnnnnnnnnnnnnnnnnnnnnnnnnnnnnnnnnnnnnnnnnnnnnnnnnnnnnnnnnnnnnncttttttttttttttgttttgacaaaagcttcttctatcgattcaacatcgaatgataatggtacagacacaatattcttcatctaccacccacaggattctcatttcatcccaattgtattcccccacgcgaccccaaactctaaatacgtacattgtcatacacttacgtgtgcaagaatacgtatagaagtagctgctattggttaacctctcgagctgcaaatcacaggtgatctgaagagacaccacgacttcttctgtcactgatgctgggcttaagtcgttgggaaggacacgggcttgggatagcctgcagagtgtaacgaggacacacacggttcacggatcctgttagatcgggagaccggtactgtagacgctgctgctgttgcccactatcactatctgaggatgtcatgtctctagctcgcgggacctgct

SEQ ID NO: 127060 - DNA, 399 bp, Arabidopsis thaliana columbia
actataggagagttatgacgtcgcatgcacgcgtacgtaagcttggatcctctagagcggtcgcccttttttttttttttttttttttttaaaatcaaaaggaatggttttatttatatgaatgttgttctgttaattaaaataccgggaatatcctctttttctttttattattacaatacttttcataaatgaagtaaaatccggtaggtgtcaaaagattctctatatgaagagttaggtatttccgggagcttatgttcgaccaagttattaaaccaacccaaccctgttggccatatgaaaaagaatagtcccatttgggacccacccatttgattacttgaagatgggaatcgtttatttttaggtttcagtcctttgaaagcttttattttt

SEQ ID NO: 127061 - DNA, 519 bp, Arabidopsis thaliana columbia
aggtcacactatagaaggattatgacctcccctgccccccttccttagcctggattcttttaaaccggccgcctttttttttttttttttccaaccccccccaggtccttattattattttattcttccgggttttttttttttaaacctagggaaacttaaaaaaattagccccaaaaccaggacccattccaaagggccaaaaaaaaaaaaaaaaaaaggggtttattttttcgtccaataccaatcctgaaaaccaaccaggtttttaatccctgtaaaataacccaaactgtgccgaacctggtggaacccgttttggtgtggtgcaacggaacctgccaccaaatccaaaaaaatcctaaccattctgtgctgaatcactgaaacaacggttatggccgccaaatccatatcttttcaatgagtcaggtccactaccagctgcgttaaacgcattcatccagtcctctcctgatgaccctccattggttctcgggctgctttcagtgccactat

SEQ ID NO: 127062 - DNA, 371 bp, Arabidopsis thaliana columbia
  unsure (1)..(371): unsure at all n locations
cctatagnaagattatgacgtcgcatgcacgcgtacgtaagcttggatcctctagagcgggtcgcctttttgttttttttttttttttaaactaacacaagagcataacgatttaaactcatgcattacaagatggtgtgcaagattagtccattccctgtaatggccactagccatctcgaaccatcatgatccatcatatttcctctcatgggagccaaatctttttttgggggaaaaattattaatttggcaagtggtgttgattatttctacttgaggtaaaaacgatctaacggtttctttttacttttttttccaacacaaaatttgttactcctttgtattccacatgcaagcatttttaattc

SEQ ID NO: 127063 - DNA, 514 bp, Arabidopsis thaliana columbia
  unsure (1)..(514): unsure at all n locations
nnnnnnnnnnnnnnnnnnnnnnnnnnnnnnnnnnnnnnnnnnnnnnnnnnnnnnnnnnnnnnnnnnnnttttttttttttttttttttaaagtagagattgatcttattcaggtatacccaaaggtaacccttttcttttacccatcggtcattatcatttattattttaccaggcagccaaagaattcttaatggaggctggaaatattacccaccccggtgaattgcttcctggagccagttaaaccttttttaaaaccctggaaaaccccacctttttattctgggaattaactcgttctggctggactttgattcaatccactcggcaaaatcttcgtgcaccagtccgtactttcggttgttgtggccaaatttaatggggtctttctaaaaaggctaataatatctttggggctcatgggaactttcattgatataagtttggtgggtactaccaaaatccatattgtaaggcttaacttgcttcccatcataccatctggtttctcc

SEQ ID NO: 127064 - DNA, 481 bp, Arabidopsis thaliana columbia
cgccgtcgttagcctggatcctttagagcggtcggccctttttttttttttttttaaccaaaaggggacctaccctaattaaagggaaaatggcggtccgacccaaaaggcttcaggggatattaaacccaggttttttggtccgcagcctttaaaaaaaccagaattctgccagggctcaaaaaaggccgaccttctaccattttaatgaggggtttggcaggggagctcttttccttcttcttcctcctcctttaaaaagcagcaccttgggaagcctcttaagtaccaggggtctcgaaggtctctcccactacaggatctgggacatcatcatcatcgccctcttctgggatggtggctgggacatcacctgcacctgaagctggtttctggaatggctctgctagcttcttcaggtggtccaagttatctggtccaagttggctgataatctgaggaagaatgtctggcaattttt

SEQ ID NO: 127065 - DNA, 463 bp, Arabidopsis thaliana columbia
  unsure (1)..(463): unsure at all n locations
nnnnnnnnnnnnnnnnnnnnnnnnnnnnnnnnnnnnnnnnnnnnnnnnnnnnnnnnnnnnnnnnnnnnnnnnncttngtgtttttttttttttattttttttttttttttttttttttttngggaatggaaaatacaaagtctcttattgggatttttattactaatccaatggggacaaagcatacaacacaagaattttttcttttcttatcaacacaaaaatcttttttttttttttgtaacatcaacacaagaatctttcattttatttaattggaatccacttttccatactaagggggggggcatcaataaatccattcctcggggaaaagtttctccggcaaatcaataggattttctgcttcaatcttgaaaggggttggtgccaacatttcgctttttttttttaaatcattttctccggacccctgggtccacccgggaattccggaccggta

SEQ ID NO: 127066 - DNA, 506 bp, Arabidopsis thaliana columbia
  unsure (1)..(506): unsure at all n locations
cnnnnnnnnnnnnnnnnnnnnnnnnnnnnnnnnnnnnnnnnnnnnnnnnnnnnnnnnnnnnnnnnnnncttttttttttttttttttttttttgaaagacaagggaaatttattccgaacatttctgaaggcactgcgttacaaactcaccatggtttatttataggcatatagataatacataagcgtttatatatatatgcaatcatgcatggtagtgaagattttatatagttttaaacacccggcttagtctgaacaggttcgtttagcccgtggcctcctcctccgtggagtcctcctccacctccgaatcctcctccaccacctgcgtagtgtactccacctccgtgtcctccaacacctcctccgtagtggcctccacctcctccgaagtgccctccacctcctacgaagagtcctccaactcctacgaagtgtcctccacctcctccatagagacctccacctactacgtataccgaaagaccgtggccccctcctcc

SEQ ID NO: 127067 - DNA, 189 bp, Arabidopsis thaliana columbia
  unsure (1)..(189): unsure at all n locations
nnnnnnnnnnnnnnnnnnnnnnnnnnnnnnnnnnnnnnnnnnnnnnnnnnnnnnnnnnnnnnnnctttttttttttttttttctcctgcgtactagcatgagaacgataacaccgggcattgtcggaaggcgcatgacgtaacaaacctcaccgtgtgcttattcatcgcgcatctaagtgataacaaa

SEQ ID NO: 127068 - DNA, 518 bp, Arabidopsis thaliana columbia
  unsure (1)..(518): unsure at all n locations
taggtacnnnnnnnnnnnnnnnnnnnnnnnnnnnnnnnnnnnnnnnnnnnnnnnnnnnnnnnnnnnnnnnnnnnctttttttttttttttttttttttttttttttttttttaaaaggaaaaaaaaaaatcccaaattaattcccaaccaaaagggtttaaaaaagggaccaaatttttttttaaatttaaaaaaagggtatttggatggataaaattctaaagggtttttttttaaaccgtgatttaaaaaaaaacccccttttttttccaagtttaaaaacttccctaaggttaattttaacttcctttaaaagaaaacccttttttttcttttttttaaaaagcttaaaaaggctttttttttttaaaatttacttggagggtgaaaagagtgggtttaaaattctggaattacaagacttggaaaaaactttacactttggattttttccccgtttttttcggggatttttgggggaaaattttgttggggttttttttaagccgggaaaaagg

SEQ ID NO: 127069 - DNA, 486 bp, Arabidopsis thaliana columbia
  unsure (1)..(486): unsure at all n locations
nnnnnnnnnnnnnnnnnnnnnnnnnnnnnnnnnnnnnnnnnnnnnnnnnnnnnnnnnnnnnnnnnctttttttttttttttttgatataaagtgagagttttacttgcacaacacaaaagaaactgggctcgagacagggaacacggtacacgaaggcttattccacatacgtacgaccaaataaatggatggtttctataatcaacgacgcataagatatatcactttgggggtgcgaagaaacaaacggactcttcagcagaatgtgagagctcctaaggcgatgctgaataacacaagagatggccaaagcgcgtatgccgctgaaggagtctcagaaggacgactggcgctgactccctgacctgatgttggagctccaccgtgcactgatggtcgaaaagagcgggttgtatcacaccgaggtgtctgaactgccggagctagctctggaacaattggagccggctgtggtcctggacaca

SEQ ID NO: 127070 - DNA, 464 bp, Arabidopsis thaliana columbia
  unsure (1)..(464): unsure at all n locations
nnnnnnnnnnnnnnnnnnnnnnnnnnnnnnnnnnnnnnnnnnnnnnnnnnnnnnnnnnnnnnnnnnnnnnnnnctttttttttttttttttaaagaaaattctcttagcatatgataagtaataaatccccttttatcatatgacaagggcaagttaccaagccctaatgtttaaaccggccctagcatatgataaataataaatccccttttatcaaaattcaagaaatttataagaaaaaaatctttcgttacttcgagacttatacatattcacacatttcatatatggatcctatcttacccgtatgttttttttttagaatatatatttatatttatatatataccccttttttttcggtatgaataccccaattcaataaactattgttgaatccgattttttttttcctcgaacattggtgaagaaggtgatgaataattggagaacctttgggaaa

SEQ ID NO: 127071 - DNA, 447 bp, Arabidopsis thaliana columbia
  unsure (1)..(447): unsure at all n locations
acgtaagcngggagcctctagagcgttcgcccgcgnggtttattcttttgaaaaacatactttttttttaaccagagagcaaggcaagcnnccccttgaacaaatcgccataaattacagacaaagatgattttggaaacaagaaaatgttgcagataaaatctaacaaaagaaagaacaagcgaaaacctcatagacgtttggnaannngcacacaacaaaaccncaaaaaaaaaccccccgaaagggggggggggcgccccccgaaaaagngcagaccgcgccaagaaccaacccaacgaccaaagaccgagcgccaaggaaaagagggacgacggcccccccggaaaaancagaggaagagccaacaaccaaccaccaggaaacaagaagggcggccccccggcggggaggcaacacaagagaccgccccaaccaagggcggga

SEQ ID NO: 127072 - DNA, 224 bp, Arabidopsis thaliana columbia
  unsure (1)..(224): unsure at all n locations
cacgcgtacgtaagcttggatcctctagagcggccgcccttgggggaaatctttttgaatacaaggagcggaggtcaacagggagagcacaagaccgaaacccgatcaaagcgaaaaaagaccaggccggagctgcacccgagaagaagaaaacgacacacggcaggaacaaagccagancccaaaaggcacttgctgcaaaggggggaacgaaaacaaacggc

SEQ ID NO: 127073 - DNA, 457 bp, Arabidopsis thaliana columbia
  unsure (1)..(457): unsure at all n locations
acnnnnnnnnnnnnnnnnnnnnnnnnnnnnnnnnnnnnnnnnnnnnnnnnnnnnnnnnnnnnnnnnnnnctttttttttttttttttgataaaaggaagaggtgcttatctttattactacatcagctacacatgccttatggtggagaaggaattgagtgtgtgtctaacataagagaactgaaacaatgaggggcgaaaacagtgggcctaaatctcagattcttcttagacgccccaatcatggacatcggcctaaacggggctcgcttagcctgaccgacagtgcgagcgcacaccggcatattcctaaccagccaaaagcctatgacacaggaaccttattgcctttagaacacagttaggtgcatcagcgggatcttgataattaccagtagcgttgataatcgaatgcagagactgtatctaccgtgaatggtacggaggagacatggac

SEQ ID NO: 127074 - DNA, 457 bp, Arabidopsis thaliana columbia
  unsure (1)..(457): unsure at all n locations
gcacgcgtacgtaagctgggatcctctagagcgtccgccctttgggtaatctttaaacaaagggttcttcttgaagctgagtcgatacttcaaaagaaaaaaaagtttgtgcaggtaaggtctcattatcgcttgcgatacgttggcattgccagagatactgaagttggaacagccccccacgggggngtcttctcnttgatgtttgggaaaaacgccacccctgctttgccatataagttaagatctcctgcgaatgaggccttgcccccggtgaacgaaaacaacggcaatggaaccgggattggaacattaatcccgatctgtcctgcttctatggccatctggaacttgcttgcctgctgccccggacgacgtgaaaaacgcagcaccccccccatccttggttgtatttatcatagaaatggcccccaaaaaactgtctgcctgcctgcac

SEQ ID NO: 127075 - DNA, 369 bp, Arabidopsis thaliana columbia
  unsure (1)..(369): unsure at all n locations
tgcacgcgtacgtaagcttggatcctctagagcgtccgccctttgggtaaatcttttttagacaaaccattttatttcatcgacagtgaagtagtgtacatatgaatacatatatcgaatagatatctcgtatgtgtatgtgtgtgtgtgtgtgtgtagagtgtgtgaagcgtagtggcncaaaccccaccaccgcaccccgtgcgtgaatgtttgccaaaaaacccaagggccccaaaacaaaaaatattttcgcgaggaccgaaggggggggacgcccacccgctttagcccccccccccaaaaaacacctcggaccggggacctcaaaaaaaaatagcaacgccgcctaggagcactcgcccaaac

SEQ ID NO: 127076 - DNA, 371 bp, Arabidopsis thaliana columbia
tgacgtcgcctgcacgcgtacgtaagcttggatcctctagagcggccgcccttttgttttttttttttgtattagagaagacgtttttttgcgttatagcgacacggtaacttattacattattatgaactaataaccccaaaccgcaccccacccctaaaggagagtagaacacgagtgaaagatttgtgttgccctctaaacctggttttttttttttggggactagatcatgagaattggccttgtgagctgctaaacttactcatgacctgaatggctgacacctaatctatgttgtcaatacatcccaacagcagtcggatcagttaccgctctctcttctggaaaactcttggaggtatagcaaa

SEQ ID NO: 127077 - DNA, 507 bp, Arabidopsis thaliana columbia
  unsure (1)..(507): unsure at all n locations
nnnnnnnnnnnnnnnnnnnnnnnnnnnnnnnnnnnnnnnnnnnnnnnnnnnnnnnnnnnnnnnnnnnncttttttttttttttttttttttagtgaagacattttcatgcgttttaggacaacggttttttatcacattttatgtaacaaataacaaagaatgcaacaaacaagtaaagagagagaacaagagtgaaagatataagtagtcttagatcttgtcgtgtttattgacgactaagtcatgagcatcgtctagaagtttccaaacatcaagatgaccagccatgctgttacattccttcattatctcatccatcccactgtatttctctattatcgtcttcctcctctgcagcacgcttgcagctatcgcgtaaagcaacaaatcttctgtcggtggtgctcgtaaccggattctcccccatgtcgccttcgcaatcccagttcgtattgcagcttgatccgcccacattacttcccagagacacaacgtctgctcaaagg

SEQ ID NO: 127078 - DNA, 497 bp, Arabidopsis thaliana columbia
cactatagaagatcatgacgtcgcatgcacgcgtacgtaagcttggatcctctagagcggccgcccttttttttttttttttttttgcagacaaagcttaatcttgcttgcaaggaccatggagacacatgatgtgtgaaggtccctctcacgaaaactgcgacaaacaagagcagagagtatcctgatatcacatatccaggtaatcttaacatctgagattgtttaaagatccctggatcatcagaatgcgcatcttattaatctccgtgaccaagacagaactctggagtcaccttcagcttttttctcgacagcgaaaggatagtcttcagtgacattgtccactcttggagtccgacctccagaatcaagcaaagcagaagaaacagctagggttgcacttgcagctatcgctgacggcatgctccttgctctatacccaagcacataggctccagcgacagacccaccaattgcaccatagacaaaatctg

SEQ ID NO: 127079 - DNA, 465 bp, Arabidopsis thaliana columbia
cgcgcacgaagcgggacctcaagagcgtgcgccggggggaaaaccctaaggaaaaagggaccgaaggggcgaggaggttctaaggcccggaggagccagcgcaggagacccaaaagcacaagaaggcacgagacagacgcagaggccaggccggaaaggggcaaagggagggaccaaagccacgcttttaaaagggggggggacgggaggagaggaccagacaccagaggccacgggcgggggagaagggagaggggaggaaacaaaggagggcggaagggggacgaggggacagggaacaaagacagaaagggggagcacgaggaagccgaccgcggcggaggcgcacccgcgacggagccgcggaaagaccgagggagaagaaaacggcaccaaaggcacaacgccgggccccggggcagcaaaggcgagagggagaggccaaggacagaaaaagcggcggcc

SEQ ID NO: 127080 - DNA, 317 bp, Arabidopsis thaliana columbia
  unsure (1)..(317): unsure at all n locations
ggggggggacccccctatgcgggtcctgctgctcggcgggcgctctggctccttgtgtgtagatcatcgacctaggatgtcgctctgttctctttcgccgctcgcatcccggctcctagcctgctcggactcccacggcaaccagttccnttgctctccgggggggggaacgccggccccgcagccagacccacgccgcacaggacccccnaacgggggggccgggaccgacgcccttctggcgcggccacccccggagccgaacgtcccgacccccccgaggcggcaaagccgcccgggcgacaagcaagccgacc

SEQ ID NO: 127081 - DNA, 479 bp, Arabidopsis thaliana columbia
ccgcgtccgtaagctgggatcctctagagcgtccgccctttgtttttttttttttgaataaagaggcttcatgggggagcaggcccaaattctaatcattggggcgaaaaagcggtacaaaagcgtgttttttttttgaaaggaaggggggaaaaacaacccaaagagtgggtcacccacaagggaaacttaataatttttccggggagggagctgaaacagaaaaggggaaatgcaaattggctagaggaatagaggcgggggacccatttttaaaaccacttttttggaaccctaaaacaatggacaggttaggcccgggagggaaaaaccgatattagggcgggaataaccccacctggtcggggaggaccacctctggggaaatgggctgaagaaaaggagaccggggccctaaacctttaacctgggctcggttttgggaagggcttttaccaaattcaaaagggtgttggggg

SEQ ID NO: 127082 - DNA, 469 bp, Arabidopsis thaliana columbia
  unsure (1)..(469): unsure at all n locations
accccgcgtgcgaaagacaagagtnnctttttataagggncgaatatccaggaaagaaagaaaaacccacctaatccagtaataataaaaaaagagaagaaaatttcccaaaatcaaaaaccctaaatcgaatcaaaatcctttctaataagaatgaaataacccaaaacagcacaaaccgcgacaacttgctccgtctggnggggagaggaacccnaaacacaaatgcaaacactccccttgtaatcttacgaggcttaacaaccaattccctttttgatttcccaaaaaacgcacgcgacacacccacgggtatttcagatcaccataagccggcggaaccgggacctgggtcgccgcgaccatcgggctgggtcccaacgcggctgcgtacaccacatactgctataccgcccgcgatctcgactgaaacggcgatgacgttttctcggggctggtccccctaagc

SEQ ID NO: 127083 - DNA, 482 bp, Arabidopsis thaliana columbia
cgcgtacgtaagcttggatcctctagagcggtcgcccttttttttttttttttttttttttttttttttttttttttttttttttttttttttaaacccaaccttttttaacaccccaatttgttggtttcaattaaggcaattggtttccttcccatttggggaaatctcaatggtggaaagcaaaattggctcctaaaaaaaaaaaaggaaaaaaaaaaaaggggaaaaaaaaaatttttaggggggattttctgggggggttttcccaaacaaaaacctgggggggctaaaaggggggggttactccaaaagggaaacctcccaaaggggggggccaaaaaggagggtggaaaattggtttggtggagagaaggggtgggtttaaaaagtgtaggaaaactctaatatttttaaccttttaccctttattcttctccggatatgcccccccctgaaggaacctcctctaaaaactactc

SEQ ID NO: 127084 - DNA, 512 bp, Arabidopsis thaliana columbia
  unsure (1)..(512): unsure at all n locations
tcatgcgataacacacactcttgcgattgactttcgagagcatcaagaacgatagacacctgttctgcagatccttaaagttgtgttatgaactatcctagcatcattacaaggtcttttcgacttgccgcaatgtttcttccggcaacagactggcttaccttgggagatgcaatagatcctaaaaatacgatcggttcctagcggtgtgacacgcgaacngggaagcgcccctttacatcgccatgggacgccgatattccgcgttttgacaaagggcactcatcactctatggggaaccactcctctttcctaggctggcggtgacctctaacccattggcaatcaccccaattaattccaacttctttacctaaaccgcctaattctccagggtacccatcccatttggacctgggctacttgatcggtcgagtcccggattgcctacctcagcgtttgctgcttgccatcttaccggggtccccngagctcctgcaccggttcgctg

SEQ ID NO: 127085 - DNA, 497 bp, Arabidopsis thaliana columbia
  unsure (1)..(497): unsure at all n locations
cgcgtacgtaagctgggatcctctagagcggtcgccctttttttttttttctttatgtaaaattttgtaaatttaaaataaaatacaaaaggtatttgtttttgtacagtccaattatgtcaaatatgatacaagagactagagagtgttaagaactctaaatgccatgttaagcttcataattggatattgttcaattcgcgcacaaaaagaaagaaagaaaggcaaagaaggtttagacagggacacgccttccacgggagcganccagcaacgatctgatgtatggttgctgcaaaagccagcctaatagaggtatcctttgaaggaagacggcaagtgtaggccagaaaccactgaagagcacaaggaacccatatgattcaagaagcaaaccgaaaataggccatccaaacacaaccaacaagaaacccaatccaaatgatatagtacccttaaaattctgccgtttagtaaaaaattggatgctgggttga

SEQ ID NO: 127086 - DNA, 493 bp, Arabidopsis thaliana columbia
  unsure (1)..(493): unsure at all n locations
cccgcccggaagccnaggaacccccaaaacggtccgccggggggggaaaaaccnnnnggagggaggggaaaaagcccgaaggaggaccccaccaccaaaagagccacaaaaggccccggaaaccaaaagaccccccccaaaggaaaaacggaaggccaaaacgcggaagccaacaaaccaaaaccggaaaaaatnttcnaaaagggggggggaacgccaaagagaccaaggccggcaccacacgggccagccagggaaggcgcggggaccaaccaggaagagaacccacccacnccgacacgggggcagggacaacgggaccaaccaccggcgggaaaaacggagagcacacagcaaaccaaggaccaaaagagaagaaacccacggacaagagggacggagggaagaaggcaaccagggcaaaagaccaaggcaccagggaggaacgggcagaagaacggagacccccaaaaaaagcccaagacagccccaa

SEQ ID NO: 127087 - DNA, 452 bp, Arabidopsis thaliana columbia
  unsure (1)..(452): unsure at all n locations
gccccggggggggaanaggggagactggcgggggagaaagcccaacccggncccccgagaaggccggcaagaggagcccccgagaggggggggaaagcaccaggcggggaacaccggagggaagcgggcgacaccccagagaggaggaagacacagagaggaacacctaaaaacggggggcgacaccagaaaagaaccgaaaacgacgcaaccccccaaaaagggggggcggaggacaccgcccaaggagaccacgccccacacaaaagggcgccccggacgcggaaaaaaaccgcggcgaaacgacagacgacacagccggggccacgcgcaccccaacggggccccaggcagggcggggaaaacacccgcgccgcgcgccgcgagcacccgccgcaaaacccagacccccgcagccgcgagaggagcggaggcgcccacggggggccagc

SEQ ID NO: 127088 - DNA, 384 bp, Arabidopsis thaliana columbia
  unsure (1)..(384): unsure at all n locations
gggggggggggggnggnngaaggctttagggggagagggaaagaccagaggaaaaaaaacaagaagaaaaaaaagagggaagggaaaaaaaggacggagagggcaagccacggaacagaacggcccaaaacacgcagcgcaccaacgccacacccgcaaacaaaggccaagccgccgcacacaaaaaaaaccttccctacggggggggaaaaaagacaaacgggggaacgcaccccaacggccggagaaacggcaaaacggggagcggcaagcggacaagcgaccccggcaccaacgggagcgcccgaaggcgcggacgccgcggcgaggggaagggggcggcgcggagacgggagaggcaggaggacgaaccccgaggcgggc

SEQ ID NO: 127089 - DNA, 410 bp, Arabidopsis thaliana columbia
gcgtccgtaagctgggatcctctagagcggttgccctgtttttttttttcctttggaaaaatcaggagttcttattcactcaaacacagtttgtgtcatccaaaataaataaaaggaacaagacaacagtttaaccaacactacaaacagataaatgtaaatttttaaaaatgtctaagggccgaaaaccgttacctcctttgaaagaaaaccaaggaagagcaggaggaccaagataaaaaacccagggaggggcaaactgggaaaacccccaggggtttccccgggaagcaaacccaaccgaaaagcccaaaaggcatgacgcgggggaaaaaaccgcggggcccccgccccaacaagaaaggggcccggggggaacccaacaaaggcgggaaaggccccgggagggg

SEQ ID NO: 127090 - DNA, 466 bp, Arabidopsis thaliana columbia
  unsure (1)..(466): unsure at all n locations
accacgcgtccgggacacttcactgcgcacctcggggatgacacgcgcgcaaccctagcaagaccaagtgcggggcctctaacaggaacctaacatctctccatggcgtaaccggacacgaagggcaacgagataggccacgcacttgtatgggaagaccaagcacaaagagagaagcaaggtcaacggtcctctccacgggagagagcgcacgaaaggccagcgccaggaagagacgccacccccgacgcaaccgagccaccgccggnggtggttaaccgggccgacaaggaaggagaacaccggaggaggaggcgggaaacggggaccggncgggaaacaagggaagacagaacccgcaaggagcccaagccgggccggggggcggcccgggacgcgggagccaccaggcnggagaaaaggccgcggcggaccacccgaggcggggcccagcaagggggcaagg

SEQ ID NO: 127091 - DNA, 566 bp, Arabidopsis thaliana columbia
cgcgcacgtaagctgggatcctctagagctttcgccctggttgttaattccttataaatgacatattcataaatgagacagggggacattgccgataggaaattgcgctcatgagaggagaaaaaggaacagcagaacaagtgtggaaacggaaatcgaggcagcagagaatgggatacagaaatgacacgaggaaaaggaaaggaaaatttcctccgtattcgcgggggggccgcgaaagacaaaagaacacgggacgcagccggggacaggaccgggaagacagacggaaaccggaagaacacaaagagaacggcaccccagcgcgcacacccacagacgcagaaaaccaaaaagaccggcagcacggccgcgacaggagcacaggcagagcgagaacccacaggcggcgcgccgcccgagggggcgccgacgcgaccagggcgagcgaacgcaccaggaaaacacgccgcggaccgcgaacacccagccagcagcgcggacagacccgaaagaacaacacgaaggcacaccaagccgaacacacgcggcaacgaaaaccgcca

SEQ ID NO: 127092 - DNA, 371 bp, Arabidopsis thaliana columbia
  unsure (1)..(371): unsure at all n locations
ccccgggngggggngggngggcgattgagggggggaaaaacgcggaaaaagaggacgacacccaggaggagcaaaaaagaagacgaagaggagagcgacgaaggaacggcgggcacccgagcgncgaaaagccaaccggaaaaaaggccgaagcggagcaaactttctcttttcggggcgggaggaaaccccacaacgcgaggggggcgaagacgaggaaaacgcaagaccagacggcaggccacaaagggggacagcaaacaccgcgacgcgcagcgagccgaccccccgcacacagaaaagcgcccggcggacgcccgagggagcgccggagaccaaacaagagaagcaagagcgggaaaaaaaacgag

SEQ ID NO: 127093 - DNA, 415 bp, Arabidopsis thaliana columbia
ggagagagaagtgaggggagaggaaagacaagacaacagccggcaagagcccgaaaccgcgcacacagacacaaacaaaggagaaacacacgggaggaacacagggacgagcccaccgccaaccgacgagcccaccaccggcagaaccccgcaaagcagagaagaacgactccctccgcccacgggggggacaaggagcaacaaacgacccgaaaccaaccgagacagccgccaagaccgcgaaagacgaaagggccgaagaccgacaaccgacccagcccgacagaaccaccagacgcagcgaacacgaccgcggccaccagcccggcaggaaaaagcgcgcccccgagagacgggagaaaagagacagacggaaagagcagagacgcaccgaacaacgaaacaagaagaaaag

SEQ ID NO: 127094 - DNA, 257 bp, Arabidopsis thaliana columbia
  unsure (1)..(257): unsure at all n locations
cggagcggacttcgggggcgccgcgccagacacaccacaaccngagaagacggatcacgcgaggagtccgcgacacaccaagaaaccaccagtggagtaggcgcccgacggaacgcccaggcaaaccaccggacacctaagggacagcacgaccagacgcgcacgaccagcggattgaaaatcgggccgctaggtcaccgtcggcggtacgaaggagacggagtagcgccatcacataacggcccgatcaccccaca

SEQ ID NO: 127095 - DNA, 392 bp, Arabidopsis thaliana columbia
atgcccaactcgacccacgcgtccgaatagagaaagctaccgattattactacccatgaagatcctcgcttatcacaccatccgcattgcctgggctgcgtacaccagccttttacttggagagtggatgcaacctgactgggatatggtccgatagctacaccgcactgcatagtgccatgctgcgtcgcgagcagcgggtgtattatcatctatgtcagggagaagccaggcagccgcaacttcgatctattgaggaagcagaggcttcctgatggttcatctcgtagagctaagctaccggtgaggcctacccgcgactgattattagctgatccagctagagatggtatcacctcgctcaggacctgaaacatgaataagtttactgg

SEQ ID NO: 127096 - DNA, 456 bp, Arabidopsis thaliana columbia
ccgggggggggagaccaaagaccgtcgcgggggggcaaacccccagaaacaaacagcccagccgcggagggggacccaaccgcagcgcaacaaacggacacaaaaaaaaaaaacgagcggagcgcgacgccaacaaccagccgcaacccaaaaaaaaccccaaacggccccagaaacccttcatttgggggggcggacgaacgagccaaaaaagcgcgaagcgacccacaaggggagccgcaagccgcgggaaggagaacccaccaaaccaacaaccccccggccacgggacaaccgcggagcccaaagcgagagcacgcgcggacgagcgagacgagccggcgcgcagagagaaggacaacgaggcaaaaaacgacggggaaggagagaacaaagacccgcaagagaaaagagaaggagaagagcggagaagccacacgcgcgcgaaggacacaa

SEQ ID NO: 127097 - DNA, 389 bp, Arabidopsis thaliana columbia
  unsure (1)..(389): unsure at all n locations
ccgtaagctgggatcctctagagcgtccgcccggggggaaaaacccnnnggnggnngggacccaaaaaaagccaaaaacancgggggccagcagcaaaaaaaacaaggagaaagcccgggacaaacacgacaaaacacccaaaaaacccgaaacagacaaagaggaaccaggaancancacccctgtttgtatcgggggacacaagaacggcaaaaaacaaaacgaccaccacccccgcgagagaaaccacgcgccgggcaaacccaaaaaacagcaccaaccggcgaacccggggcgcggccaccaccaccgcagaaccgggcacccccaggcggaaaccgcgaccaaaaaaccaaaacaaannccaagacccggacggaaaccaccc

SEQ ID NO: 127098 - DNA, 447 bp, Arabidopsis thaliana columbia
acccagcgtccgaaaaatgaagcttatttttcacatgcaggtaaaccccttgaggatacaggaacacagggcactgcagccaaaaaagagccgttaacggtgcccctgcccaaagcgactacaacaggtttgacgccgctcaatcctccgacctgcacccgagaaaacaaaggaggcgaagcaacttcctcctatgcggcagccgcaccaaacaacccaaaggccgaaacaacaccaaacacgcgacagaggagaaaacagcggccacacagccagcggcgaagaaccgaaagggacggatcggcaggaactcacttcaacgccgcacatggaacacacgaccctcttacggaaaagaggccacatgaacgaccgaacaaggacgacagaaaagcataaaacaggctcaagattaccaaatgctggaaaccttcacggaaacatgga

SEQ ID NO: 127099 - DNA, 471 bp, Arabidopsis thaliana columbia
  unsure (1)..(471): unsure at all n locations
cgcgcacgnaagcngggaccctctagagcggctcgccggggggtaaaacccgaaaaacacggcaccaccctcaaggcgggccaaatagcgggaggcccgacaggaacggccaaggagacaaaaaggggggacgaggacgactgtgaagggggaacaccagacacaaaggaaggcgcaggcgaacatctccctctagaaggggggggaggnggccagcgaaggacagggcgcgaagcaaccgcccgagaggcggagcggacaacccccaagggaacacgccgccaccagagccgggaccccaaaaaaggggaggcccggggggggccagcaccccccaccaaggggccgggaccccgcgggggagaggcccaaaccaggccggggcgaaaaaacaccgcaaacccggccgcggggagaggcacggggggccagccagagcggccaggaggaaccgggccaaacggcgggggg

SEQ ID NO: 127100 - DNA, 484 bp, Arabidopsis thaliana columbia
  unsure (1)..(484): unsure at all n locations
gaaagaaaaaacctttcggggacgggaaaaacccaaacgcaacnaccacaaaggacacaggcggccgggcgcgacgaagccacacccgccagggacaagaagcacacacagaacgcaagcgccaaaagagcaccaaccaaggcgaagaagaccaaaccccggagaaaacaccaaaacaggaagcgacacagcgagctcctcataaaccgggggggcacacgacaacagaccgaggaagaggccccaccccccgggaagagccgaacacaggagccacaacgcacacccgacaccccaacccaccggaaacccacacaacgccaaccaaacacccgacgacaacaacaccagaagaagcaagacaccagcaacaccgacggcgacaacgacacagaccccggaggcacgaacaaagcacaccacgcaacaaccagccgaggcacgcaccaacccacgggcacaggcggggcacaagaagaaccgg

SEQ ID NO: 127101 - DNA, 204 bp, Arabidopsis thaliana columbia
gacccacgcgggcggagacctcctttgacacctttcactcgtgggcgtacctcatcaagagagagcacatccattgtatgtaggacaacaccctgttgtggttttttgtacttgaccatgcctcactcttgcagagtttattgcctctcattgttcatcatattcgcttctcgagtttagcctcagtagcccacgtgttagcgc

SEQ ID NO: 127102 - DNA, 452 bp, Arabidopsis thaliana columbia
cgcgtacgtaagcttggatcctctagagcgttcgccctttttttttttttttttaagaaaaaaatgcaagctattaaacgattctaggactttacacaaagggtttgtgttagaacgaagaacaacaaagctagctttacaagtctttagcaaaaaaaagagaggattttgctagcaaaaagagctcttgctcatttcgcgaatcaaagaaaaaacagatgatcccagacattgagcaacaaatccagattgaacatccatagatcagagataacgaaaccggaattatcttggagaaaggcataatatcaggactttacagaatactgtaccaaggagaacacatcttggtaggtcactatactcgaatcatacatgggcttctcctactggtagaatatctcctaactagttaaaacatcatttttaccatagttggacacttatattaa

SEQ ID NO: 127103 - DNA, 250 bp, Arabidopsis thaliana columbia
  unsure (1)..(250): unsure at all n locations
ggggcgnggggggcaaacacttttacagagagagagaaaccanggcgacgaacccgcttatgagctgtggcatagccgccgtgaacccttcgcttgtgtctgcttgcaagtctaaatggggattcgccggagttccactggccaagcgtccggtaatgtgcgggcgtagtcacaatggatagttctctcgtttgccggggggagccaaagaccagccgaaccccagacggcgactgctaccngggggact

SEQ ID NO: 127104 - DNA, 479 bp, Arabidopsis thaliana columbia
acgcgcacgaaagctgggaccctcaagagcggccgcccggggggggaaaacccccagaaaaacaaccacagagccacggagggggcccggacaacacccacccgggcggaccccgggcgcgcccgggcaaaagggcgcacccgacacgaacccccgccccgcagagcggagcaccagaacccaccaccaaaccctcccaaagggggggggaacaaccccgcgccccccaaacccaacaccgcacacagcccccaaaaagcggcggagccaaacacaaccaaaacaggcggcaccgcccccaaagacgcaaaagcgcgagacggagcacggacgcaccaaccccaccgcgaggcccgacacccgacccagcccgccccgagccgacgaaaaccgcgccggcacccccccagacgccggcgcagcgagaagaaccacaaacaacagaagacacaggccccgccgaggcacaccgaccggag

SEQ ID NO: 127105 - DNA, 478 bp, Arabidopsis thaliana columbia
  unsure (1)..(478): unsure at all n locations
cccacgcgtccggggaaaattaagatnccattgcgacgaagagaagagcgccggattcaaagaccacccaaatacaacatcgaagcaccgagctctttccagcaactttcgttttattcaaccatctggaacaccaatcatctcacactgatcgaatgagaagccctcccccgtctctgctctccctcaccgtctacgtcgtcgtcggagacatcnctcgcagcaacgatctctcccatcttgctgaacacatagcccttgacctcttcgccaggacattggaagctgggacattgatgagagagctctggactctcatggcatctagaaacgaagacgtcctttctggtatcgacgccctcaaaatcaaaatcaacggttgcccgatccttcctactcaatgtgatgagaagttagattgcacgggactagaccacaggcgaacggtgaatgattcccccgatgggcaagtttgaaa

SEQ ID NO: 127106 - DNA, 486 bp, Arabidopsis thaliana columbia
cgcgtacgtaagcttggatcctctagagcggtcgcccttttttttttttttttttttaaaaccggactaaagaagaagctattttttaatgggacggccttggttcattctttccacacaaggggaaaaaaattccggccttaaatcgggtatggaatctcggaagtggtcaacatggttttctgaccttttgttccaaaggctgcaatcggaaactgccctttaaacacttaggaccaattttcaaaactcgctaatggctgaataattaacctttcgcctatctgcatagcccaagacaataaaacttttcattacattgattagaaaggatcggggaaactttaatttcgatttggagggcggaaacaacaaaaagaactttttcgtttccaaatgccttaaaaagcttcaaaattttttcattcaatttcccagcttccaatgtcctcgcaaaaaggtgaaggccaatttgaccaggaaaat

SEQ ID NO: 127107 - DNA, 505 bp, Arabidopsis thaliana columbia
agtaccggtcctgaattcccggggtcgacccacgcgtccgatcggaagtatggaaagggaccggttccaccggaaacatcggcggcggcggatgattattcgtcttggaacgagactggtgtcaccggcatgggcttcggttttaagcgtgtcataaaaaattccaccagcccggccgtcaaaccagaacctgattaatcggatccaccttcacccgacccagatccacccagaagaagacccttttgaagccttagggaaaaaccattggggtaatgggccggagaaattccgcaatccaagaaagccaccccgggtttggttcggaccttccaaaccggagaaggagcttgtttaaccttataaccgacttgccttcaattccaaaggcaccaaggttaaccggaccttccttgaccgggtccaaggccttactaccaccacacccttttttaatgcaccaggaggagttagggattcctggaactcacctcctcctcaacct

SEQ ID NO: 127108 - DNA, 517 bp, Arabidopsis thaliana columbia
ccgcgtccgtaagctgggatcctctaaaggggtccgccctggggccttttttataattagtatattacttctttgttcgaggccccgggcaattggtttttggcgcccagaaaatatcaacctttagagaaaaatcccaaaaacacaatctacattttgcgcgaacaccaacaaaatggggtgccacagggccccggcgcatcaaaaattttttttttctaaaagggggtgggggacccaaaaaggaaacttggggtggcttttttttaaaacacggcgctcgccccacacaagtatatactttgagatcttttcctgtggggggaggtattataaaagggggacccaaaatttttttttttttttaacccgggtgtggtggggtgaaccgctggggcccgccctcgtggggggggaaaaaaaaaaataaaaaaggcgtgaaaaggggggcttgaagaaggccacggtgtattaagataaaaaacccctatgtgccctgaaagacacgggcggtatg

SEQ ID NO: 127109 - DNA, 483 bp, Arabidopsis thaliana columbia
  unsure (1)..(483): unsure at all n locations
cgttcacagccggaggaaagacccgaccagaggaancacccggcgcaggaagcacagaagagaagagcggaagcgaaaaagacagcaacaaccaccaacaagcgcgcagaggaagacaaacgccgccgccacagaaagcaccgcaaacgccgggcgaaaggactctttcttttgcggggggggagcaaagccgaggagcccgaagcgaagcgagagacaccaacagaacccggaaggaggcgagccgacaagccgagagacagcgccgcacacccaacccccgccccacaacggccgcgacacgccgacaacaccacaaacgacccgccgcggaaggcgcgaccgaacgaagagagagggagcaggcggccaaccagacgccaacaagaaaaaagaggccaaacacacaaggaccgaaaccccgcgcgaaaacgggcacgacggagagagaccgcgagaacgccacagggcgggagagggcga

SEQ ID NO: 127110 - DNA, 479 bp, Arabidopsis thaliana columbia
  unsure (1)..(479): unsure at all n locations
cgcgtacgtaagcttggatcctctagagcgttcgccctttttttttttttttttacaaaatctaaccctcaagacatcaaatacagggaatgaacattcagggatttctcctttttggtggccatgagctgtatcttactattgatgtctatactccatagcaaatcgaaagaaaaacaaagggacatccctccntattaaggagttgaatatatctagctgacagctatgaaaccaaaaactgaatgcaggagaaaagttggtcaagcctgagtgacgagccttgggcctgcgctacaacacaaaacattgacatgtgaaaattgctttcctcgactatgatgatatggtgccctttaacctgatcgatgcgaccaaaaagattccaattaaactttaccccgtgaagtaaaagctttaaaagcagaccgcagcagtgcataatggagactccatacacacaatcacttttgtggctg

SEQ ID NO: 127111 - DNA, 446 bp, Arabidopsis thaliana columbia
gaccccgcgggcggggaagaagaacagattttcatcaaaccaaagccctccaaaaggatcccggaaagggagaagaacgcatcgacttcgccgaagaaggacttgggtccgagtggtatatatctaaccagcgccttttgcaacccgacccacgacttccgatccttctctcctttgaaaccgacgaactttttttttgcgacgggtggagacaggaaccggaggagtgggccttgcctaaaaccattcctatctcgaagatctcggcagacgagatcctttttcgctgaccgccagacccgatacgtctgagggggaaatgtcttgaagctccaacacttcgggtgccggtccctattccgaatctaagacacccggcgtatggtgattacggagagaccccgctgaatctgatcatctgtatggtacttgctcggcgctgaata

SEQ ID NO: 127112 - DNA, 335 bp, Arabidopsis thaliana columbia
cgggctttgaagggcccggcccgaccccccgcgctcccagcaggagcgagcggagaggcctggcgccggccagagaatagcgtgtggtgacgcgcgacaaacggcccggaggaacaaggaaagaaacgggcaagccacaagaaacagggcgccgagtcgagtacgagcaggagccccacgggcgttcgaacgagcacgcaacgccgtaacatacccgcccgacgcgcaggagcagcggagccacccaccctccccccgcacggagaaagtccgacagaagccgcaagagggcccccaacaccgcgcgaaatacgccagagacgataagacccgag

SEQ ID NO: 127113 - DNA, 314 bp, Arabidopsis thaliana columbia
gacggcgcatgcacgcctacgtaagcttggatcctctagagcggtcggcctttttttttttttttttttttagctaaaaagccgaagataaactggaaagggctcagttcgaacaaagggttgggaattaccaatcacctttaaaccgagatgacttgacaaacttaaaagagtgttaccgaagaagaagggaatcctgaagattatttcttggaaactttcttcttccctgcaataacaattttcttgcctttaaaagacccgcaggtggtcttgggtctttgtgccccacatggagcccttggatgtgcctt

SEQ ID NO: 127114 - DNA, 487 bp, Arabidopsis thaliana columbia
  unsure (1)..(487): unsure at all n locations
gggnnnaaggggaaaaccaagccggggcaggagaagacccaaaaggaaccccccaagggaggcaaagaacggaccacacaaaggccgggggcagagaggacaacccacgcaaaacccggacaccggaaccgaccggccggagggaacagaccggcaacgggacaaaaagccctcctcccgcgcgggacaagaaagggcgacaacgccgcaacacaacaccaccaaaggaaaggaaccgcaaacccaaaaaacccagccaaaagcaccaacccggggcccaaaagcgaagacggggacacgcgcaccgccaacaacaccagaaaacaagacaccggcggcgcaaaggagaaaaaaccgcgacgagaaaacacgcaacaccccagcggagaacagcagacgcccacggcaagcagcggccaaccgggggcccgaaaaaacggaacaggacagaacaaagcggcgcgagaaccggaaaaaaaaaaaagac

SEQ ID NO: 127115 - DNA, 479 bp, Arabidopsis thaliana columbia
  unsure (1)..(479): unsure at all n locations
cgcgtacgtaagcttggatcctctagagcggtcgcccttgntgttaaatccctttattttaatttattcttttgagggaaaacatttataactttcagagaccccacaaaaaattttgcggctcttttttttggagaaccaacaatggtaaagaatccgagggaaaatctatttaaaaccgggggggttcctaatgagaaaaagaccaatccacccgagaagggaaacaacataacgggcattctcaaactgccgggggggtaccaagccgagtccggccaatatgcgacaaccgcgacgttatcagaggggctccttcatcggaaagctccaatcctctggggctccccccatctgacgaaaacttcaccctccaggcccaccggaaacaaaccgggaagccgcacgggggtggaagaaccacattacaacccggaggttagggaaggggccctacaacaccccagagcggcgaggca

SEQ ID NO: 127116 - DNA, 465 bp, Arabidopsis thaliana columbia
  unsure (1)..(465): unsure at all n locations
gccccgcgtccggggagtgaggagcttttctcagcgagaatccggctccacaataattgaagcctctggagctacgaggaatcagtttggaccaagtcttcaatcaaatgtgacggttgttcttgagcgctaatgacgaagatttttcaatcaaagagctggctcttgcatcganttcnttttagcggggagccagaaagatgccatggaagactctgnngaaatagcgatcgaaaagctggttcatgtctcaaaggacaccgatccaaaagtttccactgaagctgagcaatgtttgaccacagtcttgtcccaatacgatccttgcagatgcttaagcgttattgccccattatcggtgacggaagatgagaaaactcttggcgctcgcataaatagattaacgaagcttgtgggtaggctctcgcaagacgactaaatggatcaatcgtcttcttttttgcc

SEQ ID NO: 127117 - DNA, 493 bp, Arabidopsis thaliana columbia
cacgcgtacgtaagcttggatcctctagagcgtccgccctttttttttttttttttttgtgaaatggtttaagagaaagaaacaaagttccaaaagacacattcgttctcaataaggtgctatgtaaccttaaataagaccaaaaagaaacaagaaagtccttttcaaggtagatcagatccagcagcttggctcgtaccaccaccaaaaccaccagctccacgaccaaacccttgccttgctccactagctccacccctgaagccaggctggtaatcagcaggtgctccagccttgtcaccatactctccacctgatttaggacctccacggtatccatctctgtcaccaaacctcctctctccatcaccacgaggagggccacggtgacggtcaccaccacctccaaaaggtcgaccaagaggcttctggtgcttctttagagtaccaggaacaatctcagatgggagattaaggtaagtcctaaaaaaga

SEQ ID NO: 127118 - DNA, 500 bp, Arabidopsis thaliana columbia
aggtcccggtctcggattcccgggtcgacccacgcgtccgaaagaatttcttttttctacatgtgcacaaaacattggatttgatgggatatgccgcgatggctgtctccaccgaatctgctcttccactaattctgaccattgacccgggcgcatcagctgcgactcacactattgatcggacactggcgtgcactactaagcgttgcactaccggaatgactgtcaaggtgggtgacctcatgacttcatgtatggatcacacgacaccgtggatgtctacgacaatgccgcatttgatggctgtgacacctcctgcttgactgagacccctgcttatggagacaccagactcactctaagaactgagggagtcacctatcttcatctgttgacacacctgatgcactgcagttggctgcttccaagctacaccactagatgctgcatccattgctcgcggacctctggccactcacacgcaacctgatacgactacg

SEQ ID NO: 127119 - DNA, 491 bp, Arabidopsis thaliana columbia
  unsure (1)..(491): unsure at all n locations
cctatagaagactatgacgtcgcatgcacgcgtacgtaagcttggatcctctagagcggccgcccttttttttttttttttcacttgaacgatcttgaaaatcaatgagtttatcaaattctctaagacattaattgttcgtgatgataatgatgatggcgataaatcgatgtcgagatagtataagggctcctagctttgtagagcttatgacgtggaattccatccaaatctctattacatcgagggccttaaatccttaataaaggcaaaagcactgactacaacgtggttctctagaccattttgatccacactccttaccgaagacccttagatactcttacgaaaacgtagatagtaactcccttagtgacacaacttgcatatggtggaggaagactacattgaagagcgtctcgactccttgattgtggaggatctgcttgaaggcntacacggagctcttgtccttgacagctgaaccagac

SEQ ID NO: 127120 - DNA, 454 bp, Arabidopsis thaliana columbia
ccgcgtacgtaagcttggatcctctagagcgtccgccctttttttaattctttaagaatttctagcaacctcattaatctgcaatctaattcaaatgggcaactctctccctcataaaaaggcacattgttttcgtttatatctgcacaagcggctcaaaagaagacatgccgaaacaaaacgggacttcctcctttatggggtagccacagcacagccaccttctagcaccgggcagcgtactctgtttgggggccaataccgaaaaaccgaccggcccataatattcttcaaaggcagaggaccccatacgtgcgactcataagctgggattccgggagtcacccataacaaaaactgaatttgtccgggacccctaactggagaggattgcataaccctgagggcttcacaggaattgttgattgcctagggacaccttgaaccaaagtcg

SEQ ID NO: 127121 - DNA, 451 bp, Arabidopsis thaliana columbia
cgccgcgccgtaagctgggaccttagagcgtgcgccttttttttttttttttggggaatacgaaaatgagaaacagacgggtttaagagatgcgaaaacgagatggagagttcataaatagattgtggataccacgtacactaattcgtattcagaacagaccccagaaagaagctgtcttaggttttgacggagccaggaacaaagagaaggcccaagacacccccttaaacggagaccccccagggggcgcagagttcacaaggagctcttcagcatgagcagaagactaacctttccaatagactcgaggacaagccgacccagcctcgagcggggccgtttgagcgccctagagcagatacatcttcgagggggttagggaggccaagagggcaggatactggccaagggatgtaccatccgttcagaaccaccgagagcagtatgg

SEQ ID NO: 127122 - DNA, 260 bp, Arabidopsis thaliana columbia
  unsure (1)..(260): unsure at all n locations
cccacgggngggaggagnnaaaacagagtccagaggggggggaaaaccggcagaagaaagaaagacgaagacccggggagagcgcagcgcacaaccaaccggcgggacgcggccccacaaagacagagcacagcacccgcacgccgaggcccaacgagggagaagaaaaccgcgaggaaacaagaccacgcgccaagagaaacgacctccaacggacgggcggagggcgaagagggagagcaccgcgcaaagccgggcag

SEQ ID NO: 127123 - DNA, 476 bp, Arabidopsis thaliana columbia
  unsure (1)..(476): unsure at all n locations
gccggggggaaattcctcttacaacaaagggaaatccataaattgggcacctttaacgtgcccacaaatggaaaccaactatcaagaggaaccactaattcctacaggagatcccaaggcaccacctgcacgccatctgagcaccccgggcacgaaatattcctccttttaggcggggaaaaacaccgagaaacccacaacccaaacaaaaacaaagaaccaagaacacaaagcgcagcgcaacgccaaaagagagaaaacaaaacgcgcaaagaaacaaccaaagaaaagaacaaaccaaggaaaagcaacccacacaagggcacaccaacgccaaccccacacacaacacgcccacaggagaaggaacaaaacacacagnggaaaacaccacacaaacaacgcagaacgcccaacaacacacgagacaccccgacgaaccaacgcaccanccccaaccaccagcaaacaccaaa

SEQ ID NO: 127124 - DNA, 452 bp, Arabidopsis thaliana columbia
  unsure (1)..(452): unsure at all n locations
cccccngcggggaaagaacggggtccgggcgcgaaagccaccagaacaccacaacccaggggcaacggacaagaccaggggaacagagcgggaacggcaagccaaggacggaaccaagaagaggacaaccacagcccgaccagcccgaaaaggaaaggaccctcatacgggggggggggaagagggaggcaacggacagggcccaaaacaagcccgaccagcggggggagccaccacacgaacccccgagaccccaaaccaacagacccccaccccgaccccacgagacacggacacccgcaaaacgcgaaacacgcccgcgcaaaaacaaaaaccgcacgcaagaaggacaggcccccacccaaagggccgcggacgccgaagaagccccggccgccccaagcgacgagaccgagagccccgccgcaccgggaaggcacagacaccaaacc

SEQ ID NO: 127125 - DNA, 442 bp, Arabidopsis thaliana columbia
caggtaccggtctcggattcccgggtcgacccacgcgtccggtactaatcagagcatgattatgacgatgtggaagatggcgactacataacataaataaagtggcctctttagcgatgggatactgcgtatgatcagcatgcgctggcatgtgacaggatgccaaaccggacagaccgcgagattatacatcattacaatgccatagaggagctgtcctttcctgagacgttctcatcaacataatctggtacggagagaatacaccagtcacatgagcactgggagcataatgactagcttgcctatgaacttccaggataccgaccatggctcatagtccgtcaatcgccacatggaggaggaccgcggataattattaccaattgcggatgatgaccactacacgtgggctaagtctgtccatgcgagaacatatcct

SEQ ID NO: 127126 - DNA, 444 bp, Arabidopsis thaliana columbia
  unsure (1)..(444): unsure at all n locations
gacccacgcggncgagagaaagaaaaaacattcgaggagggagaaacccaggacgaaaccaagaaacgcggcgcgggccccgagaggcgcaacgggaggggccgacgggggcaaagaagcacaggagcaacgagcagacgaacgaaggcacacaccgggaggacaagcccaagaggaggggcgatctttttcgggaggggggggggaggcaggacagcgaacggcaaaaggaacaacacgccggccgaaaaccccgggacgagaacccaagaaggaccacgccaccgccgggaccaaggcgggcggcggagaaggcgaagcgcgaggccgagacgggaacgagcgggaaagagcgaacacaagggacgccggcaaaaccaacgggcaccggggcgagcccacagacaaaaaggaaagaggccaggcagacgcgacgaaacaaaa

SEQ ID NO: 127127 - DNA, 494 bp, Arabidopsis thaliana columbia
  unsure (1)..(494): unsure at all n locations
cacgcgtacgtaagctgggatcctctagagcgtccgccctttttttttttcttttttccggaccaacagggtaaactataacgggctcgatcaagcaagatatctaatgaaagccttataatgatgtttcaaatgggtctgagaatatcacgattataacatgacgttttcacacacagaggtcngaacaacaaaactgtcgtccctctccaagcgggagccgccaagaacctaccctgggccaagagcaaactccttacacggggcaccaccccacaggagggagcacattggaaacgcaactgtaccagcgtaagctgcagccttagcctgtaactatggaaccaagggcttgcagagccccccttaggtgcaggacacttaggtttccaggagcccacacatccgaaccagattctgcgccctcacaatcctgagaaacgacaagtggttcctcttgccatgagccccccatatcttctttttgacaacaa

SEQ ID NO: 127128 - DNA, 485 bp, Arabidopsis thaliana columbia
  unsure (1)..(485): unsure at all n locations
cgcgcacgaaagctgggaacctctagagcggccgcccggggggaaaaaccctccaacagacaagggaaacccaaaacgcggcggaatcaaacggccaacaaaaggaaagcaacgaaaaaaagacccactcccacccaagggagccccgccggtcccgacaaagggaaccggaaacgaagggacagaccctcttctgccaaagggggcacaacanaccggaccnccgcaaaccagaaaagacgcagacccagacccggaagcgcaccaccggaaagaggacagggacacaaggcaaggccccccaacacaggcggaaaagcccgaaacaaccgcacaaacgcgagcagaccccaacaccaaaaaaagagacgggaggaccagcccagagccccagaaacccgcgagccaaccaagcagaaaaagccgaccaacgagaaagcaaaaccccgacacccccagaaaaaggagagccaacaaaccggaca

SEQ ID NO: 127129 - DNA, 468 bp, Arabidopsis thaliana columbia
cccggtttggaggcccgactcgacccacgcgtccgccaaaccaggccgcgttctaaggagacacaaacctgaaaaaagcaaaaatggcggatatggatgggaagaggaagatggtatcatcaaatgtaccaacctcacctaagctgtcttcaaagcttcaggacgctattacatcaccgatcaaaatcgggcctggatcatctccgatcggttgttcagcacctgctctatgctatgcgtacgagctgtgcctgcgactgcctgagctaagaaagctctggtcatgtagtgactttccgcaacggacatcagagacgattctcaaaccagctctacaagctttgcagatcagcaacagataaatttgcgccgattgttctgatactagaccgcacatcaaccacgcggagtggaaccggaggctagattctctcatcacgaagcagacccaacttgtagcctcgatct

SEQ ID NO: 127130 - DNA, 476 bp, Arabidopsis thaliana columbia
  unsure (1)..(476): unsure at all n locations
cgcgcacgaagctgggacctcaagagcggtcgccctttgttaaaacccttttttttttaaacaccaaaaggcaaacacgcggaaaaagcgagaacaaaggaagagcccggaggacccacaagggcaaggcagaggggaatcaaaagcacaccccggccaaaaggaaaacaaaaacgncccggagggtttttaatcttgagaaaaaacaaannccggggaaaggggacggaaaaaaccccccgaccaaaaagaaagggggaaggcgtgaacaccggggggtgccctaagagagaaaaagaattccgcactccccccttgaggaacgcctaaaaggaaaaaacgaaaaaaaaaacccttccccgggagagcaacggggggaaacccgtaagagaaaaagaaggacccgacgcccttttcccccccaaaaaaggtaaagaactccgccacaaaaatggcccccgcggggggtctaaaaa

SEQ ID NO: 127131 - DNA, 410 bp, Arabidopsis thaliana columbia
cgcgtacgtaagctgggatcctctagagcggttcgcctgtgtgttaattctttttttttatacgaaacgaagaactttgacattattcacattggcccaaatgaaatgtattaaaatggatatcttgggtttttttctgcaccaccttgttgtacttgatcatcatcatggagtgagaagtaaggatttttttcactgttggggaacccaaaggacgagcataactccgggaagggagccaacgccggcaaccaacgggaggctgaaacagccacgggggaacgagaggggaacaaacgcgagaggcaaccggcataggagaaacccgagcgagagagagagagacaagacccgcggaaagggaagcccgagaagggcggaaaaaccagacggaccagaaaaagcagcca

SEQ ID NO: 127132 - DNA, 481 bp, Arabidopsis thaliana columbia
  unsure (1)..(481): unsure at all n locations
ccccgggnggggggaaaaaacaacggtttaaaggagcagggaaaccccaacgcaaggagcgaagagacaaacggcgggccaagagcgaagggaagcgaacagaggaacccacaccacaacgaccacagacgggaacgcccacaaaaccagcgaccgccaacagagggcgaaggggaaccgacgcaacaacgctccctaaagaaaggggggggcggacaagaagaggacgcgaacaacaccacacaacgcgcacgaaggcgcggcggccagcacaccggaacaaggggcgcggagaccacaaaggccaacacggcgcaaccacgagaagaaagggacaggcagacccaacccgcccaacaacgggaaaccacagggaaagagcccgcggcggccccaaccgggaagaaaagagagaaccaccccgacgaagaccgcggaaaagacccgccacaggaaacagggaccgaacaccaaaaggcgg

SEQ ID NO: 127133 - DNA, 567 bp, Arabidopsis thaliana columbia
  unsure (1)..(567): unsure at all n locations
gttagctnggatcctctagagcgtttgncctgggtgagtattcctttggtgggtatttcgaacccggagaggggggtgatcttttttggaggtgagggcgcgcctggataccccgagtggttggcgggcccgattttaccgaacggcggggccgtggtggctacaccgcgaccccgggcggcggcggtgcccttcggcgccttttgtccgttttaggagggggcgcccgancgggggggaggcggaggcggggcgggggcggcgagcaggggacacaagccgcgcaccgaagaggggcgggaggagngagagaaaggaaccgaagaccgggcagccacggaagagggcgcggggcagaggngagggggaggcgggggccggcgggcgagcgggggagcgacggcagcaagcgggggcgcggaggacgggcggcagcgaggcacggcggcgagccggcccgagggcgggaggagggggcgccccgggcgcgaagggggacccagagcgcggcgccgcggccgcggcgcggagccgcgccagcagccgagagccgcgggcgcggcgaga

SEQ ID NO: 127134 - DNA, 475 bp, Arabidopsis thaliana columbia
  unsure (1)..(475): unsure at all n locations
gacccacgcgtncgggatctctaaaggagtatcggaggaaccgagaaaccgaggaggccaaagggactgccggctccgcagacggttccgactatgcgggaagaagatggagctcacagggcagcgagagaagaacaggcagacgaagctcctgcacagaagaaacgcggcgcactacacagacaacccgctcattacagacgaagccgccgaagataacgcccggaagagccacaccggccgccatgaccgacacccacacgcacacgccgaagaacaacgccgccacaccgacgagactacaacgtgccgaaggcgccacccaggagaccgcgacggacgggacagagccaagcagaagcgaccctggaaccgccccggcccgaaggaccacaaaaaatgctccacgcctgcggccccccatacacaccccccccccgcggcccccgcgcgcccgcccccccaccccaggacc

SEQ ID NO: 127135 - DNA, 497 bp, Arabidopsis thaliana columbia
cgcgtacgtaagcttggatcctctagagcggtcgccctttttttttttttttaacagatttctcacatgctggaatttgaacaaattgttacctgagtctgaaaaaactatggacctaggaagtgagtaagttacagggaacgaccaatcgagtcttaacaagatcatagctaccttcaacaccacaagtaatagctacacaggttggcacttaccatcttactgatatattaccaccagaaagagcttaaatagtataaaatgccccaacaatcaaatcttcttcatggctcgcatagccaaagttagtgactaaagcgctgctcgaaggtccaatcagctccttgacctcttttgctttcgcggcatgaagcggacactgtggcttccaaggtcaaatgtatggatgcttccatgatctagagaaaccgtcaatgtggatgtgtctgcagaaacgcctggcactgttcccttatgccatgagttttgaagaccca

SEQ ID NO: 127136 - DNA, 440 bp, Arabidopsis thaliana columbia
aggtcccggtctcggattcccgggtcgacccacgcgtccggaatattcttacatggaaggaaaaaggatggactaagggatggctatgaccacgatggcaggggacgccggacatactcatgcgctaagaaggaccatagtacaagggagcagcaggaggactatacactatcagagtggaccactggggatgactacccaggaagcgctaccctttacacggtaaagggtgccgacagaatagactggaggaataggtctgccatcaccgatggtggacgatgccaaacgtcatgtgatggctgatactgctcctccgaggatgctaaccttacatggaaagactggatggaccgtaacactgggagatgcgactatcatatctgatggagcacttgccactgtactagcgagctgaaacaaggctctaatgctatgac

SEQ ID NO: 127137 - DNA, 391 bp, Arabidopsis thaliana columbia
  unsure (1)..(391): unsure at all n locations
nnnnnnnnnnnnnnnnnnnnnnnnnnnnnnnnnnnnnnnnnnnnnnnnnnnnnnnnnnnnnnnnnnnnnnnnncttttttttttttttttcacgggaactaggtccatgattcatatgactgtctgtcacagctagaaaataagaagacgccgatgacgtttatgatagcagtcttaacatcgctcgacatatcactccttcttcgagagaccaactgcctttgacgtggctctgcaacgactgtcttatggcagccggatcagagatagttccatctggctagtgcaccgactcgaccctggatgtctaaacggtgccatccacctacagtagccgcacctcctcgtgagtggcacactactgcaacacaggactccccgagacgcacca

SEQ ID NO: 127138 - DNA, 526 bp, Arabidopsis thaliana columbia
  unsure (1)..(526): unsure at all n locations
ggggggggggggnggggggggggaaaacacttttggcaggagagggggagaaacccacacccaaaaagcaacggcgagaccgcccgggaggaggagaggggcacacacgggaccgccacagggcaaagcgcaaacagggagaagcacgaccgcggaaaaaaacagacgcagacgaaaccgcgaccgacgcgcaaggagcacacgcccgcgcagagaagaaatcctccttttgggggggggggggcgacccgaacagcgccccaaagcaaccgcagaccagccgcgaagaccgcccgacggggaccgcgcgacgcaagaacgggacccgcggacgcggcacgcacgacggaaaaacccaagcggcgcgaccaccgagaacccggcgccgggaaaccggcaaggcggaaagaccgcgcgccaggacgcgaaccaccgcggcaagaggaagcggggcagacccgcggcagggaggcggacgagacggcaggacggccaaaccccggcgcgagcgaggggcgagacgccg

SEQ ID NO: 127139 - DNA, 411 bp, Arabidopsis thaliana columbia
  unsure (1)..(411): unsure at all n locations
cacaggaccaccaggcgcgaaagcaccgaggagaagagcggacccgaggaaaagccaccaacgacaaaaacgcaggagaggaggacnaagccgccggacaggaaaccacagagacagcccgaaaagggacattttttctgcgggggaggggggagaccaccccacacgacactggggacgaagacaaggggaaacggcgggggaggcacgcgccggcgagaaagccgcgccccggacgagcgcgcacaccgaggtacgagccgaaaacgcaactgagagaagcggaagccgaccaaaaacgcaaagggaaagggcacacccggcgccccggagacgaagaaaggggaaaccacccccacgcgccggggaaacgccccgacgcgggggcatgggaccccggcacaagcccag

SEQ ID NO: 127140 - DNA, 433 bp, Arabidopsis thaliana columbia
  unsure (1)..(433): unsure at all n locations
acaaaacaacccccagacaacaaaggccggggaagaacaaccaaggagacccccccgaaggggggcaaaaaaccggacccaaccaagggaggcccaaccccccagagaaaaccaaaaaaaaaacacaagggccactccttttgtttttaggagggaaaaagaacgagggccaaagccaaaaacaccaaaaccggaacccggggaaaaaggcgggaaaaccacgaaagagacaacgcccgaggcacgcgcgcccaccaccaaaacacaggcacggggaaaaagccccccccccccaccgagaagaaaagggcaacccncgcaaccccaagaaaaggggacccaaagaggggccccccaaaccccaaagccccacaaagagaaacacgccggaagaaaccagaaaggagcggaggaagacaaaggagaaccccca

SEQ ID NO: 127141 - DNA, 496 bp, Arabidopsis thaliana columbia
gaggccggacccgccccacccgtccggagggacattgggggagtaaggagagtttaaattgggaaaaaaggggtgggtttggggtgagcgttaacagtaatgaaaagctggggaggtcacatatggagaaggaggggagactaaaagccttttggtcaaacatagctcagcctactactttggagatggaacccattaacaacttttttagaactcgatgctgttctctctcacgcacgccaagtctctcagcctatcatcatcgaatggatggcttcttggtgtcgaaaatgtatttacttgaagcctaagttggagaaattagcggcagaatataataaccgagcaaagttttactatgtggatgtaaacaaggtccctcaaaccttggtgaaacgaggaaacatttcgaaaatgcccactattcaggtatggttactttcttggaatacatgcaactttattgttttgagtaccttgcgatgcatttgacaat

SEQ ID NO: 127142 - DNA, 454 bp, Arabidopsis thaliana columbia
acgcgtacgtaagcttggatcctctagagcggtcgcccttttttttttttttttttctgcaaagcggtcgctgtaaaaacacctcgactgtcacacgtaaaagaaaagaggaacctgtgttcctattaggaaatcgacttgtgagcatcgacgatcactcctttgtagggagaccaacgcccacaaaagcgttttttccatgacggactcagggaaaatgcacgagatatacacccatcacgataggttcccacccgggatccataaggcatccaaggtgctggacaactatgatgacctgcaccaactcttccggagcaaacgtcctctaagatagaacttgtcgtgtcttgtctttactgacccacgcaacgtgcttagaatacggtcgcctctgcatcctatagggggaccaccggtgacagtctctcatatcacatttgcttcccttggg

SEQ ID NO: 127143 - DNA, 497 bp, Arabidopsis thaliana columbia
acgcgtacgtaagctgggatcctctagagcggctcgcccttggttttaaacccatcaaaatataatgcgctctttggggggggaaaacaaaagcctggcccagggggagcaatttacacaaacattcccatcatggtcagggattaatagcctcaacatcccaaaaaaagaagaacccaaatacaggttttctccttgggaggggagccaaaaaaccccgggcttaaagcccggaaagacccccgggaaaaaaaccccccccaactttctcttaaaacttgggaggaaaggcaagacccacaggccgagggagcccaccaaaaacctcaagaccgggatcatcgggcccccgcggcatcaagcgggggacttctccttctggaggccacaagagaaaaaaaccccccatggcataaaccaaaaacccagcttggaacctccatggccacaaactagggtcaaaaaaaaatccgcggaaaaaaacaaccatcggaaag

SEQ ID NO: 127144 - DNA, 486 bp, Arabidopsis thaliana columbia
ccccttcacgtagacctggaatcctataaagcgtccgccctttttttttttttttttttatttttagtctccattcacacgcggttggttcttgggggaaaatgtggggagagctaatttcaaaaaccgagtcatcctttcttatttatcacgagtccaagccaaatttaaagacaaagtgggggccccctctttttttttttgggcgtctattttgaacaagggaaaaaacgaaaacatggctgtttggtgaggtaaaaaaagggttccactcttagtatctgcctgtcacacaaaatttattcctccatagattccccagccattttcacaattttaactccccaaaaaaatggggaaatttgggggaacaaaacctgggtttttttggtgaaagaatagccttggctgaaaacataggctctggggttgggttccaagaaaaccctaaagtatcctttgggcccattagtgaccacacagatt

SEQ ID NO: 127145 - DNA, 491 bp, Arabidopsis thaliana columbia
  unsure (1)..(491): unsure at all n locations
cgcgtacgtaagcttggatcctctagagctgtcgccctttttttttttttttttgattaagaactactccgtattattgaaaatactctgtatattcttgaggcttttgaaagcatgggacgaaaaagtaagaaatacaaatagtactccagcatgagcatgcgtctcgaaatatgaaattaagnttaccctcccttctgagccacagcnntatgacaaggatnaggcaaatacgacccttcatgtgacacaaagtccacaataaaaccaaatgatccaacaatcatcatagagatgctcaaaggattagtatcggtgaatgagtagcttatatgcatccggattcttcaaataataactcgacctcagacttacggactccttttatggcaactaaaagcttttgtccgagcaaatagcggagaactttgactttaaacaaagcttaacagctattgagagcgtatccagaaaactgaacaatgaaaaaa

SEQ ID NO: 127146 - DNA, 462 bp, Arabidopsis thaliana columbia
  unsure (1)..(462): unsure at all n locations
ccccgcggcgcccgggactgaaaggataaagagagctggatcgnaggtaggctaactggaaggctcagtgagccatgaaaatctatctgacggacaaggagcagagtgatctttgcgtggtagcttataagcacctaactgcctcttcttgatgagcctactaaccatttgtactttgacagggggcancgcagccgcgcattgaacgagagggacggcggcccgggactggcgaggcaccaacccaggatgagccaccccccggcccacgacaaacgggcccgcaagaacaaggcgtcacctactgggatgggggccccatggacttcaagaggctccttaaggcttacgcccgcctttaacacccgatatataaaggccggggctttcctctctctgcagggaacaggaaatgacccctcaccggggtcaccctcctccaaaaagacacggacagctttg

SEQ ID NO: 127147 - DNA, 431 bp, Arabidopsis thaliana columbia
  unsure (1)..(431): unsure at all n locations
cgcgtacgtaagctgggatcctctagagcgttcgcccgggggggaaaatccccntaacacgcagacaagaaattgaggaggatctcttaagaaaaactctaaaagaaaacacacatggactcttggtgagacacataaaggaaagagaagaccccatcgcggagagcgagaagacgggccccaagactttccctcttttaagcggggcgagaaaacaaaagcaaccacggcggcaaacaacagcagagcacccgcggacccaagccaaagaagcaaaaaagacaaaagaacccggccgaccgcagagccgaagaaaccagaacgaggaaccgaggagagccgaggaggcgccggccacgccgccccgccaccgcaaaccacaaccagaacacccagacccaccagcacgaccaaaagaagcgccaaagccc

SEQ ID NO: 127148 - DNA, 496 bp, Arabidopsis thaliana columbia
  unsure (1)..(496): unsure at all n locations
ccgggaagacaccacgcgcgccggggaggagaacaaccccaaacggaacgccggcaaggggcgcacacaacacccagcacagaagaccacgagccggaacacgccgccgcccccccaggaacnaccagcgacgggccgcgccagcgcgcccctccctaagacgcagggagcagcaaagcaggagagggacacaagacgagaaacacgcacggcacgagagggggagcgagacagacacaccgagacacaaagggccccggagagccgacggcaagaccaacaagcagccggggcgcgaacgacaagagggaaacccgccccgggcgaaagagggagcgacccgcgacggccacagcggacccacgagacacggaaacgacaccaaggccaaccccgaaagggccggaaccagccacccggcgcggggacgcgcgccacacaccccgcgcgcgccacccaggacacccgacaaagacagcacagcgggaaagggaag

SEQ ID NO: 127149 - DNA, 513 bp, Arabidopsis thaliana columbia
cgcgtacgtaagctgggatcctctagagcgttcgcccttttttttttttttttttttgacaatacgtttgaattcgttggatgaggttatattgatcacttacaataggatattgaatgtttactagttttttttatgtctggtgtaccgtagtgcttaatctatggacacgctgagaggtggaaaacagcctccattttgggggggaaggacaagccgggggggggcaaagacgacgaagcaaagaagggcgcccggggacgacccccacgggcggaacaccgcccaaccaccaccggagcaggaaagaggagacccagaacggggggagggggccacgcagggggggagaagaacaacacgaaaaagcgggaagcgaagagacgggaggggacaaagaaagcaggcagcagaccgagggaggaccaagggaaagcaccaaggaggcagaagggaggaaccaaaacaaaacacgcaccacagcaccaagacatcgcgaagaacaagaaaaaa

SEQ ID NO: 127150 - DNA, 355 bp, Arabidopsis thaliana columbia
  unsure (1)..(355): unsure at all n locations
cccccgngnggaggaaggaggaaggtccggaccgggaaaccccgaaaaggaggagacaacccccggggaacagaagagagacccccagggcaaccccaagccggaaacggaaagcaacggccccccgaccacaaagccgaaaaccgaaccaccagaacaccctcttaccaggggggagaacacccgaaagagccccagcaaccacaacgcgcaaggggcggagaggccgcgaccccggaaccccccgggcagcccccgaccccacaccccaccacccgccccaacgcccccgccggcgcgcaaagagggccccccgcgagacacacgccccgcgcgggagcaggcccaaacggcc

SEQ ID NO: 127151 - DNA, 496 bp, Arabidopsis thaliana columbia
ccccggttcggaggccagacccgccccgcgtccgacaaatggcctagggctttcggcttgagagacagacccgtatccttaagcagaggatgaaggttcctccagctctgaaccagtcgaccaagaccgtagataagaatctgggcaccagccttttcaagagtcttttagaagtataggccagaggacaaagcccgtaaagaaggaacgcctttttttcaaggctgaagcagaggcagaaggaagcctgatgaatccaagaagcccaatggggcagaggcggcctcaacgctgggactcacctcatcgagcaaaacagggcccgcttgtggccattgcacacgaaggggaccctatcgaggtggtggtatggataactgcactgtgcaggagatgggaagtccctgatgggttgtaaagggaaaattgggtgtgggtgcgggcgttaaccaaaagatgggggtggcctcgggcttgccacttggtagtaacgagg

SEQ ID NO: 127152 - DNA, 490 bp, Arabidopsis thaliana columbia
cgcgtacgtaagcttggatcctctagagcgttcgcccttttttttttttcctttttaacatccgaaagagcatagaaattaaaataaaacaaggttacaaaatatcgctaaacaacaaaaccattatcatatgtttcatagcagagaacataaggtatgatgcctagttcattctcggggcagcctcctttttaatatcccgctcctcagctcaggactaggctagagactaggatcccattatgccacctccccacttgttcctgtactcctagaacttgtcgatgaagatagccttgatggcctcgaggattttgctgaactcaagcttgtcctcgctcttgacaggggtcaagcacaaggcagcagcagtcttctggtgaacgaccgctccaagacgagattttcccttaacaatgcagtaagggacttccattttcctgcagagtgcaggtaaccagaccaccaacttgatagggtcaacatcgtg

SEQ ID NO: 127153 - DNA, 455 bp, Arabidopsis thaliana columbia
  unsure (1)..(455): unsure at all n locations
cacccacaacggagcaggggaagcaacaacagccncggggagaggagagcaaccagacgggcagaagatgcaccagagccaacccccagcacgaaaccacccaagcagcaggaaccagcagggggacgctgaaaacaaggggggggaanaaaccaaccagagcaccacaagcaaccgacacaccgaagaagcggggcgggcggcagganccgcgcaaacacaagagagccccacccaaccaaaggaccagccaacccacagggcagcgcgaaccaacacgcaccaagcaaaaagaagggaggccagccgccgaaacaagaaggagcaacgaagaagacaggcggggcgcgggccggaagaaaaaaaacagacgaaagcggccgggcgcaagcaaagggaaagaaaacacaacgcaaaggaacgacccccccgccggacccagggcggggaagcca

SEQ ID NO: 127154 - DNA, 449 bp, Arabidopsis thaliana columbia
ggaaccttagccggggggggcaaacccccaaaggaaggccgggcgacaccagccagggggccaaaccacaggcaccccagcacgggacgagacgaaagaaagagagcgagaggaaagccccacaagaacccaagcagccagcagcgagcgaagcaccaaaccggaagggaattcctctcgcgggggggaaagaaaaacgggagcgacccccagggcaccagcccgcggggaaaggggcggggcggaaccgcgcggggaaccaggcccggccgacaggagaaacacaacccgcacgaaccgggagcgcgcacacccccgcagagacagggcccacaccaaggcaaaaaggcacaaaacggaaagagcacgaaccgacgccacccgcggaggaacaaccgggaaaccacacccgggagcaggagagaaaaggggccggcacagggggaaag

SEQ ID NO: 127155 - DNA, 466 bp, Arabidopsis thaliana columbia
  unsure (1)..(466): unsure at all n locations
cccccccgtccgggctctacaccgcaggtttactgagtcagaggacgcctccctggggaatgccaccttgttgcacgggcgcctaggttactctctgaagagaaactccaacggcgaggtgtacacaggttatgaccgaggtgattattgcgcttcgttgaaaagcaaaatgcgcgatggacaatcaggttcncttgtttggacaggctcaggacccgacaacagccggagaggaaacctatcaacagnnccctgggaaacggaaagaccactcccggccatgcagttttcggggagaccactcacgcaatgttgctgcggggacacagctaacctgctggctgccgaggttgatcatcacgcttactggaatacagccattctcggatcaaataatgaacctggctggggaacacactccatatctacaacccattgattggactgtttcccgggggtccaccca

SEQ ID NO: 127156 - DNA, 409 bp, Arabidopsis thaliana columbia
ccacgcggcgagaaagaaagaagagggtaagaggaagggggaaaacccacccagaacacaccaccgaggcggacgggaacccagacgcaaccacacgcaagaagacccaacacagcacgggaccacccaacacgcgaccgcaacgaaagacccccaacagaccagaagcgacaaagcaagccagcggccctttatttggaggggggccaaacgcagcgaacggccgaaaagcgaccacgaacaaccaaaaccggagacgccgaccgccaagccaaaaccgccgcgcgaacagcggccgggacgcacaaaacacaccacccgaccgagggcgggaacaggggccggggagagagcagggcaagaggagcgaagagcgcgcacgaaccggaccaccaaggaaaaacacaaa

SEQ ID NO: 127157 - DNA, 500 bp, Arabidopsis thaliana columbia
  unsure (1)..(500): unsure at all n locations
cgcgcacgtaagctgggaccctctagagcggtcgcccggggggtaaaaacccttgaagaaagacggaccaagaggaacggacggagagacaaagacacgggcaaaaacgacacacgaaagcagagataattcgccagaccgacagagaagagaacgcccgcgacagaaggacccccgcagacggaacggtcnctcctatagaggggggggacaggacaccgaagcacagcaagcaacccaaagcccacagaagacaacagggggggaacccagccaaaaaaagagcgggacgacacaacgcgagagcaaaggaagcgaacgaaagcaaaggacgggagcaccaagaggacacgacagacaaaaanaaaacccggaagaaccaaggaggaagacagagacagaacgaacgaaaaaggggacacaacggacaaacacacaaagcgagaaaggggagaaaggaaaccaaagaaaaaacaagaaaacgagacgacaccaacaaa

SEQ ID NO: 127158 - DNA, 346 bp, Arabidopsis thaliana columbia
  unsure (1)..(346): unsure at all n locations
caaagaaactcaacgccttccggggaaagcccaggagggccaagccggccttcgaaacctgaggcaacggacccgacgggngnaggcgaatccgacgatcccaaagaaggcgcccggggactccctctcgcacacataaactccccacaccacgcgagcggagccggggcatccgaacaaaggaagcccccacattggccaccacccggccatccgaaaaccccggagccgacccggcccacggaaccaaaaccgagccctaacccaacccaacaaaagaacccacccgttgcggacaaggcacccacccccccacccaacccacaacaccacggcacggaaggaa

SEQ ID NO: 127159 - DNA, 396 bp, Arabidopsis thaliana columbia
  unsure (1)..(396): unsure at all n locations
cccgggggggggnggnggnngagtgggggggggggagcggcaaaaacaggcccgccacaagggccgggaacacacagaggcccaaccccgcgaaaagaccgccaacaccggcacacccccgagcgggagagacaccgacccaaccaaccccctcctaccgggggggaaacccagacgcccgaagcgccaacagcccaaaccggggccgggccgcggccgaacaacgagggccaacccaggagccccgcacgcgggaccccagcccccgaagcgccgcgggaagcggcgagcaggaacacccggagcagaggacgaacgggcaaggaagcccggaccgggcggcaaggcggagacgagcacgaccgcgcagcccgcggcacgagcaccaggggcggg

SEQ ID NO: 127160 - DNA, 408 bp, Arabidopsis thaliana columbia
cccgacccgacccacgcgtccgagcagcacatatccgttttaagttgtgagaaggcgcctacaaatgcagccacatgctaaaaggttaagcgcagtggctacttgtgtgaagatcattgaacaaggaggtgttcctgctctatatgctggcttgattcccagcttattgcaggttttgccttccgcggcaatcagtttcttgtttacgagttctgaaagtgtctgaagtagaatctccgctaagacaataagcatgagaatgaccattactgctggagctgtcagaggagagtttttcgtctctttctggggtttacactgattcgtgtagtttttccacacttcatcgaaaacagataagaggttgtgaaacggttttttgcaagatataataagatttgggtaaaa

SEQ ID NO: 127161 - DNA, 494 bp, Arabidopsis thaliana columbia
cgcgtcacgtaagctgtggatcctctagagcggtcgccctttttttttttttttttttttttatttgtttcttggggatttcaccccaattcttattttttttggaaaaaaacctttcaacaccctttatttggtttcggaggaagggggaaaaacctccccaaatagggggaaccccaaaaagaaaacgtaaatacttttcccgggaggcaccccaaccagaaatggggaaattcctattggctaatggcctaagggggaggatcttcttttaaaaccacttttaatgaactctaaaaaaaagaaccggatggccggggagggaaaacccggcattaggcgggaatcaacgcccccttatggagcgggaccccctcttggttaaaggttcttaacaaagtaggccgtgggctaaaccttttaaaaagggactggctttggaaacccctttttcacaattttaaaggttttttgtgttcttcgacccccgggcc

SEQ ID NO: 127162 - DNA, 405 bp, Arabidopsis thaliana columbia
  unsure (1)..(405): unsure at all n locations
aaagcgaaattaggcgggggggaaaacccggcaacagacagaaaaaaacgggccgcggcggggaggggacacaaccccacagaacgcccgggcaaagaagaggacggacgcgagaccggacacaacgccgcgagacccagacggagccgaaccgcaaaggagcagcctcctcccggaaacgggggcaacagccggaccacgcgcggaacgcgcaaacccccccgaaacgcgagggcgacggacgacagcgcgaaacccccacacagacaaaacaccgaccccgggggagcacacccgaacgcgcccacaaaggcgccaccacggaagaagaganacgaaccagaaaacggaacggagaacccccgcagacggcaaacgcaaaaaccaaccggaaaacaacacgga

SEQ ID NO: 127163 - DNA, 522 bp, Arabidopsis thaliana columbia
  unsure (1)..(522): unsure at all n locations
accccgcggnggagggaagaagaagagaatanggggagggggaaaagcccgccacgaagcgacccgcggcgggggggcgggcagacccggcacacgccagcaagggcaccccaaaaacgcggacaggagagacccccacgcggaggcggagacccgcacgaacaacaacggcagccgggggcgggggcccccctcaaaaagaagaggggggcacccacaaagagggaaggcccaacaaagaaagacaaacaacaccccaaaacgcgggggagcaggaccgcgccaggccccaaaacgacccaccccaacgaaaaaacgcaaagcccccaacaaagcgaaacacaaccaaccgagaacgncaggaacacgagggcacgagaggcaacgcacggaagcccgaccgccgccagcagccgcaggacgacccagacacggacaaacaacaaggagaaaagggacgagacgccaggacgggagggaacgagacacaccccgacaaacccccgcagacggaacaagaag

SEQ ID NO: 127164 - DNA, 513 bp, Arabidopsis thaliana columbia
cgcgtacgtaagcttggatcctctagagcggtcgcccttttttttttatcctttttggacaatccgatagaaattggcgcataaggagaaaaagagcacagacaataggaaatgacatgagccgagataattcataagaatgttgtagaaaagaaattaagctccggagaagctcgggggcgaagaagtccctcaaatttgacggtgaggacacgacgggagggggcgaatccgacgaaccaagggaaggccccccggggacgccctccggccaacatcaaccccaccaaacacccgagcggagaaccggcaaccgaacaacggaagccaacacaaggccccgggccggcatccgaaaaccccgagaaggaaaccggaccaacgggacccaaaacccgcgcacaacccccaaagagaccccccggaaacccccacgccggcgggaaggcgaaacaacaagccacgacccacaccaaacaccaccaggggacggggaacggaaagaaaccacgc

SEQ ID NO: 127165 - DNA, 464 bp, Arabidopsis thaliana columbia
  unsure (1)..(464): unsure at all n locations
ggnggaaggaaagggtcccgggggggcgagaaaccgcngaaacaaacaggacgaaaacccgcccggggaccaagacaaagccccccgcccagggccgcccccccaaacgcaggaaagagagaagccgcacgcgcccccggcaagaaccagaaccnaggaaaacgcgaacacaccacaaacactccctcaaaaaggggggggggaaaaacccgcaaagaggccccaaggcggacaaaagaccagcaaaaagcgcggagggggaaacccaaaaccagacaagacacgacgccacagaaaaaaggaagagacgccgcgaacgcgccgaagcgaaccaccccgcaaaaaccagcaaccgcgaccgaagggaagaagacgcggaggacgccagcgccaaagccgaaccacgccccgaaacggaaggcaagaacggcgaaacaccacggcaagagcacgcgcgcggaggc

SEQ ID NO: 127166 - DNA, 467 bp, Arabidopsis thaliana columbia
  unsure (1)..(467): unsure at all n locations
cgcgcacgtaagcngggacccacaagagctttcgcccggggggaaaacaccccnaccggaccaaaagggaaaacaanaggggcncgancaagaaaagacgggaacgaaagccacaacagaggaaacaaagggacagaaaagacgcggagacaacagaaccgcgacacaagagggagcagacaaggcnctgctccatatacgggggggaagccagaaccaaccagggacagagcagcaccagcaacgagaccacccggagaggggcacaaggagacaaacggaaacgagcacgccgcagaaaggaagaaacagaagcaaaaggcacccaaggagacccaaggcagagaaacacgaggagacggaaccgcaagacacgcacacgagcagcgagcgcccagagcggcagccacagagagggaaagagaaagaaaaaaaggaaacccgagaaaggaccaggccgcagaggc

SEQ ID NO: 127167 - DNA, 430 bp, Arabidopsis thaliana columbia
  unsure (1)..(430): unsure at all n locations
ccccgnggggagaggnaaaagggcctcacggggagggagacccagaacccggcggaaaggccaacaaccggcaccacaacaacccgagggagcacgcagcaacgcaagggagcgaccgccggcccaaagagagaccccgccccccggcagccgcacaaacgaagggcccctctaaaggcgggggcgaagggccgcagcgaccgcaacccggaaacagcccaacgcccgcgcgcccgagccgcgccccccggacgaggagccggcgagcccagagcggcgccccccagcccgccgccgagcaggccaggacggcaacggccgaagcgcgcggcacccccgagcgggaggggggcaacgggcccgccgacgcgggggcacccggcgcacacccccccgcccccacgcgacgcaccgagaaccgccggcggca

SEQ ID NO: 127168 - DNA, 406 bp, Arabidopsis thaliana columbia
  unsure (1)..(406): unsure at all n locations
ccgccgtaccgggacccaagccgtcgcccgggaaaaccccaaccacggggaacccaaaaggggaccgcaccggcccaaaaggaaccacnaaaagaggcnccncaccccggggaccccccggccccacaaaacacacaaccccaggccagactttcttctttgagggggggagcaaaagggaacacccacacaaaaaaccccaacccgaacggcgggcgccacaaagaaaggcaaacaccagagagacggaaccccgaaaggaggaaaagccaccccacccccgcaaacccgagggccacaaaacccccaaaaaaggcgcaaagggcaccaacccaccgcacgcaacccccggcccacaacaaaaccaaagagacaccacaccgacagacgaaacacaccgcagaca

SEQ ID NO: 127169 - DNA, 372 bp, Arabidopsis thaliana columbia
aaaaacaacaacaacacccacaaaccccacccaaaacaacacaaacccacaccaccaaaacgaccccaccaacaaaacaccaccacccccccacaaccccaccacacaccttttttttttacaaggagcccccgcaacgcgaagcgccagcgccacccccccgaccaagagagcacgcaaacgcaaggccaggaccgacgcgcgaaggcaaccaggccacgccagcgagccaccagaacgaaacagaacagaacgacgacccccccaagcccaacacaacccgcccggacacaacgcaagaccagggagacgagaaacacaacgcggacaacaggccaagcagcgccgaacaccagcgaacaaaaacaccga

SEQ ID NO: 127170 - DNA, 211 bp, Arabidopsis thaliana columbia
gtttttagcaattcgcggcccggttcggggtcccagctcgaccccgcgtccgggactataagacagagatgatggtccatttgtgggagtgctgtgtcggtcgaaaataccgcttcagaaggtcaataccaggttgatggtgatgcttcgaatagtagacgggttgttgagcgcagacgacgcacgcgtccctttagctataataatcatc

SEQ ID NO: 127171 - DNA, 489 bp, Arabidopsis thaliana columbia
gcccagcgtccgaaaaaaaaaagaaattttcagggggagcaaatccggcgaggaaaagagcaacaccttcgttagactctgagatggctccaaacggcggctcaggcgtgccatcccaaagtttagaaccacaagcacgaggacagcctgcaagagagagagagggccggaggcccgcaggaaagggggatttctccttttggggggcggccacggactaacgagcgcgggggcccgcccgaggagcgccaagaaaggaggacggaaaggaacagaatcgagtagcacaacgcccacgcaaaccccggatagcaatgctggcggggagtggctacccgagcgcaacatgccctgctctacaggagccctcaccgggagataacaaggcggcggcccccccggacctggtatgttagtgcgaacagagaagtaggagagacaaacgcggacgagaccagctcacggtcagcgtggttgacgacacgatgg

SEQ ID NO: 127172 - DNA, 456 bp, Arabidopsis thaliana columbia
  unsure (1)..(456): unsure at all n locations
ggaagaaaacaaaaagccttagccagggggggaaagccgttccacaaagaaaagccccccacgcacgggcccggccgaaaacggcaaagaaaagccccccaagaacaagcaaagcgcggccgaagagggccccaaaggagacaagaacaccgacgaaggcccgcggccagccgccgctccctcnttaaggggggggccccaacgaaaagaccagcaccgccacagcaaagccggaccgccgctgaggcggaacggaacccggacacaacacgccccacacccgaggccccaaaaaaccaaagaaaacgcccagcccccccaggcccccccaaacacacccgaacaaccaacacaaagaccaaccgaggcgccgcccaaagccagcccgagaagccccaaggaaccaaaaaggcccgaccaagccggaagagccacaaggagaccagaggaggccca

SEQ ID NO: 127173 - DNA, 421 bp, Arabidopsis thaliana columbia
  unsure (1)..(421): unsure at all n locations
cgcaccgggttttgaaggccggacccgaccacgcgtccgngcagctgaagggtctatcttccttcgataagtgtatgggaacatgcgctcagcgggacaacacacaggaggctgatttagagcgaggctatgcgttgctctgtttctgctgttcagcaccataatgtctccggcgacacgtaaccggcagcacttttgttctctngtgggaggagagtacaacgatccgaccatcactactggatcgctcagctcctgggaccatcctcgcttgactcttgttaaggctacaacaaacggcatgagaccagttggttccggctaccatcaggtgtagaagcggctaatggacttgaataaaagaccatttgaacatgcggcttagtctacgaagggtatcccacttggattgaaccaaaac

SEQ ID NO: 127174 - DNA, 493 bp, Arabidopsis thaliana columbia
tacccggttcggaatttccggggtccaaccacgcgtccccttggaccagtttaaggggaaagaccaaaactggccttgttaaaccttggtagcttttttggaagaacatgaactggagtccttggcttcttttgcttccattctgcccttttggatttcttaagttatttggaacctaaaaaaaagtttgattgaagggaaggaccttcgcttccaccggttattaagtcaaccattggttttaacacttaggcaaaaaaggggtcttaaaaggtggttatttttggccattcaccggcctcttttttccccaccttcggtggattggcatggcaccggaaagctctttcttggaattggaaagggtgaaaccaaaaatggcgtacctatggaaccagttgaaatcattcctttgaaaattgaaggatctgttcctgtaaaaaaggaagaagtcattcttctcaggccgctcgtaaggggccattctgctcca

SEQ ID NO: 127175 - DNA, 485 bp, Arabidopsis thaliana columbia
ccgccttcgttagcctggattcttttaaaccggccgcccttttttttttttttttttttttttttttttttttttttaaaaatttaaaaaaggtcccaaaacccacttgccccttacaaaattttttggttaatttaaaccatttcttaacaaacaaaaacaaactttaaacaattcaaagaaacccaatttttccttgaaaaggagagaaggagagaaggagaaaaagtttgaaaaatttttttttttttttaaatcctaaatcccaaaaaaagatttcaggtcaaacaaacaaaacaaatagtttttttatttaacaaaagggcaaacgcatccccacatggttaaaatctgcccaccaccgagttttgagtgaatgcgttgaaaaaagcctgcccttgtttgggattgtggcccttctttgagaggatgatgattcaaattcaaatcatgttgttgttgttgccgttgccgttgctccaaaa

SEQ ID NO: 127176 - DNA, 467 bp, Arabidopsis thaliana columbia
gaacccctaaaagtgtccgcccttttgtttttttttaattaaaaccttccgccaattcaatttcctaaatcaaaaaccaaaatggtttaccaaatattttaaaataccggaaacctttttaataaatcgtttaaaaaaataccatttttggaaaataattctggaggttcccaaattctcctttaggcaggacggactggaccgactccacacaattctaaatgggacctttcctagggacaacaaaaagtcccgggttttccttaacacttcctttacgggtatccaccgcggttgggtctaattatgctcgggggggaccaaaaccgcctcttaaaacccttaaaagaaaactggaacggggaaccaaaattggctcctttgtgctgtcctaaagacttaccagcgacccaacactcagatctggttcttctaagacccggcggaaaataaatctttaaaccctc

SEQ ID NO: 127177 - DNA, 483 bp, Arabidopsis thaliana columbia
gatttccgggtcgacccacgccttccggagttgaagaagaaaccaaagaaagccggttaattggagtcttctggttcttccggtggttcaacgaccaccacttccaccggagaaaagaagtttccaagaatgaaaccaccttccttggggaaatgggccggggaaattaaaaaatccgttgaaccttgtccggttttggttagttctttccaccacggcggagaaggctgttttggtttacaataccgccgttattcagtttcgtggtcccgacgctctgactattttttaagtcattccgacaccagcgacggaaaaaaaggccccaccaccgtttccggtgaggaggaggaggaggaaaaccaccaaaggcaaaaattccgttactgtttcttcctccatcagcagaagcagcagcaccgatggtctctgctctccggtgtctgttctccgatctcctttcgccgtcgacaaattctccgg

SEQ ID NO: 127178 - DNA, 473 bp, Arabidopsis thaliana columbia
aggtgacactatagaagaagctagacgtcgcatgcacgcgtacgtaagcttggatcctttagagcgggcggcccttttgtttttttttttttttttttttcaaaacttaaaacggtaataattatcaccattaacttaccttaattcaggttcattcatttttttatttttaaccaagaaaaaaaggtttcgaaccttaccgggattttatggcaccgggttacaaaacttttttcgggtccggttaggaacgggcgggtttactttttatttatttaaaattttattaaaccggttaaagaggagccgacccgaattgaaccccggatttttggaaatgggccctcatgggccagctgggttattcgggaccgaaatcgaatcccaaggttattttcggaccccatttccgcggggattgaattttcccaaaataattggcggccggaatggcgggaaccaatgggcctcgg

SEQ ID NO: 127179 - DNA, 440 bp, Arabidopsis thaliana columbia
  unsure (1)..(440): unsure at all n locations
tccgagaagaaaagagaaaggtttccnccggaggcaaaaagccccanggaagccggaacatacaaaccacggcaagaagcccaaaggggaacggcaaaaccgaaaaacacaaccgaanngnaccaaaacctccaggcccgactaaaggacagccaggggcaggggggggagcacaccggtgtttattttccgcggagggcccaggaaaaacgaagagccaggggccaagccaggccaaaagcaaaaaggcagacaccggacggcaggcggggaaccggaaagcggagagcacngctgcagacggccgacaaacacccgaggagcgaaaagaagcaaaggacaggaagggcgcagggagcaccagaaaccacaccaaagccaagccaaagccgaccaacgcgcccgacgaaccgacacaaacggccgcccccggaaaaaag

SEQ ID NO: 127180 - DNA, 482 bp, Arabidopsis thaliana columbia
cgcacgcgtacgtaagcttggatccctctagagcggtgcgcctttttttttttttttttttttttcaaaaacatacttctttgattaggaaaactcaaaaaattaccataggggttgttacccggaagaaggagaagagaaaaggatggcttaaaaacgatctggattaacaatttaccatggggggaataaagtttctttggatgggaaccaccgaacattaaaaggcattaccttaaatcattcaaccaagaattggttttaatcatggagggtggcaccgccaaaaattgggtggatcaaattggatgacttgggccaataccggcgatatttggaccttggcaacctccaccctgggttcaatgttcccgctatggtggacccactgctgcatcctcaaggcccgtctggccaaactcggggtattttccaagtccaagacattgcacccctggttaaagggatgggtgattccgaaa

SEQ ID NO: 127181 - DNA, 428 bp, Arabidopsis thaliana columbia
tgacctatagaagaactatgacgtcgcatgcacgcgtacgtaagcttggatcctttagagcgggcggccttttttttttttttttttttaaaccaaattgattggatttatttattcaaatcagaagcccatttgggaaccccagaaccgggaccattcaacccatgtaaatgccttaaatcaaaccaactggaacacaaagacccttcaaaccaaagaactggaattggaggaaccaatcatggttgccaaaaccaaactcatatttagctcaagctgaagcttcttaagcttaagctggtgccttaaaactggaacttccacttggttttgtaattgaactaacttggtccggctgcttattttcaaacccttgaacagaacagattcagcaggcgggggtttttctttattaattggcccaaaag

SEQ ID NO: 127182 - DNA, 463 bp, Arabidopsis thaliana columbia
  unsure (1)..(463): unsure at all n locations
gcgtacgtaagcttggatcctctagagcggttcgcctttttttttttttttttttttttaccacaaaaaaaatcttccccattttattagaatttcgttgggtttaccttaaacttggagcccaaaccggaagggttcagtattcaaccccccattgtaccaaaacttccttaccaaccttggggggattttttttttacgggtgggttgaactaacgccatggttttttatcanggtaaaggactcgtttgtggaacccccattctttgcattcccagaagaaaagtttcatgaaaggacttgcttaattccattcccagctttagcattaaaaaatacttgacccttgaatctcaaaaatattcttaggagacaacatttttttttgataatccaaaattgcccctaaggggtccttctgaagcaacctttatggtgccttgacgtctcattacaatgctt

SEQ ID NO: 127183 - DNA, 208 bp, Arabidopsis thaliana columbia
  unsure (1)..(208): unsure at all n locations
gacccangctgtncgaagagaaaaggagaatttcaactcggattcaaatatcctgctcgaatgcgggatcaagtaatgatcggcgtagaggctgataagagggatacgcgaagatcgagaggacatagaacggaggtggcagccgagatcttagaggggggggactggaagggagcaaggcaagcggcggtgccgaagggaggagcaa

SEQ ID NO: 127184 - DNA, 484 bp, Arabidopsis thaliana columbia
atgcacgcgtacgtaagcttggatcctctagagcgtccgcccttttttttttttttttttatctccagaaacatattactatcattagaaaaactcaaaaaataacataagtgtttttaacccgaaagaagaagagaagaaaagaatgactaaaaaacgatatgaataaacaattaacaatgtgtggaataaagtgtaatggaatgggaacaacagaacattagaagtaattacctcaaatcatctaacaaagatttgattttattcatgaaggttgcaacgacgaagatatgggtgatcaaacttgatgtacttggtccaatacgggcgatatttggacattgccaactccaaccatggtttcatgttcccgttatagggaaccactgctgcattctcaatggccttcttggcgaaactcggggtatatccaagtcccagcacatgccacgccttggttaagggatgtgttaatccgtagaag

SEQ ID NO: 127185 - DNA, 219 bp, Arabidopsis thaliana columbia
atctttttttccatcccagttgatctcctagcctcaccctattgggggggctcaacacatatgatgccgcttaggcacccagttccacccagcattgtttccccgggggcagtctatgctcatcctagcatgcccatgcctctatatctgtgctaccacaggaagctgcgaaagaccaagctcctgcaagaagtcaaagggaactcgaaaaaaaagctg

SEQ ID NO: 127186 - DNA, 357 bp, Arabidopsis thaliana columbia
  unsure (1)..(357): unsure at all n locations
tgacgtcgcatgcacgcgtacgtaagcttgggatccctctagagcgggcggcccttnntttttttttttttttttttttttttaaaccaatgggagccccggtttcaaaaccaaccttgggtttaaaattccgtttccattcccaagaattattaaaccaaggggtattggagcttttggcggtttttcaggcttggagggtaaatttttttttccccaaaatggtcaaccaatggattggtacgttattttcaatggctttgggactaggttttttttatccggggtggaaaaatccaattaatccggtgtaaggtcccattttccttaggtgtaaattggtcctttaccattttt

SEQ ID NO: 127187 - DNA, 477 bp, Arabidopsis thaliana columbia
ccacgcgtccgcaatagactggaatgcttttagaacatacgcaaaggtcgacaacgatgataacagcaggattaaggcaacccaattctctcttctccttctaaactaaatccatcgacaggacacaaccttcacgaacgaaaggggtctctacctcgtcctcttccttagatgctaactcacccgctgctccatttgaggggaacaggaaaggcgcaagccctacagaaagacgacccccgaggcaacaaggaagaagccaggaagaagaagaaaggggcaccccaccaagacgaaagccccaccggccacgaaggaaacaaacccgaaacgaaagcgagagggcacagggaagcacgctagggcacccaaggcagccacaccgaaccggacaaaacggaaccccacggaaaaaaaggcgccaacgacgcagacaagggcgccgacagagaaggcacagaggaacacccgaagggg

SEQ ID NO: 127188 - DNA, 481 bp, Arabidopsis thaliana columbia
gcacgcgtacgtaagcttggatcctctagagcgtgcggtccgtttttttttttttttcttacctattatgggtcaatttggattaacccgcccttgtccttagggtaaaccaatttaataaccaaccggacattttgatttcttttttagggaggtttttaccaaatccgatttgaacttccatggttaaaattattttttaggctaccaaaaccagcttttaacttaaaaggcaaaaggggccttaaccttgcaagaatattccagccaaggtgaaaagaagcctggacattcctctgaaataatggttggattctttttcattaagccatcattttgaattctgacccttaacttttttatccagggcaggaactggatggttttttctaacttagcctgcgtatttcgtaaggccctctggaccatatggactccccacggttctaccagctgctgccctaagtaaactctcaaaaga

SEQ ID NO: 127189 - DNA, 507 bp, Arabidopsis thaliana columbia
  unsure (1)..(507): unsure at all n locations
gggggggagaagaaaaagaggtttagagggggaggaaaaacgcccagacaacggacaggagccccccgcagggggaggagcacagcaacggggcgcaggaaagccaccagagacccgccagagagccccacaggggagaccgcggggaaaacgacgacacagcgcgcgcgacgagcgccaacccggaagggnctccctaaggggggggcgcgcaaaacagagccgccacgcggcggccgaaaagggagagcccaggggggggggggccggaagaagaacagagagcgcgcgccccgaggaccgcaaaaacagccacagacgggcggggcgaagcgggaggacgcgcgcgaggacgcggggggcggaaagggcgcccggcgaagaccccaagccggacaggagcggggggggagggagaggacggccacagcagaggaagcgcagcagcgaaagcggggccgcgcgcgggaggcgggcggcgaaggaggagggagcacacaacgagga

SEQ ID NO: 127190 - DNA, 219 bp, Arabidopsis thaliana columbia
  unsure (1)..(219): unsure at all n locations
ggagttttgggggacgccgcgacgaaggggacccagagcggcgccgnngaaaccaacaactgaaaataacacaagttaaccaaacaatgagagtcaacacacccaacacacctgaaacacagcccaacatacacaaccagaaccacaggaaagattttttgggaaggggaacccccnaacnaaaacnnggcgaagccnncccncacgacagaagagaac

SEQ ID NO: 127191 - DNA, 467 bp, Arabidopsis thaliana columbia
  unsure (1)..(467): unsure at all n locations
taccgggttcggatttccgggttcgaaccacgcgtnccggcacattggccaccttccgctacctcatgctcattgactactcccaaaccaccttctccggctagggaggttccttgcgccggtactgctaatggccaaacttcatggccggctcattatgttacggggagggacctcaattcttaaggaccgatccccagttggaccacctattcatgatccttatcgggggggtgcacatcacctttggggacggccttacgttcccaaaaccccccgactaggagcccctgggcagatatgtcatctagcatgcccaggcgtccaaattatgggcttaccttcgaggggcctgagagggaccatcctcaggtgaaaaagctaacgggaaactctaaaaaaagggctgatggaggacgcaaactcctctgtgttacaggcactgatggtgcctctcatagtgatga

SEQ ID NO: 127192 - DNA, 514 bp, Arabidopsis thaliana columbia
  unsure (1)..(514): unsure at all n locations
nnnnnnnnnnnnnnnnnnnnnnnnnnnnnnnnnnnnnnnnnnnnnnnnnnnnnnnnnnnnnnnnnnnnnnnnctttttttttttttttttacatcaatgaaaatacatatagggaggacccggaagtacacaactacgatacatttattcacttatcttgccttagacacctcaaattatgagcaacttggctttgggtatatatatatatatatgtatgtcgatacttgatacgcaaaaacggccaacgatttgatattcgcagcctgtccgggataagtgagtcgaagttaccagacgagaaactagagctctattcttctccaatcgagctcgatacggtttacgcgggaatggattcttatcacatgggacagtccacaaagacttgtgattaggacaagtatgtctccgcatgaagaacttatcacactccgatggctgtattgggttgtgaagaacaagatcacatccatactaacggacataatttgtctcttgatgagcaggctac

SEQ ID NO: 127193 - DNA, 366 bp, Arabidopsis thaliana columbia
  unsure (1)..(366): unsure at all n locations
aaagaagaagagaactttaagaaggaggaaaggccgccnctacgcacaccnccgccgcngaggggacaaccccggcacaggccaccanggacgcnccaaacaccggcnagaagacacccgcagcaagcccggacacccgcaagaccaacaaggacancacnnccancgcaagctttgtggtatgacggggccgcangaaggggnggccaccaacnggaaagaagaacgccgagacgcgagcggaccccccngaccnaagggacggcgaaccggccaaggaagaagacaaccnacaccgcaacaagcggaaaccgagagccgaacacgagaaagagcacggaaaagcgcaccgagagcaccgaaaca

SEQ ID NO: 127194 - DNA, 378 bp, Arabidopsis thaliana columbia
  unsure (1)..(378): unsure at all n locations
cacgcgaacgaaagcngggaccctctagagttgccgccctttttttttttttttttttagttaaaattttatggatggcgctggccattttatgtttaaattcctaaaacctaagataagccataaaaaaacatgcttgaaatatgacatcaaaaatgtaacattcagttccaaacatcaggggcacaatttggcttatttaacagtgggagggaagccaaggcggtaagcttatggggtgaacctgatggccacgtggtaggagcacctaggtctgcccttttgtgacatgtcctagagatgcgggtagtgtgggggcggcccctctgcgtggggggcggaccgacgcagggtccttagcgtggaagggttctgggc

SEQ ID NO: 127195 - DNA, 512 bp, Arabidopsis thaliana columbia
ccggcccgacccacgcgtccgccctaagaacaagtctgtttttgctgttggcaagctgggggtgaaaagtggaaatcccttgctgctctgagaggctccttatgtggctaaggctgacaagcgcaaggttgagtatgagaagaacatgaaagcctacaacaagaaattggaggaaggccctaaggaagatgaggaatcttttcagtcaatttcagaggttaacgatgaggatgatgctgacgatggcagtggaagaggagggagacgaatgattacaaatctgaagttgtatgtagccgtatataaaaggcctgccaggaatctctcggatggtttttatctacctctcttaaaatggacaattccgggtgggttaaaggggcctttcctatatctccactttaccctatatcagaccggaagcggccgctgtaaataaacctataaccttatctcccactggatattccggataaagggaaaaagcagaagccgaacggctacaaaggcga

SEQ ID NO: 127196 - DNA, 516 bp, Arabidopsis thaliana columbia
  unsure (1)..(516): unsure at all n locations
nnnnnnnnnnnnnnnnnnnnnnnnnnnnnnnnnnnnnnnnnnnnnnnnnnnnnnnnnnnnnnnnnnnnnnnnncttttttttttttttttttttttttttttttttttttttttttttttttttttttttttttgggacaaccaaattttggaaaggggtcccttttaaaaaaaacaacggcccttccttttggggttttttaatcacaactttccccggaaaccttttttttttttttaaaatattattgggttaaaaaaaaaaaaagttttagggaaaaattaggggtttaaaaataaaaaagtcaaattcccttgggggaacccctttggggatttttttcgctgaaaaaaacacatttaggggcggggctttttttataaacagggggggggggggggcaaccccccccccaacttttgaaaacggggcgcccataacacttggaagggtggggggggtttccatatccattgaatggtggccccccgtatccattgaaggggggcccccaa

SEQ ID NO: 127197 - DNA, 440 bp, Arabidopsis thaliana columbia
cccccgaccgtaagctgggatcctctaaagcgtccgcccttttttttttttttttttttttgcaggaccgaccaaaggggggccccggttttaaaacaaactaggattcccaatccctttccaataacaaaaacttataaaaaaagccgaaatccttcctttttgaagggcttaacagcatgggggagcaaatttctaattacgagggaaggccaaacaactggctaggcacacattctgaaccccggtggcctccgggtttgtttatccgaggttgaaaaaaaaaaaaaaatccgtgatcaaaatccaggtatacaagggcataacagctgcttcaccatagggcccaccccacaaaatccagttgttataccaacaaggggccctggtggaaaaacactcgggatcccaaactgaatcgaggggttataaccattcac

SEQ ID NO: 127198 - DNA, 357 bp, Arabidopsis thaliana columbia
gactgatttttctaataataaaaaaatttggagcccataatttacattgctatatctctctatagctcctggcttcgaaggaattttatcatcggccacacttttatatcccaggtggaggacaccaactactaattaaatcggaaccactgggcccactttttttttcttatcaaaaaactaaatcagccagggctttcctttgcaaattacatcctgcaggggagcaaaacaggcccagattctgaacccgttttggagagagagtcaacaccttctacaagtgaaaatttaaatcccggttaaatccttggctgcccaaaaaattatccaattcttggttaaacccccggggct

SEQ ID NO: 127199 - DNA, 465 bp, Arabidopsis thaliana columbia
  unsure (1)..(465): unsure at all n locations
cacgcggacggaagccgggaaccccnagagctttcggcctttttttttttttttaataaaaggcactgggccatttcataagtaacatcaatccaccatctctctcattacccaccaaagaaccaccaattattattaaagcgtatcaatcttaaaggtggtgcttgacattaccttaaaaaaagcgcgcttcctccgtttggggggccaaggaacgagcccaaggccttaattgctgaagctctcaatatgtattgggggtaaggtgctgccgctagggcttccaagaacgggccatccgaaaagatcccttgggcgatcccacagcctgctacgcggtggcgataccagtgtgtaccaaaacttgttaacggggatgttcaccaatggcacaccagggggacaaggaaccacatgccccctgtaacacagggtaaatcccagggcactggtgatgcggggtgc

SEQ ID NO: 127200 - DNA, 462 bp, Arabidopsis thaliana columbia
  unsure (1)..(462): unsure at all n locations
ccccgccgaaaccngggacccncaaaagttgccgccctttttttttttttttttttcccccaaaaaaagggccaggccttaaaacatagatggccacacccacacttctttaaaaaatacaacctttgaggaaacgagaaaaactttgaaagccttccatccaatccaagaggggcagaaggttggtgagttttaaaaggccaaaaagggaggaaggattcgggtatcctttatactcaaatggtttcttggaaaagccgaaagatgcacgaatgatgctgaatttgactctgagatcatccttgatccgcgctttagcttcgccctagggatccaaaagggggattttatcgagcaagacatggaaatcattgagatgctaatgggaccagaggagaagaaccgtgcaggatcaatcacggacagctgaattccaaagagcggaggcactctttgcaaaat

SEQ ID NO: 127201 - DNA, 462 bp, Arabidopsis thaliana columbia
  unsure (1)..(462): unsure at all n locations
agcnngggaccccnagagcgttcgccctttggtaaaccttcaagcggaaaagacaatgcccactataggagggcgaccggggagaaccgacccccacaaagcgcggtgcagaacacccagaaaaaacgacaccacccaaaggaaccaagcggaggcaaagaagaacacgccccagcggctttcctatttggaggaggggggaaaccccgaacgcacgcaccgcagccagaacgctgcgatcaaagcgggcggtcgctgcaaagaaacaagcgaaagggccaaaccccaacctgacccggcccctccccgaagaaagaaaaacggncgccgaccgcacaacaacaaacagacagaccgaaggcgagcggaggagaaacggaacggggaacacacaaacacccgcaccgccccccgctacacgacgcgcatagcaaccgcccgcgggagaccaaaccggcactc

SEQ ID NO: 127202 - DNA, 215 bp, Arabidopsis thaliana columbia
acctctaagagtgttccggcctttttttttttcttatcttaaaccggcaggtgcgaagtcaccgcaggtgcgagaatcggacacgcgagtccccacggcccacgcctcctcccaacattggcggggtagactcaaaatcccagtctcaccggctaaaacccatcgctttatgacacatagaagagacacccccccttttctttttttttgagggg

SEQ ID NO: 127203 - DNA, 224 bp, Arabidopsis thaliana columbia
  unsure (1)..(224): unsure at all n locations
gggncccaaaagttcgggcggccgggaaaccccccacaaaaaaaaagacacccccccaccaaagggggaacaacgaggcgcaaaaccacgcagacccacagcacgcacccaccagcgcaacccgagacgacgccnacacgacgaaaccgccacgagaaccgcgaaccgcccgcgagaacccgaaaaaacgaaacagaaagccgcgacacgaagagcccccgaaa

SEQ ID NO: 127204 - DNA, 475 bp, Arabidopsis thaliana columbia
  unsure (1)..(475): unsure at all n locations
accgaaggcggggacccccagagggtttcgccgggggggtaattttncccaaaaccaccctgaatggaaaaaaagggggggccttccaancaaatttaaaatccatcctttggattattaagaaccagttttttttttagtttggaattcccttttcaaaatccggtcggtaggaaccataaaatttcctcataaggggggggggaccaccaggaaaggggaaaggaaaaaaccggggccagaactgggggggggccgagggaaaacccggaaccgccccgcgcggacccccacccccaaaaggaacccccggaccccgcgcgggaagcccagggcccggggcccggacaccaccaggaaaaccgcccccggggaagagccccggcccgccggggaggccccaccgccaccgggacccgcggaaaagcgccggggggaggcggaggggcccaacgcccccggggggcgccaaaac

SEQ ID NO: 127205 - DNA, 356 bp, Arabidopsis thaliana columbia
  unsure (1)..(356): unsure at all n locations
cgcacgcgtacgtaagcttggatcctctagagcggttcgcctttttttttttttttttttttcactaggtttccttnggaaaccggagaactggtatcatatggagcggccttgttgtcataaccccctttaagctgttcttaatcagcgtttttgaaatccccttttaaatttggggcaagaggggcaggacctccttttttttaccagcgggaggaaaaggaaaatgtgccaaaggcacacctttttagccgccgccacgacacttttaatgtggggtttttgaaactccgaaaaatctctttgcccgctaattttttcggctgacaacatttcaagtcttaaggattggggtg

SEQ ID NO: 127206 - DNA, 470 bp, Arabidopsis thaliana columbia
  unsure (1)..(470): unsure at all n locations
cacgcgacgaagctggggacccagagcgtcgccgggggaaaaccccncaacacaagagcgaccgggagggggaacggggccccncaaagggggaaaccaccgaccgaaacgggggaaaagcgggaaggggaaaaaaccccccccgagggggcgccaccccggcaccaagggaccnttcnttgggggggggcaacgggcaccaacacaaaaaacaaaaaccccaagggggcccacggagaggcggaaggaaccacagccagccaccccgcagaaaggaagaaggcaaccaaccggggagggggggcaaaccggcccccgggagaaaacgccggcgccaaaagaaccccaccccaccggaaaacggggggaaaccagggccccgcggaacgggggaaggaaaaacgcccgaggaagagaaaaaaccccgggaacccgacggagacgggaaaaaacggaccaagagaaaaaca

SEQ ID NO: 127207 - DNA, 287 bp, Arabidopsis thaliana columbia
  unsure (1)..(287): unsure at all n locations
agttcttttagggggaacgcacgcgnacgtaagcnnggggacctctagagcggttcgccttggggttttttcttcatataagctttttcttattattacgaaggatatacatctaaaatgggttgtgaagacttctaaagagcttcatgtacaccagtgatgtacataagcatgagtattactttgacagctactaccaaagactaacacatttctattttggaggggaaaagggcggaccagggaagaggagacccaangaacaggggagacaggagcgggacaag

SEQ ID NO: 127208 - DNA, 470 bp, Arabidopsis thaliana columbia
cgtagcctgggacccttaaaaccgtccgccctttttttattttttttttaaatttttttttttttaagaaaacctgggtattccatccaattggggtatggcctcattccaaaaaaaggaatggtttgggttaaaaaaacccccccaattccccaaaacccatttttaaaaaaaaaacccccttttttattttaagggggcgggacccaaaccaacaaccagaagggaaaccaaagaaaccccaggaggaccaccaccccccccgggaaagccccccaaaaaaaccccaaagggggcaaaaaacgccccaggaaaaggacacacagacggaaaaggcggcccccccgggggggaaaaaccaaacccaaaaccgaccaaggcgggccaccaccccccaaaaggcccccgaacccaaacaagaaaggggaaggcccccgggccacagcccagacggcccaaaaaaccaaggc

SEQ ID NO: 127209 - DNA, 411 bp, Arabidopsis thaliana columbia
  unsure (1)..(411): unsure at all n locations
gagggaaaaacccagncaaaggaaaccggccggcaagggcgagcaaaaaccgccggagagagaaaaccccaaggaaagaaaccccccccaggcagaaacgggccggggacaacagcaaaccgaaggaaacaggcacgggacgggatttcctctttttgggggggggaagaaaaacggcaagaggaccaagacaaagcacgcacgaaccgacgcaggcaccgcgccacagaaaaacgagccacacacgcgccgccacccgcgaacggagagagaagccccacccccccccccgccccacagaacgagcccacacaacacgcaacccacacacaccccaaaagaaacaaccacacacacaaacacaaccagcacccaccggcccagcccgacgacgccggcgaaaaaaaccac

SEQ ID NO: 127210 - DNA, 541 bp, Arabidopsis thaliana columbia
  unsure (1)..(541): unsure at all n locations
cttagggggaaccacccccaccgaaagcagggaccccnaaagctgtgccgccccggcggaaaactcttccccaatcaccccaaaccgaaaacgagggaggggagccccccaaagcgcaccgaaacgcacgcaacagcaaaacctacggaacaacagaacaaaaaagacaccccaacaaagccggggagcgcaggggccgcgcggaactctttctttaagaggggggggcgaaaaaaaccggcgcgcgggacccacagaaaacagggcaaaaaaaacacggcaagagagagaaaaaagaacccaccccaccgcaaaaaccaccccgaacaacccagaaaaaagggcaccacccggagccccaaagagcaaaaacccggaccacaacaaacgaagacgccagcgcacaaagcacccccccgcagaacccgggcgagaaaagagaagccgagccgggagaagacacgagcgcggccagaaaaaagcagggagccacccaggaggcgcggcgaaaagagaacccgggaccacccccagaaaccag

SEQ ID NO: 127211 - DNA, 494 bp, Arabidopsis thaliana columbia
ctatagaagagttatgaggtcacatgcacgcgtacgtaagcttggatcctctagagcggccgcccttttttttttttttttttttttttaatgaaaataaataaaggattatataattagagacaaatattgaatcctcttaagattttgaaagttgattccactgtaagatacagctcaaaagattcggaatcctcttaaacttttacatttcagttttttatacttcctgctagaaaaatgactacaaaatcttgaatttggattccagaataattctccaaccttgctttatcccgagaccattcgtcgtttcggtagagctcacatcaaactatccacagtattgcaacaaatgatctcacaagaagaagaaagtccttgaacttgatcatccacaatagtttctgatgacataaaagtttgcataccatagatcacatctaagggatatgccctgtaaccttatacttcacgaatacaatttatcgaca

SEQ ID NO: 127212 - DNA, 558 bp, Arabidopsis thaliana columbia
  unsure (1)..(558): unsure at all n locations
gaccggaaagcngggaaccccaaaaagggtccgcccggggggaaaacgcccaccaaaacaaaaaacccacgcgagaaagggggggagccccgccacgcgcgcggcggccgcaccgcacggcgagaacggagaggcacgggcggaaaagaagagacacacacccggggagaaacacaacccggaccgacacacacaccggagaaaacggcacccctacaagaggggggggggacgcacaaaccccgccggcaagaaagacgagcagcagagcgacgacggaggggcgggggggggccgaaagcacgcgggcgcccaccgggcggcgacaagcggggaaaagcgggggcggcacggaggagaaccacgaaccgcgagacccgcgcaccccccgcagaacagcgcggccgaaagaacgacagccgcgcacccgcggcgcacagcccacacgcccacgcccaaccccgcgcgagcgccccgacccagcacagcgggccgacaacgcaaacggggaggggccgagccccgccggacanacagcacgagaacacccccccccgc

SEQ ID NO: 127213 - DNA, 420 bp, Arabidopsis thaliana columbia
  unsure (1)..(420): unsure at all n locations
cccccgaccnaagccngggacccccaaaagggtgcggcccccgggaaagtcccctacaacgaaaacgaaggccgaaaaggggaaacccaggaaaaggctcaccaaccccaccgaggaaaccacgaccaccaggtgcaacaagaaccccaccacaggcggaccaccgagcaaaaaaaacgcgagcgaaaattctgtctttgggggggccacagagccaacggggggcgagagacaaggaccgcgggaaaaaggaggcccacgggaaagaaacccaccccggaggggaaagcacaaacggaaacacggcaggaccagggcgggggcggggggacaacggcgaaacaaacaaccgggcagcggggcgcagaccgcccggcacgcaggaagagcaagcgcggcgcgggcagcgcccagggaaca

SEQ ID NO: 127214 - DNA, 356 bp, Arabidopsis thaliana columbia
  unsure (1)..(356): unsure at all n locations
ttttagggggggggggaacgctaacccagacaancaagccaaacccgggccgccaagctatttcaaaatggaccggaaccaggtggcattgaccttgaaagcccagattcgggtgggtggttgtgttaatgcggatgatttacgcagagggccaggaaaaattcctccatttgggggggggggacggaaggagccagaccacagcgaaaccaacggaacccaacacacacaccacggcacgagaacgcgaacgccggggggggcgcgggcagccgggcgcggaacgagcaggaacgggggagcgagcgacgagcaaaggaggcgcaccgagcgccggcagaaggcgcgccagccca

SEQ ID NO: 127215 - DNA, 469 bp, Arabidopsis thaliana columbia
  unsure (1)..(469): unsure at all n locations
cgaagcnngggaccccagagcggccgccggagggaaacanaccaaaaaacacaacagacaagggggggagaccccaaccaaaccacggaagcaaggaaacacacaaccccaaaaagaggaagaacaacagcaccgggccaagccgcgcaccaccagaaagacgagaccacgccaaaccctctaaaaagggggggaaaacaccaccacgaggcgagagacggaaaccacaggggcggcacacgcagcaacccacacaaaccacagccgaaaaagacgacccaaccaaagaacagcccacggagcaaagcccgagaaagaaagggcgcgggacacgacacaaggccgcacacaagagagagacgccgaccgcacaaggcacgggccccacgcgacccgagcagcccgccacaccacgacaacacacaacaacgcaaagcacaacgacgcgagaaacgacgggcgccacagc

SEQ ID NO: 127216 - DNA, 509 bp, Arabidopsis thaliana columbia
tgcaggtaccggttcgggattcccgggtcgacccacgcgtccgatcgactactacgagtttatctctgcgacaatgcatagatacaaattagatcgagatgagcatgtatacaaagcattccaacactttgataaagacaacagcgggcacataactagagatgagttggaaagtgccatgaaggaatatggaatgggagatgaagctagcatcaaagaagttatatccgaagttgataccgacaatgatggaagaataaactttgaagaattttgcgcgatgatgagaagtggcagcacgcagccacaggggaaactgcttccattccattgatcaagtcggcataaatcccaacggtttatcaaccgaaagcgattcttgaacccagagtagaagagctaaaccgggggtaaaccgaggtgagcatagttgatatactgtctcaaaatgttggtctatcttctctgtgtttgaacagatttatttatccttctccttagttagtctg

SEQ ID NO: 127217 - DNA, 491 bp, Arabidopsis thaliana columbia
gatttccggggtcgaccacccgtccgccttttttttttttttttttattattaaggtttttaaatttttccacccccttccaaggtatttaccagaatttaaatttggcttcactttcccagaagccaccaacccgggatccccccaccttggaccacaattaaacctcattttccggggaacaaatttggtaccaaaggcccatccttggttgttgccggaaccacccaaggggcccgggaggttttccaccggcccttttccggggacatgggcctgaccgaaaattccaaccttagagaacttagccacccttccgttctggagctccttcaccttcaactccgcaaaagcctgggggtcagtaccgaggcccaatgggtcgaagctccaacctgggtaaagcaggtcctttgtttttcccaatggaccatttccggcgactttgtagccttcaacagctcccatgaggataactggagtagcccaaa

SEQ ID NO: 127218 - DNA, 486 bp, Arabidopsis thaliana columbia
cccccgaccttaacctggaaccctcaaaactgtccggcccttggttttttttttttttaccttttaaaaaaaaaaaagggtttttttataaaacaactaaacctttattggggttccacaaacctctcattaatctatctctctaaaaggttttccaacctctctcccctgatataagcaacaaacaaagttcctcccttagcgagcgcaggaaaagaaaccccaggacccccacctaatggaacatgggctttaaccacaatcaaaaatctaattagttcaattaagggaactaaaaaactcaacccaaatttgttctgctctctttgacggctccaccgcaaatccctaagccgctggctcatcctttgcctaatgcaccgcctggtgatcctcttcgaaagcctgtaacccccccttgaaaaactctgacaaactcctcgttaaagaggtgaactttaaataaacgcccccttttctttgtta

SEQ ID NO: 127219 - DNA, 486 bp, Arabidopsis thaliana columbia
cccggggtcgacccacgcgtcccgttttattcatcaccctagtacttaaggggtattaaacttttttttatccgaaaattcccaggttaaaaccaaagggttttaggtttaccaccatttaagctggcccttttcttttggcttcacctggagaagagggcacccccctttttcttaaattaaggacctggatatttaaccttttttaaccttcttgggggaggaattttcctttaccagaattaagggcggcgaaaaaaaaaaaggcacggttaaaaaggacagggggtccgttatctggattgggattaccggcctcattgtggagtggagctattgctcctttcccggtaataatctctcctatcagggaaaatgctattcccaactgtgccattcttcctacgaataactcgttcgccttcgggaacccaaacaatggaccttgttcttggagaccgagggcagatcggacgtttttgccgg

SEQ ID NO: 127220 - DNA, 431 bp, Arabidopsis thaliana columbia
cccttctactggagaaaacccggcaggcggagggagggaaaaaccagctttcggaagttacgccccctgtctatcgctccaacctctttcgggtggagagcgggcaccgttcgaggccgaccttgggaaggaggaaccgggagatacctcctttttgagggggggagaaagaagaacaaggcccccacgaaaccgggcaagagcccacgagggggcccccgcgccaacgggagagggagagggcggggccggcgacgccggaggggggggggggcggaccaggcgcagacgcgccacgcgcggcgggaagagacggagcaagggggggccccacaacagaacgacaagccaccccgagcgagagcgagggggcagcccggcgggccgcgccggggaggaacgagagggcagggagaaagaagaaggaggaa

SEQ ID NO: 127221 - DNA, 484 bp, Arabidopsis thaliana columbia
acgcaccccgaccgaagcctggaacccctaaagcttgccgccctttttttttttttttttttttaaaaaaaccctcggccgtgggtaatttgtgttaaatcctttaccattattttaattcaaaaaccggaaaaatcaatttttaagcccaaagaaaaccattgggattttaacatttcccccaaaagggcaaatttcttatttaatttttgaaaagaaccacagggagaatcaaaaaacaccttccttatcctttacttccttattagaaacccaccaccggcccacttctttatggacttttgggttttctcaccaaggggaagtaacacaattggccaccaatttttaaaacatggtggattaaacacacggccgaaacgtgttcttgtgtggccaccatatttccaaatgggaaggtcctcggcctgtggctgggttcaccaatgatacacacagttcttttttacggaacacacggggg

SEQ ID NO: 127222 - DNA, 508 bp, Arabidopsis thaliana columbia
ctgcaggtaccggtttccggattcccgggtcgacccacgcgtccgcgacctcaaaaatctctcaacaacacacaaaaagatccaaattccaaaatcatcctctccctccatttcggacgaccctctaaattcttttgtctaccggaaaattttcgattggatccaaattttctggcgcctaatttatcgatttggttttctattgtcattttcttttcacaggtcactcgattttctccattttcttttcatttgggactctcttctcgccgtcgccatcaccggagataaattccgtggtgctgcgtttggccttaccaaaatttgagatctcaattgaagaaagaaacatagcgaagaagaagacgatcaaggaattgaaattagattctgatatctctctatcatcttcaatttttttaatttgattgttttcaccaaaaaaacaaaaactatgaacacgacgttacgttacgatccgagacagatctcgaggcaaacgaaaccg

SEQ ID NO: 127223 - DNA, 504 bp, Arabidopsis thaliana columbia
agagagtaatgacgtcgcatgcacgcgtacgtaggctgggatcctctagagcggccgccctttttttttttttttttttttttttttttttatttattggtttttctgttttttaaacatttttggtttttttttttgtttccattttcgaagacaaaaaaaacagagtgtaaacgttttttttggaggggttaacaagggggggaagcaaaatctttattacggaaaaccgtaaaagaatagaaaacccccccaatcttaagggagtttggaccccgttttttttatccgggggggaaaaatcctaaaaaagggtggtcaagatccattttttctaagagaaaatttgttccttcacaaaatttcggcccaaaagctttttgttttaaattattttcgggctctactaaaagaactttctggaccttattggggaccgacgggaaataaaaattgacctttttatattcggtggaaagtaatggatgctgatttttaaagaag

SEQ ID NO: 127224 - DNA, 355 bp, Arabidopsis thaliana columbia
  unsure (1)..(355): unsure at all n locations
gacccaagcggnngaaaaaaaaaaaaagatttanaggggagggaaaacccgaaacgaaagagggagcgcaacagccgggggggcccccaccaaacgcgcccgccgcccccacaccgccgccggaacggcaccgcccacgaccagaggcggaccccaacggacagcccccccgcccaaaagccgaaaggaagccgttttttttttcacgggcgcggccaccacgacgccagccaagacccacccgccccgcaaagcgacagaacgcgcgccgcgcgagcaccacacgaggggagagaggccggccccaggaggagaacgcacggcccacacaacgaagacgcccaccacgcacgcc

SEQ ID NO: 127225 - DNA, 480 bp, Arabidopsis thaliana columbia
gcacgcgtacgtaagctgggatcctctagagcggccgccctttttttttttttttttttttcccacagtccttttaaggaaccggaggttatcaataaacccgagagacccttcttttgaaacaagaaaaaggaaccttatttgagtgttgtatcccccctgaaacgtatgtatcgcaagaagaattaaaattgtattttatgaagttggtaacacgaaccaacgtccaaaaaaaaaacaagagcagtggcctgtggacctcaaaaattcttttatgagcccccacagattcgctttcatgtccaatataactgccgaggaaactgatcttaacactggaaatgtcggctagcacaagtccttcaacatacatattggggcctgtttcttctggaggcgctataaatacccacaccgctggtccactttctgttaagcgaccggtcgctttttcctaagcccagtacccaaccgtcagga

SEQ ID NO: 127226 - DNA, 470 bp, Arabidopsis thaliana columbia
  unsure (1)..(470): unsure at all n locations
agcnnggaacccccagagcggtcgcccgggggggaaaacccccnacaaacaaaaacgcggcgaggggggggggacaaaccccaccacaaaaggggacncgagaccgcccaaaaacgcaccacaaggaagggggggaacaacccacaaacaaaagagagccaaaccaccgagaagaaattcctcaaggggagaggaaaccacagaagcccgcgggaccaaaaaaaaaaagccgagcccccaaggagcggcgacaaaccaaaaccgcgaggccgaaccaaaccaaaaagggaacagacagccggcggaacaccaagggagggaaaccacccaagcccgcaaaaaacacacgcggacaccgaccccacaaaaaaagacacgggccagccgcgaccggcccgagcaaagaaagaaagggccccaaaaaccccgccgaccccaaggccggacggagggcgagacccacaaaaaaa

SEQ ID NO: 127227 - DNA, 495 bp, Arabidopsis thaliana columbia
ccggctcgacccacgccttccgtccatttttccaaaattgcccctcgtttcaccccccaaccaactaagggatcagccccaggtgggttgtaaaacaatcaccattctccttaccgccgtcaggatcattcgggaatatggatgaacaaccgtttaatcccccatctataccattcggaaaacccttagcccaaggcctttgtttacccccctgaacaacctaggcctgtttctaaacgctttgagcaggccaaaccacgcgatgagaaagacaagcttggaccgtttaaacccggtggagggcctccaggaggaatggggaggactcgttctagcggtggaggagctcaaccggtcatagatcagctcgaggagatgctccggatggggacccgcgcgccccgagaatttcgtcctgctgtacgatggtatgctcttgcaaagagtccgccggtgaggatagttgtccgaggaaaaggccgccgaaccgaagat

SEQ ID NO: 127228 - DNA, 509 bp, Arabidopsis thaliana columbia
  unsure (1)..(509): unsure at all n locations
cccccttccngagaaatgggggaaaattttaaaagggggtgaaggcctaatttaaggagctgttttgtggccgacccaggagaaaggcgtgttctgccctcttaacagcaaacttgagactcgcgatatactttattgaggagaccctccccgctcgccaaccccacagggggagccccccgcgcgctattttttttttggggggggagcaccccacccagcgcnagcgcggcgcggagggagacaccggcggcgcgacccccaccggcaccgcgaggaaccaacgagaacaaccgagagcgccgcaacccacccagacgggcgccaccgcaccaacacgcaccacggcccccacgccgccgcccgccgccacccccgcgcggcccggcccacccccccccccgccgcagactcaccaaaggcccagcgcagacaggagcggcgacccccacgacacccaccccggcgagcaaccgccaccaacgacccccaagcgcggccgacgacgg

SEQ ID NO: 127229 - DNA, 369 bp, Arabidopsis thaliana columbia
cgaccccctccgttgggctggtttcgcagagaaactagactttgcagaagcgcctgagttgcaaatctctcaggaggaaagccacattccggactcgtccacattccacactctcacgcaatatgcccccccaattttttttagcggccccacccccacccaccccccaaaatcccacagttttcccacggccaccccgcctcgcgttgggcgacccttaggcattcaacatatacagaggcccgtaaagcccggcccctacctaacccccccccccgcactccatccatgaaaccggccatcaccagcctccccaaccgctttactaacacacccctaccccgcccacccccccgaccccacaagcag

SEQ ID NO: 127230 - DNA, 466 bp, Arabidopsis thaliana columbia
gcctgccagtaccgggtcggaattcccgggtcgacccacgcgtcccgggagtttaatcgatcagatcattttttgtcaatgacgaaaaaagcggggcttattgggaatcaattacccaagaaccaaggccgaattaccgggatgccgtaaccacgttccgtcgatgttccaatgtcttgttgaaccgtaccggttcttcgaagagaacatcaccgttcttattgacaccgatgaattcttttcttaacctacttgcaagaacattccgcgcgcccctggttatcttgtccaatcttcccattcttgccaccttcttggcgttcattaccgtggacaccggaccaaggttcccgcttaaaattgtgaagaccaatacccttgtttccaccaatggattggttcctgccaactggattctaattctggttaataattttaaaaatctggtgaccaaagttcctccagg

SEQ ID NO: 127231 - DNA, 390 bp, Arabidopsis thaliana columbia
cccccccgcgacaaagagacaaccctccggggggaaccggcccaccccaccccccaggggggaacgaccgaccgagcaagggcacagaacagagaccacaggaccagaagaaaaacccggcacgagccccgccccccccaaatagtgaagggggaggccacaacccagaccgacaccaggagccgccccacagggggggggggagagacgccccgccacccgcaagggaccaccgaacacgccgcgaccacagcaagcagccgcgccacagcgacacccaaccccccgagggcaagcccaacacccccgcaagacagacgccaagccccgcacaacgggaccaccccgggagccagcgcgagaaaccccacccgcgcacgcgacgcagaa

SEQ ID NO: 127232 - DNA, 508 bp, Arabidopsis thaliana columbia
gctggcaggtcccgtttcggatttccgggttcgaccaagccttccgaacgtttttgttaaggtttttagaagaagcctgtttagaattatcccctgactttgaaccatgtgcgcccttgcttgaaaggcctatattgatggattcctggcatccggtgaggagctcacctttagctgcgtgtgaaatggctccgcaaagggcaattcgttgcgcagatgagcctggtctctgtcctaagtgcacaatcgcgatgaactcctttaactagctcgctagcagctacgaggatcttcatcttaataccctgtccatctaattgcattggggccatatatgccatgatacggcgatccacatggctggagaacaggatagagctctgctttgcatggactgacggaactgcatccacatgactaatgatcgatctgctagtccccagaggttcttagccactgggatcacagtagctctgacgtcaactatatgtttgatcaaattgagaag

SEQ ID NO: 127233 - DNA, 493 bp, Arabidopsis thaliana columbia
  unsure (1)..(493): unsure at all n locations
aaaagggacaggacttttaacgggggggacccgcgggcacaaaacaagggccggaaanggggaagcaaaccgaaagcaaacgaagaacaacaggcaagcaaaaagcgggcaaggccaaaaaaacgcagggagccacacccagggcaggagacaaggaacacaaagcacaacttttttttttggaggggcgaaaagcaggaggggcaaaaacggaaganaagactaccggaacaacccggaccaaacgcgggggagcagcagccgacaaaacacaggaagaaaaaagccacgggaagacaccaacccaaccaggagcgcgagcgcagacggcaccagaaacgggccagcagacgcccggggccggacgcacgaacagaaccaaaccgacacaaaacgcacccagagcaccaagaaacgcacacacacacacaagcgagcacggacaccgacaacagaccgcccgaagaagacaaaaccccacaacgcggcaaag

SEQ ID NO: 127234 - DNA, 478 bp, Arabidopsis thaliana columbia
aacccttccgaacctggatggattcctgtccaaaaaagggccacccctgcctattttttgttaccttaagtaagggaggctaacctcttaattattccaccaaaaaccaggacccgttgagctggaattggaaagattatatggcttaaaacgtggcacgtggcctaaagtatcttcaggagggggtttttcttccggtaatccacagagatatcaaatcttccaccatctggctggatcaatctatgaaagctcgggttgctgactttggcctctccaaagaagaaatggtaaacaaacatgcagctaacatcagaggaacatttggctacctcgatcccgaatacatttcaacaggaacattcaccaagaaaagcgatgtctatggcttcggagttttgcttttccagcttatagcaggaagaaatcctcaacaaggtctaatggaattggttgacctggcggcttgaatgcagag

SEQ ID NO: 127235 - DNA, 447 bp, Arabidopsis thaliana columbia
  unsure (1)..(447): unsure at all n locations
gcgtgcgacaaggaagagaggaaggctcaaggggacggggaagccccagcaaaagaaacgacggagacaccggggagggcccgcacccacgaacaacgccaaccacccacaggacgagaagcacgagacgacgaacacagggcgggcccaaccagaacgagcaacgcccgcacgcacacggaacaacagagggnctaaaaaaagagggagacagacccaaaccagacacncggacccgaacggaaacacacacaaccaagagacggggaggcgggaaaaaacaaaggcacccggcaacaaacagcaccaaaggcgaggacgcaaaaaccaaccaaacaagaccagggcancaaaccacacaccaccaacgccagcaacaggcaaaaccacgcgcccacacgacaacacaacacgcccaagcacccccaaagaacacacaacaaccaa

SEQ ID NO: 127236 - DNA, 237 bp, Arabidopsis thaliana columbia
ggggtaccagtggtacctgttttggaagaccaaggtggctcaatcttcccgaaggaccgcctagttactaaactaaaataaccaagccataccacgcgggagatggcagaggttctccgtatcaacagacagcgcgtgtgccccattaacgcacccactgacgtcctccatgcatatctgtatcagcggagtttttaggctcaccgacgatcgcgcgaagcaatcatcgctgcgtct

SEQ ID NO: 127237 - DNA, 506 bp, Arabidopsis thaliana columbia
atttttatgccactgcaggacccgttctcgagtgcccgcgccgacccacgcgtccgaaataaactcttcttctttctcctctgcccatttctcccaatctctgtctatttcctcagtctctctctcagataatggcaatgttgggcttggttttatctgttcttactacaattcttgcattgtctgaagcaggattcccagtagtttacactggtggtggttgggaaactgctttctccactttgtacggcggctctgatgctattggaacactgggaggagcttgtggttatggcaacttatccagcccaggctttggtgtgaacaccgcttgttgtaatcacggttctgttcaacatagtgcttagctggggagcttggtttgagctccaatgtgctatagacccccacaggctgccatttctgtaattcttccgttttcgattcttggactcattttctttctccccattttgacccttctattattgtggttggtgcttgtt

SEQ ID NO: 127238 - DNA, 431 bp, Arabidopsis thaliana columbia
gcgtccgaggataacaccaacattcgacgagaggaaatccaacagcgacgattctggtggccgatccagtcagatcagctatacactggcggacacgcaagctgaaacagccccgggcctggaacggacataggagaccggctatgggcggaacccagcctcgcaaacagcgagtttttatcgacggaggcgcaacggcaagaagcaacgcaagcggcgatggcccgccaactgcggtccgaatctgcaagagcccgacgaagacagacttcgacacgctcctcaagcacaaaaacgatgagcaacgaacgaccctacagagcatcacattgagcgagctggtgggggagcccacccagagaaggtgctttcccggaaaattaaaaagcgaaaccatctaaacccgaaaaagggcggcgcccacccaagca

SEQ ID NO: 127239 - DNA, 439 bp, Arabidopsis thaliana columbia
  unsure (1)..(439): unsure at all n locations
accacgcgtccgggggaggccggacaccctatagagcggggcgagtcatcgactaggcgcgaccgcacgcggccaaggggaaacatcaaggaaagacaacccaaacagaacatctgcatcaacaatgcaacggaaaattaccagaacgcggggcatacacagcgcgccacaaggaggacagaggctcggcggcaccgccgatcttttttttttcgggggggagacagcaaagaacaaggacacaaaagccaaccgcagggaaaccccggaagcaaacgcgacagcgagcgaggaaacgaaggccggcgggagggcgaaacngcgaaacgaagagggacaagaacgcacaggaaaccaaaccggncgcccccaaccacgacgacccgagggagagaacgagaaccaggcacgccggaacaggaccaacacagccgagccg

SEQ ID NO: 127240 - DNA, 501 bp, Arabidopsis thaliana columbia
tttccggggtcgacccacgccgtcccgcgaaatctttagagagaagaaaagaaaaagaagagaaatgacaggaaagaaagaaatgggagtgggggaagggcttcaccgtggaaaaaatcatgggcccgtggtaccaaaatggttcttttccattcagggttcaacccaagaaccgggggtgacccttcgcccaacttccacctttacccccgccggtcccttccccttttggaccaaaccgtgaaccaccggaagaaggggtttaatcgaaggcaccgcctttaaggccgatcctaaaaccgacaaacccaacctcaaagccaggttctatgtccttcctttcctcccattctttcccgtcaccgaaaactactgggtgctctacttcgatcctgactaccagcacgctctcattggccagccttccaggagttatctctggatattgagcaggacggcgcaaatggaggaagagacgtataagcagctggtggagaaggc

SEQ ID NO: 127241 - DNA, 491 bp, Arabidopsis thaliana columbia
tcccagcgtcgacccacgcgtccggaattacaaatcgatcgctttactcgacgtttatttgtctcatgctggtctagagctgcaccttatatgcttcctccgaccatcacttcgaattgtatgttattttcgccgtgagagagtcaccatggatgcctagacctgaagataggttcgaccttgaatcttaccatcaaaaacttctgtcatcgggcctggatctatgatacttaccgccagcgtccatgcattgactcgttcaggatgttcccgacttcatctcggtttagggccagacgcgtctgctacatcctcaacatcattgcagtgctcaacactatctgcgaagacacgaacaagtatcgcggtcagagcttcaccagcgaccatggccgctacctcaggttcttccacgaaaccgagcgattcgctgcaactgtaatcggctggaggaccagatccgtgtcagataaaggcgagacatgctggtc

SEQ ID NO: 127242 - DNA, 498 bp, Arabidopsis thaliana columbia
ccagcgtcgacccacgcgtccggacaaagcacattgaacagttttacttcgacgatgaatatttatcagacatgggcaagaggcagaagcttataatggttcctagctccatcgctgaaaataggatgttcaaatggcggtgacagagacaacacggatgcctacacctgaagagaggaaaaaccttacctctcgatatccaaatgttctttgatcggccggggaaatatgattcctatctcaagccggccaaagcaagacctcaaacagcatggcaccgacttcatccgcaaataatgaccgcacgaatcggtttatcttctacatccctgcacttctcgctactatctgcgacgataccatcagggatcgcgagcgaagatttaccaacgaccctggcctctaccttagtttcccacagggacccatgaaactttttgcaacgatattgtattccaagaacagatccgggacacttcaagccgatacaggcggaaa

SEQ ID NO: 127243 - DNA, 475 bp, Arabidopsis thaliana columbia
  unsure (1)..(475): unsure at all n locations
gagtaccgtttcgattccggtcgaccacgcgtcggctcatctgacttccaaattaacgcagtatcaaatgttggacttgactcggcctcagatctcgttgcactctcatgatggtcacacatatggtataaccattgccaagttatcatggatagactatacaactatagcaacactaggatgacgctgaacgtactcttaatacttcatacgtgcagacactacagtggacaatgacgctgcgatggtaaccagaccgtcttaggtgatttcgatctacgcacaccgactgctcttgacagtatagactatagcaatatgatatagctatcgggactaatccagacggatcaagagttgtnttccgacctaatgccactgacacatgccgcttggagagagaatacgctgatggcactaaaatattctggactgcatttgaggatgcagtgaatagaatgcgaacattacacct

SEQ ID NO: 127244 - DNA, 484 bp, Arabidopsis thaliana columbia
  unsure (1)..(484): unsure at all n locations
cccgctcgaccacgcgtncgggatacaactaaagccttttgcgggcgctatattgcctccaacttgttctagcgtcgcaccttatggacttcctccaagcatcacttcgacttatctcatcatttcagccttcaatgagtacacaggatgccgtggactacaagaaggtttcgaccgcaatgagaacgacgacgactttttgtgacggtgctggagctatgtaccaaccggcgtagccgctgaatgaacactttctggtacttcaagacttgagttgcggtaaaggcaaaacccgttggctagatcctaagaataattacagagcttaacaccgcctgctaaactgagaaaagtttgggggttagagcttcttcagcgtgtaaggatgcttcttctggtactccccccaaccgaacgctccgctccagctgaaaccgcctgatgggcatttgcgggctcagattggggtgagccatcctatcct

SEQ ID NO: 127245 - DNA, 467 bp, Arabidopsis thaliana columbia
ccatatctctatactaaaaaaaccacggcgaccatggggggcaccacacaactccaccaatactatgcaaccaccaaaccctcatgtcacatgaaaagccagcttagataaccaaaacaagaatacggccaaaggaaaacaacccaacattttttttctgggctggtaagacagaacagaacaatacggaggaggaaacaaacaaaaaaacaaagaacaccgaccaacaaaagcccggaatcccacgcaaacatgctaaatataaccgaccaccgtgaagaaacacaaaaacgctacacagaaaagcaagacaacccagagccccaccccacaaaacaccccaagcgcaaaaaccaggtaaatcacaccaaaaaccatcgcacacaaacaccccacgtcacataatcaaacaacacaccccccaccgcaacaaccacacaaacaccaacacaacaccaagcaaaaaa

SEQ ID NO: 127246 - DNA, 482 bp, Arabidopsis thaliana columbia
ttacattttaagggccgggaaggtagctactgaggagagcgcgacacgggtgcgggggtgacgggaaagacgggtgtatattgtgggagaccggtcgaggagagtgaagaagtaatgtgtgcaggttgtgtggccggctcgcgggccggggaacggggccgtgggcccgagcgagccaagcggagtttttttttttttgggggggtgggagcggacccgcttgtcgctgtcgagtggacagaggggcgggagaacgagaaggagggaagacggagggccggcgggggcggggcgggagctggaggggggcgctggggagctgcggtggcgtgaggggggccgggccgcgcgtgggaatgcgatgccggtctgatgcgacgggggtggcaagtggtttaaacacgaggccggcactggtgcggggggaggagtcggggtgagggtgcggggcgggcgtggggcgtgcgtgtgatacacgcgcg

SEQ ID NO: 127247 - DNA, 489 bp, Arabidopsis thaliana columbia
ccgggtcgacccaccccttccgagctcccctccgaagaagatggataagaattagtatctttcacctcagtagaagaatgatcctgtctcttttccccgacaaaaacaaagaatgcctgtcattttcccttgataaccttctcatgggcgaggtcaaaggcaaccacttaacacactccgccttttccggccaaaacttctttgtctgggctcagagctcagctttccctcggttgaggcctgcaaagatcgcaggattcacctaagactttgaagatcccggacatcttgccccaaccggcctattccttggcggcaagacgtacatggttgtccacggtgaggctggagccatcatccgagggaaaaaggcacctggtggagtcactatcaagatgactactcaagctctagcctttggtatctatgatgaaccaatcaccggagggcaatgcaccttgttcgtggagaggctcggcgattacctta

SEQ ID NO: 127248 - DNA, 511 bp, Arabidopsis thaliana columbia
  unsure (1)..(511): unsure at all n locations
gcctgcaggtaccggtccgngaatcccgggtcgacccacgcgtccgggtataccactcgaagcgccatgcgcgagccagatctgtctcatactagtccgacgtcgcaccttatctacctcctcccagctcacttcgacttatctatcattttcaccgtcacagagtgaccatggatgccatgaccaagagtaaggatcgatcgtgcatatgaccatcacgaacttccgaggcggtgctggagcatgtacgaagcggcagggccctggattcacgcgttctggttcttcaagacttcaacttcgtttaaggcaaaacgcgtctgctagatcctcaagatcattacagagcttaacaacgactgctaaaactcggagaagttttgtggttagagcttcttcagcgtctaatgatgcttcatctggttcttcccccaaaccgatcgctccgctccagctgcaatcgcctgctggtcagtttctgtctcagattttggcgagccatcctcatctt

SEQ ID NO: 127249 - DNA, 476 bp, Arabidopsis thaliana columbia
  unsure (1)..(476): unsure at all n locations
cccccctncggggaggaatcgacttttacgcaggaaatttcgaaactgcggcgcttatggggcacaatgacccacaaaccaaggcggaaatacgggagaacgtaacaactttcggcttttgtccaaacggcatcggaaacgaaactgctactacaaagaaaacaccaccgcaagaattttttttttttaaggcgttcacacacccaacgggaaagaacactccaagcccactagcttactctgaacattctgccgtatattatcaactttccagtcactctttactctaggactaattatatcttttcaccgctacaacctattcaaaaataaatacactggctttatcacacctttaacctccctagatatactatacttctcgccgaggctttatttatgtagatttgatcacgaaactaacgacatcctgcatacccacaataattaaaatccataaaacatagaagacctaa

SEQ ID NO: 127250 - DNA, 477 bp, Arabidopsis thaliana columbia
  unsure (1)..(477): unsure at all n locations
gacccacgcgttcgggaaattttaggaggagaattataaggaagaagtaagaagttctgtccagataagaaagagatgggagtgggggaagggctcacggggaaagatacctgggcccgtggtaccagattggttcttttcccttaagggttcaacccaagaaccggggttacacttgggcccaccaaaaccctaattttctcttgtaccatgtcccgccnggaccaaaccaggaaccaccgggaagaagggcgcccaaccaaaggcagagcccattagggccaatctaaaagccacgaaggccagcttaaagttaagctccattgccctccctttcttcccattcatccccgcaaccgaaaacacttggtggccctcattgaacctggactacagccacctttatgagccatccttccaaagtatcccctgatttcgacctgaacggcccattggaggaaaaacctttaaaccaat

SEQ ID NO: 127251 - DNA, 495 bp, Arabidopsis thaliana columbia
ccgggtcgacccacgccttccgaggggcttttggtccttattaaaatatgaataaaccaatgaaagggagtcccaggggtacctccgaaaaattaccagaagggccttaccccagaacatgggccgttataattggtggggaacccgataatgattccgaaaatcaaggccttggaaaataacctacatggaaggcgtttttttacgttttgggttacaaaggcacaatcccccgaaaggattttgatgatgaagcctatcacccagttgtccgtaagggtagatgctgccaccaaagagagctggaaggccatggatagacctctctttgctgactttggggaacggttcattgactccttgaaagctctccaagagaagcagcagcgaaccgcctaccgtttaacactggtcaaaggatggaacacagaggagctagatgcttatttcaacctattcagcattgggaaacctgattttatcgagatcaaaggc

SEQ ID NO: 127252 - DNA, 451 bp, Arabidopsis thaliana columbia
gcctgcaggtaccggtctggaattcccgggtcgacccacgcgtccgggttctcaactagtgtctgtgccatatgatactttgtgcgagaagattgctgcgatagacgcaccatagagacgagagaagatatcataaccgtttagactatacgctgttctatgataatttcttgaagcatgtcttgatgctctcatcgtgacactaacaagcgatgggaacatagtctcggaggtacagcgtgtcgtgtggacactggccatgtgtatctgatcagcacgagtgatttattatatatgcgacgtgaagatgcattggtgatggtctatatatgcagataggcgtacatgactcttactagaacagaggatataccagcttgctactgtaatggaacatgatgtcgctatatcacaagtggcgtctgctgacccttctgccatgtgaatatga

SEQ ID NO: 127253 - DNA, 481 bp, Arabidopsis thaliana columbia
ccaccccagccttccgaggcgttcggatcttttaaaacagaatcaagaatgaaccggaggccggctggaacctccgaaaaattcacataagggcctgacccccaaacatgagccgtaaccactggagggtgagcctatgatgactagggaaaccaatgccctagcaaaaaagctacgcggaaggcgtttttatacagggggggtcacaattgcgcaatgccccaaatggattgggataatgacccctatcacccagttgtgcgtaactgtagatgctgccccctaagagagcttgaaggccattgatccacctctttttgctgacttttcgcgaacggttcatgcactcttcaaaggctttccaaagagaagcgggaggaaccggataccgcaaaacacttggcataggatcggaaccagaggagcttgagctgattaaaacctatgcgtcaagagagaaaccggattttatcgagaacaa

SEQ ID NO: 127254 - DNA, 228 bp, Arabidopsis thaliana columbia
ggggagggtgagggccggaccaacacgcgacagaaggggcccccggggggcccaaaaagcgcccgccaggcgaagggaaaaccggacacacgcggcgggcgcaggccggacccgcgcaggcggaccacgcacagaccaggcacagagaggcagcggcccagaccgcccagaggttttttcttagggcgtgttgtggggcccccgggcagacaagcgcgggacacaaaa

SEQ ID NO: 127255 - DNA, 461 bp, Arabidopsis thaliana columbia
  unsure (1)..(461): unsure at all n locations
aaccaaaaaaaaaccccaaatttaaccccgaacagaacaacacgaccccaaccacacaaaaaacacaaccaagggccaaaaaaaaaaacaaaacaacaacacaaccccaccaaaaaacaaaaaaaaaacaaacaaacanaaacaaaaaaaaacacacacaaacaaacaccaccacccaccacaacaaaaattttttaaaaagggggaagccaacaaacgacacaacaacagaacaaaaaaaaacaccccgcaacgaaaacaagaacagacacaccccaccaacggagaaaacaaccaaaagccgcacagcaaaccaacacgaagaacccacgacgacaacagccacaccgagcgaagccagacagaagccagacaaacgacacagacaaacaacaaacacacaccgccacacccacgaacaagacggagaacaaacaccacgaacgcaagagagaacacaa

SEQ ID NO: 127256 - DNA, 439 bp, Arabidopsis thaliana columbia
attaacacctgaatcagccaatggactggagttcgggtgtaacctccgaaaaattaccttaagggccttaccccacaccttgggcctttacacttggagggtaagcctatgaggattccgtaaccaaaggccttagcaaataaccttcgcggaaggcgttttcttacgctgatgttcccaatggcgcagttccctgaaaggattgggatgataaagccaatatccacaatggccgtaacgtgtggatgctgccaccaaagagagcttgagggtctttgctcgacctcttttcgttgactttcggaaacggacaatggattccttgaaggctttcataacgaatcatgaaggagctgtataccgattagcacttggcataggctggatcacaggggagctagaagctgatcaaaacctatgcgcatgggactacctaatt

SEQ ID NO: 127257 - DNA, 399 bp, Arabidopsis thaliana columbia
agctccctagtttggaaagctatcggagtacacgcgtgaccgttctcatatgaccacatgcaccgttcactcagtattgctttttttcttctaggctagtccgtgcacctgcagtgaacgcatatggtcatcgatgagatatcatgcactgagatcttacggcatccagtcacacctcgctgccggtccgaactctgcacccatactcttaactctgtggtgacggcgcaagcagcactgtcgttacaactgccaactgtggctgcattaggtgtatccacgtgccgtgaatcagtgatggttctatcagagagagggacaccaaaattgagagcaaaagggctggactacagttgaacgatgctttgactctgccacaaccctccgatccgggggatc

SEQ ID NO: 127258 - DNA, 472 bp, Arabidopsis thaliana columbia
gacccacgcgtccgaaaattctatgaaaaggttctcgggatgagactcttgagaaagattgagagacctgagtacaagtacaccataggcatgatggggtatgctgaagaatacgagtcgatagttttggagctgacctataactacgacgtgactgagtacacaaagggcaatgcatatgcacagatttgcctcatttacagatgacgggcacaaaagccggcgaaggcatgaagagaagcaaccaagagctaggaggaaagagcactaaagaagccggaccggtgtctggactcggcaccaagaatggatcattccttgatccagatgggtggaaaacggccgcaggtggacaacataatattactcaaggaactggaatgataagagcaagcaaggaatggcgcgatcaccgaagccctattgtgaaaatgtatcatacaagagaagggacacgccaactacaacctgg

SEQ ID NO: 127259 - DNA, 415 bp, Arabidopsis thaliana columbia
tcccggggtcgaccacgcgtccggccagggctgtgctgattagaggctttgaatgctgcttctgaaggggtgcccatattttgctggatcctggtgttatttttggtccaagcaagctcacttcaacccatatgggtgcttaaatggtgatccaaccctttaacgggagggtgcctggatttattggcttttggaccgattgattcctcttcaaccatggtgatgaaggtggggaaggtcattggtgcttccatggaaaaagggaagcttggtgaaaaaatcctacttactggggaaaaagcctctttcaagcctggctttgaccttgctggacttaataccggaacccaaaagcccaacttttagctttcattattggcccttaacgcctaccgattggtatctggtttaatct

SEQ ID NO: 127260 - DNA, 425 bp, Arabidopsis thaliana columbia
cccgactcgacccacgccgttccgtcttatgtctagaacactctaaaaggcctgaactgggcaatctccggtcaccaccatggccggggaagaaaattataagggttgaaccgccatttcgacattggaacaagccgccccctcaattgccaaatccgggccaaccgcccctaccgggtatgccaggctgacggcacctggattttttggtgccttccaagaaacttcttggaccaattccccaacaaaccccgaggaaccggcggtcatttgaaagattgggcgcgggataaaccgttcgctgggtccatgaccttggaggatctggattccctaagtctcttcaaaatatagcaaacctcaaacctcgcggacaaaccactgaagatgatttctgctttgaccgtatgggcctccctggacaa

SEQ ID NO: 127261 - DNA, 396 bp, Arabidopsis thaliana columbia
cccccctttttagtattacactacctataaacccccctgtcacagagccctactatcttcccctggcaatccacgttcaacagttcctccctactccccgaccaaccgaaatccacaaatgcggcgccaagacaattttcttttcgggtgcgaccaacccccgacaacacaccctccaccggcgagcccaacatgcaccgccccaggaacccgagccagcaccaccgccccgccccaggacaagcccccccaaccacacaaccacgcacccccagaccgcacaacaatacaaaaagacccccaaacccccccagacgcccccccgcagaaaaccagcccacccagcagcaccgcacgccacccacggcccttaccctcttggaaggctcaccaaca

SEQ ID NO: 127262 - DNA, 278 bp, Arabidopsis thaliana columbia
gtgatataccaagaccaacgagaccctttcccacaaaagctggcgggggaccaattcaaatctaatcctattgaaaatcgagcttagtcttattggaaaaacccttcttcacaacccaacacctattgatgcaccactttaagctcttcttttgaccacccccgcccttttctggaaaccaggcccacatgctctatacctcacagaggataggccccagttttagcgagccatctacggatgggtacccttcttacagataacccctgagcacaacc

SEQ ID NO: 127263 - DNA, 448 bp, Arabidopsis thaliana columbia
aaaaaaaaaaatcctgggcgacgcagtaccggttcggaagcccgcccgacccagcctacgcaaggcgagagaagtttaaaagaaaaaagtaacaatcccacaatcctccaagtaaggttacggctaacctaatctgaaaacctacgcctacgatcatgacatatctcaggatcccccgtgacagcaagaagaccacaaccaactaccaaaaacaaggacaccgaataccattctcctagatgctaccctgaaagtaagtaagaacagtcgtttcaaatcatcagaagtaaagaactcaatcctaaccaaccagagaaaacgaacaaatcaataaaaccttagagaccaacctatcatgcgatataatgcagcctcaaagactctaccgaaaacaccagataaacaaagcggacagcaataatatcaagagcccaactccaaccaccct

SEQ ID NO: 127264 - DNA, 485 bp, Arabidopsis thaliana columbia
tcgacccacgcgtccgaagctccgtcagagatttttcgctattcacgacaaagagaggagatacgttgtttagtcagtcatggtcacctctttccccaaatcacaggggacttattgttctgctacatggattaaacgagcataggggcaggtatagagattttgcaaagcagcttaatgctaatgggttctagtcctatggaattgactggatcggacatggccggaagtgatggacttcatgcttacgttccttgccttgattacgctgacccacatttaaaatcatcaattgaaaaggtattcacatacaatccagcactcccctgtttctggtttggacactcaactggctgatcaatcatcctcaaagctttgctggatccaaagattgaatctaaacattcaagcatagcattctcttcaccacctgttggaactcaaccattccatccaatatgacctgttcttgtctccgttcatgg

SEQ ID NO: 127265 - DNA, 532 bp, Arabidopsis thaliana columbia
  unsure (1)..(532): unsure at all n locations
aatctctcttctcagataaccatgggcgccgatggcttgcacccaccatttcaccaaatctatgctctttcccttctctcatggttcaggaaatgcgaaccttgatttcgcagaagaaaaacattggcccaaaggagttccaggcccaattttttttttcaggggctcgnacgagagaaaaggaaaaatcggcgaggagggaaaacaacaccacaacaacccggggaaggaacgggaccaanccaaacgccccgggaatatngngggggaacaaaggccagaaatatctgcactgaagaccttgtgaaccaaaagcctccaaatggggccgtctccatgtgcgaaagctctgcacagtgcttccaaaaacagagcctaagcctcgccaccattaatattcggaagggcaatttagccccacggccaagccttgtccaaagggttacctttattccaggggtaacgcaggcaacccaaacccgggctccgatattacccgaaggtcacctattagaacctaaggtctcaaaaa

SEQ ID NO: 127266 - DNA, 501 bp, Arabidopsis thaliana columbia
tcccgggtcgacccacgccttccggagaagacctttaaaagaataatttttgcagaaaaatttgagagaggagaacaagcctgagccagaatggttccaacctcattggtcaagaaagggaggtccaaatgaaggaacacaagccaccccagatccaaaccaaaggagaagattaaaaaccttacttttgaataaccaatggttttttgatcttccgccaaaatataattctttcctcaaactttaaaagcaggtcttcaaccaccttggccccaacatcatccgcaattttcagcgcaggaatcgctttctcttctccttccttggtcttgtcgctcctatctccgccgctaccatcggcgatctcgatcgattatctaccaaaaaccctgtcctctaccttaattaccagcagggtcgcatgaaactttttggaacgattttggatccgaagaacagatactggactctccaattctctagaggaggcaaaaatgtcta

SEQ ID NO: 127267 - DNA, 486 bp, Arabidopsis thaliana columbia
cccgcgccacaatatagacgcctttccacagggatcccctcgaacaacagcggccgccgccgtcggagacactaaaatcctcaaaagcaaacccagctccgacctgacatgaattactaccttaatcgcagagaggaccccgacttgcaaaaccgaacaaatccccagtcgtgtttttttttgtagggatcatggaacgcgctaatgccggtgcacatgtatggtacattaaatataaaccgtcatactgttcacgtgacctgcaagagtcaagtgttatctggagacatttgaaggaccgcacctaaactcttcatatcttacaaacaaaaccctacaccatctctctacagaccctgcccccgtctgagaatgagccaagcgatccaccctgagatctagccaaagacatacgatcctcttacatcgccgagcatgacagatatcgagttgcatgtaaatggagcaaaatcacagccgagcgcg

SEQ ID NO: 127268 - DNA, 507 bp, Arabidopsis thaliana columbia
tacccgggttgggaagtcccgtgctcgacccacgcgttccgggagccaaaatggggcctcggctgtgttacctggccccaccccacttccccacccaatcgaaccaacacccgattctccagacttcaagaaggaaattggtgtattcaaccaccaaaaagaaaacttgtggcccccaatggcctggtactggccagcctattccagggattccttactttttggccttttgattccagaaggccagaatattcagaaaccagaagaccggtaacccaaccttccggggaatcttggcttgttcttccatccaggaaaggatccatccggccttccttggccaaaaaccaaagaatggtaaaaaaggggtggaacctccaaaaggttaaggaaaaagtaccccccagggctaagcctttaaggtttaatcctccccggtttggaaataatggttatgtccagggaatagaactggttgcagccttgtaagaccttctatgttactcg

SEQ ID NO: 127269 - DNA, 492 bp, Arabidopsis thaliana columbia
cccaggtcgcacccacgcgtccgcaaaaacttttgagagttatagttggtttttttggtaaagtccgatcgtgatctcatatgcatgttctatcctcgccgtccgggttatccggctcctgtccagcatcaactagcttataaagtagggtgggctggcttatgtctggcgattagccgtctcgtctacggtgtcttcttttttttttgggttgggaaagatttattgtttcaataatctaattaaatcagagacgccaattactgttcatgcgcctcgtcacttaaagaaaaggattcttccgactttgaaccctttgaacttttggtgtgtcgtaaccttcacccaatacataccgaatcactaatcttcacgaacgtatgtctgattgccctaaccgcgttccctctcctctagaagcgttggtttacactaaccacggtgagtaattcattataccttcctccgccctttattacatcttagtcattg

SEQ ID NO: 127270 - DNA, 312 bp, Arabidopsis thaliana columbia
cacgcgtccggtctatgcgaccccttctccgccgggggtacgcgtgcacatttgtgccgactgcggtgaccgatatgcgatcgcatcctgcactgtctatgatggtcttggtgcaccgtccttgcgatgtaagctcggtgacccatgttttttcctgacgctagaacagagatcccataaggctccctttgtgctccatgctctcgtgcatacatgactgtgctccagtgggcaccggttgtaagggctagaggcgtggacctagtgttctcaatcgactatctgagagacgggtggctctatcactgagcg

SEQ ID NO: 127271 - DNA, 443 bp, Arabidopsis thaliana columbia
  unsure (1)..(443): unsure at all n locations
aaacgggcagcaccggtgggcccgccggcggccaagaaaaccaaccaggcatgaccacgggaaggaccatngaaatcaagcagcacagacgacaacaacgggagcgcggacacaccgagacccaacaaggaagaccaaggctggacggaaccaaggttgtcttggggcgggggcgcccaaaacaaaggacgaaacaacccaccgcgaaacccgcacgaaccgcaggccacncgaaacaccagggggggaagaacccgaaccaggggccagaaccaaaaaagcaangggccaccggcaccaccaccagagaaaccacagacccgcaaaccggcgggcacaaacaccccaaacaacgccgcggggacaccccagaagagcccacccaaaacgaccaacacgccggaacaccacgccgcacaaagaacacaccccggagccccgac

SEQ ID NO: 127272 - DNA, 520 bp, Arabidopsis thaliana columbia
gcctgcaggtacccggttccggaattcccggggtcgacccacgcgtcccgggaactccttagggagaagtaaagaaaaagaagaagaatgacccataagaaagacaagggagtcgggaaaaggctccacggggagaaatcctgggcccgtggtaccaaaatggttcctttccattcagggttcagcccaagaaccggggccaacattccgcccactaccacctttacccccaaaggacccttccccttttggaccaaaccttggaccacgggaaaaaggggtttaatcaaagccaccccttttaaggccaaccttaaaaccaccaaagccaacctcaaggtaaagtctaaggcccttcctttcctcccaacaatcccggaaaccgaaaatactggggtcctttacaccgatccgaattaccagaaccctctattggcccgcccttccagaagtaatttctgaatattgagcaggccggcccaattggagaagaagacgtataaccagcgggtggaaaagg

SEQ ID NO: 127273 - DNA, 173 bp, Arabidopsis thaliana columbia
gcggcacaggtcactgatagctcgcggttgtaatctgggctttcatctaaagagaatcccgtcctgctttcgtgcgtgtagtactccagacacaacgcgagactgagtgttgatagtctaacggacgggaggagcaccgactcttcagtcgtgccacagagggcctcaacccc

SEQ ID NO: 127274 - DNA, 378 bp, Arabidopsis thaliana columbia
  unsure (1)..(378): unsure at all n locations
cctgcagtaccggttcgnattccgggtcgaccacgcgtccgatatatagctcgatcagatcattatacgcgacatgtcctctgtaggatcgagacttagatatgaatggtacattcctcatctcatcgagataggatgtcatctcgacgtgacaatgtcatctcggactttaacacatgtagatatctccacgctgacttttgagaacaaatagatctatcatacgaccacgaaatgagattactcactcatacatggatagcacgtctgatccactatgacgcctacgtcattctcatttggtcgaggatcattcgcactctctgctgctgcactagctttgtgcgctactatgctcgacatacacatctgttttct

SEQ ID NO: 127275 - DNA, 519 bp, Arabidopsis thaliana columbia
  unsure (1)..(519): unsure at all n locations
nnnnnnnnnnnnnnnnnnnnnnnnnnnnnnnnnnnnnnnnnnnnnnnnnnnnnnnnnnnnnnnnnnnnnnnncttttttttttttttttgtgaaacaacgaaggaatcttcactttggtctgatgtcttattatggaggatggctttgggtatctaccaagataataaaaccccaccacttattaaataccctaatcataaagaaaaagctacagaatagctcccttcttgaaggaagaaaaagaacaaagaaaatcctgaatggtagcgttgctcaaatggcgacaagcactgatgacacaaggccaacgtggcttatgtgaagccttagccttcttggttggcatatgtcaaagcaagtttgaagatctttacgtagtcatccaccaattgaacagtaagcccttttttaacattcgcttgcagcttatcaaagcctctacagtttgcctctggcaatattgattgattaataagactccgcctacatcgctgttagattttctttcagaacaacat

SEQ ID NO: 127276 - DNA, 481 bp, Arabidopsis thaliana columbia
  unsure (1)..(481): unsure at all n locations
gacgtcgcatgcacgcgtacgtaagcttggatcctctagagcggtcgccctttttttttttttttttttatcaaaagggaaaacctttattattggtattattatatctataaagaaagggtcgcaagttaacatacgctaaaatgtaaaccaaaattctaccctaaaaacccgaaaaagctttgatttttatgaatttcccatatttgtgggctctaaagatcactccgggtcttcatatgtgaacataccgcttgaaaacctggtttcnccgcacaacttgaccagccggaatttcggcaaaagcaccagccacaggcgcagatctcactccttgtgctgccctaaagaccggttcagtttccagaccagcgacaacactggtccaaacattgtccttatcaattaccggcaccacaccactcttaatccctgcgtagatcaacccaaccatcccaaccctattaccccaagtaccaac

SEQ ID NO: 127277 - DNA, 287 bp, Arabidopsis thaliana columbia
  unsure (1)..(287): unsure at all n locations
acgtcgcatgcacgcgtacgtaagcttggatcctctagagcggtcgccctttttttttttttttttttatcaaacggtccaaccttcctaaaccttattatgcaactcatacggaaccgcacgcctgtaatcgttcgctgcagtgtaaaccctagacctaccctctagacgcgtgaaagcttggatgcttaagaggtgaacattttttnaggctcgcaatgacactcaggacctccatatgggagcaatcctttagaatacctgctcacatgcacaactgcactacc

SEQ ID NO: 127278 - DNA, 330 bp, Arabidopsis thaliana columbia
  unsure (1)..(330): unsure at all n locations
nnnnnnnnnnnnnnnnnnnnnnnnnnnnnnnnnnnnnnnnnnnnnnnnnnnnnnnnnnnnnnnnnnnnnnnnncttttttttttttttttttgatatgagtagggattcttatggagggaacgattgaaagacaacctgtagatatttcactatcggcaagtaatgacttacacatgcattgaccatacagatctgagctccggatagtcaacattgtgtattccagataaggatttaagcntcagagaagcttagcggcttagttgcaatgaaactgatgctctggacttgacggatgccgtccaatcccatgatgctagtgaacgctc

SEQ ID NO: 127279 - DNA, 173 bp, Arabidopsis thaliana columbia
agcggttcggccctggggtaaaatcttttttaaaaaaagaaagaaggcttacactttggaggacctacttgtcccaaggaacggtggaggaaagaaatcattcctacgacattaaattttattgtacacccgcagacaggaaagaaccggaaccaggaccagcaatccaccac

SEQ ID NO: 127280 - DNA, 501 bp, Arabidopsis thaliana columbia
  unsure (1)..(501): unsure at all n locations
nnnnnnnnnnnnnnnnnnnnnnnnnnnnnnnnnnnnnnnnnnnnnnnnnnnnnnnnnnnnnnnnnnnnnnnnctttttttttttttttttttttaggtgggcactatgaactttatttaaatacaaaaacgtgtggtacagaactagagatcatataagatccctgagaggcaatcaaagatgaccagaaaagaaaaaccatgcgacaaaaggaaacatgcacacctataggccacaacacatgcgaatatactagaaacaccaaggataatggtttctaaatgaacttattatttcgacttcacttgatcgatatggacttgtatttttgaacagagtgtgatatggcttgttctacaggtagcctttccatgcttgatgctccgtagaagccatggacacaaccctgcaatcacgtctattcctcgccacctgcggccgatttctattttccggcggtgtgtacgggaagctgaggtacataagcagagttgattatct

SEQ ID NO: 127281 - DNA, 484 bp, Arabidopsis thaliana columbia
  unsure (1)..(484): unsure at all n locations
tcgctgccgcgtacgtagcttggatcctctagagcgccgccctttttttttttttttttttaacaaattaagaaatttatttaatcgggcgtttaatttttccaccaccagcaccacaagaaacaatnaagcaggcggccccctgggtccattcatgaaccacccacacggaccgccaaaccaccaaaaaaaattatattttggntgttgataatgcccaacaccttccaatggaggttgcacctaaggaaactgattcaaactttgcaatacccaaaaaacttggtccagaaatgtttaatattccgggcgggggccgaaattgagtttccttcttttggtggttggaccaccctaacaccctttgcaccacctagaacagcaattttcccaattatttaaaaaaagccacaccttggcgaaggaaggtgtttttttttccaccccccataagatttttttttcctgaaaaagaacccaaaaa

SEQ ID NO: 127282 - DNA, 280 bp, Arabidopsis thaliana columbia
atgacgtcgcatgcacgcgtacgtaagcttggatcctctagagcgggccgcctttttttttttttttttgttaattcggaaagaaacttcatttttgaacagctacaagactaaagaggtgaacatactggctctagggttacttgtaaccccaacgttcattaaactaagagcccctcacagggagcgcgacgctcattgttgcactataatccttaacatcgcggagacttattactgcatcggtaaccctggacaataagctatcagacgtgatcct

SEQ ID NO: 127283 - DNA, 516 bp, Arabidopsis thaliana columbia
  unsure (1)..(516): unsure at all n locations
nnnnnnnnnnnnnnnnnnnnnnnnnnnnnnnnnnnnnnnnnnnnnnnnnnnnnnnnnnnnnnnnnnnnnnnnnctttttttttttttttttttaaaagcggaagaaaactacagggtgtaacactaatacctccgggtggatgacgatactggctcaaagctctctgatgcctacatgcttcatgaaactgaagcacacacaagggtgtagaaacccatgtccctctatgatccttacggttgcgaagatatattagttgataggtggcctgctactataacctctaagatgtgaccctacgctcctaaatgagcatgagtgaaacctctgaactctagcttattagctgttgcagatcttttgactgcatgtatggttcctcagctgctataaccgcatatcacctggcgaactctgcatgggctgacgctgcttgtagatcctaanactgatactgtgcttcagttgcaaccttttataacatgttgttcactctaagtcagcaacaatagctg

SEQ ID NO: 127284 - DNA, 506 bp, Arabidopsis thaliana columbia
  unsure (1)..(506): unsure at all n locations
nnnnnnnnnnnnnnnnnnnnnnnnnnnnnnnnnnnnnnnnnnnnnnnnnnnnnnnnnnnnnnnnnnnnnnncttttttttttttttttgcaaaaagcggtaggaaactacgagtgttaaagacaacacctagaggggttaaacgatccgggctctgagctctcttaagactctaagaatcttaaatctaaagaacgctcaatgggacagatgagctatggccctgtatactgcatacagccgcggagacttcttattagaccagtgacatgctgctatcacctccgatatggtgtctaccgctcccaaaggagcactaatgactctcacttagctgatgctaaaatgttgtttcagatcatttgacggactttatgggaacttagctgctaactacgcataccacagtgagaatctcctttgtggatgccgctgcctgtgagatcctgaaactgctgactatgctacttctgtgatcgtattacaacatgttcgacactgtatagt

SEQ ID NO: 127285 - DNA, 522 bp, Arabidopsis thaliana columbia
  unsure (1)..(522): unsure at all n locations
nnnnnnnnnnnnnnnnnnnnnnnnnnnnnnnnnnnnnnnnnnnnnnnnnnnnnnnnnnnnnnnnnnnnnnnnnctttttttttttttttttttttttttttttgtttttttttttttttttcgttttttttttggtgtttttgactttttgggtttttttttttcttaaaaccaagggcttcagaaaaaacaagcacccaaaagggggcgcaaccccaaagccccggtttgatagaaatcggggggggaaagggggccccgaaacggggccgtgtagaaattatggggaccaggtgtttttcttctacaaaaggagcccgggggaaaaaaaaaaacaaaagcgggggggaaaaaccagagcgctgggggggctggatcaaccccctgctggtggcaccacaaaacccgtattgaacatttttgggatttgaggaaggcggacccagtctgattgtgaaacttctgttaggtttgaaagaccccaacacaacgctgtggggggtgggctggcaacacaaaatg

SEQ ID NO: 127286 - DNA, 507 bp, Arabidopsis thaliana columbia
gacctatagaagactttgacgtcgcatgcaccccttcgtaagcttggatcctttagagcggcccgccttttttttttttttttttttttttggaaagaaatagaaagcttggtaactcttaatgacccaatgggtgaaagagccaccacctggggatttgattttcacatgttttatgaaacttggtcttaacaagggaacttgaaacccatgttacgaccaaagacattatcattccaaacattaagagcttcattgcttggcattaacacaatacttaatggcatgaccattcccaccgaaaacaccatgatcgaagcccttccattcttgggtattaccttttgaaccacctttagtcccaccagtgatgccacaaaacattttaccggaaatattcttggcggttccggattttccatgccttataattagtattggattgcaaaccttggtggtgaaaaaagaaccctggaagaaccttgtggttcaattaccttgggaacg

SEQ ID NO: 127287 - DNA, 494 bp, Arabidopsis thaliana columbia
acgtcgcatgcacgcgtacgtaagcttggatcctctagagcgggtcgcctttttttttttttttttttttttttagaagaaaaaaaaagcttggttacttctaaagaccaaatgggtgaaaggacaacaacatgggtgttatgattacacatgtattatgaaacttaggctccacaaaggaaccttgaaacccaatgaacccctatttttctgatgcttccaaacattaagaagctcatagcttgtcattcacacaagtactcattgctttgacgataccaacccgaaacacaatgatccgaagcccttcctactcgggtattaccttttagaacaccttttagccctacaagtggatgcaccaaacatataaaccaaaatatacttgcggactccggtttttccaatgctaggaataaacatcgaatcgagacatcgttgttgaaaaaagacccttaaaaaaactgttggcttgaagtacttcgggaccaaac

SEQ ID NO: 127288 - DNA, 317 bp, Arabidopsis thaliana columbia
gacgtcgcatgcacgcgtacgtaagcttggatcctctagagcggccgcccttttttttttttttttttgaaacgcggaagggatcgttgtcgtgttacacttatgacatgaaaggagatgacgatataagcgtgcactggtcatccaattgctgcatgattgcatcaatgagatgacctcacaaagtgtgaaagacgatttgagttccgactgtgctgctgtatgctggtggagagatatactatggcacagggagccttgcctctatgatcagctcatatcgtgatagcaccggtcctaacatgagcactattcga

SEQ ID NO: 127289 - DNA, 508 bp, Arabidopsis thaliana columbia
  unsure (1)..(508): unsure at all n locations
gagagctttgacgtcgcatgcacgcgtacgtaagcttggatcctctagagcggccgccttttttttttttttttttggttttaaattctttattatatagaacaaatacacgaagcaatgattcatttaacagtgaacanataactnntaaatgngtgggaatccatanngaacgactactatacatatatatatatatatatatatatatatnagatttctatcacgtgttgttttcaggtttgggcaacgacttctgtctcatcatgctgatttactcacagaagctggagcatangccgcagcagaagatccaactcattatgccttcgaggttgacgcctttggagtttgtctcactgctgctgcngaggatcacccaccaccgcatctctagtcggataaccaattggtggcggacttgtgtacggncctgatgaagtctctgaaggtttttgcacggaaaagtaaatttgcgcggattgattcattctgatttgaggagctg

SEQ ID NO: 127290 - DNA, 296 bp, Arabidopsis thaliana columbia
  unsure (1)..(296): unsure at all n locations
acgtcgcatgcacgcgtacgtaagcttggatcctctangagcgccgccctttttttttttttttttttattaaaaggaacaaccttgattattgaaactattatacccattaagacaggttctgccgataacatacgctaaaatggaatccagaacttttccctaaaaacccaaaaaagccttgatttttaagaatttcccatatttcgtggctctaaagaacactccggcttttcataatgagacacaccccttagaaatctggtaacccattcaaactgcacacataccctttt

SEQ ID NO: 127291 - DNA, 521 bp, Arabidopsis thaliana columbia
  unsure (1)..(521): unsure at all n locations
nnnnnnnnnnnnnnnnnnnnnnnnnnnnnnnnnnnnnnnnnnnnnnnnnnnnnnnnnnnnnnnnnnnnncttttttttttttttttaattgattcgaatataacaacctttaaaacactcgttttgagtttattcaacaccaacattaaagttattattaaaactaaaaatacgatagaacaaccttattatacacacatgacatgatgtgaaatatatgttgagaaggtccattggtgcatatggagatnntatgttttctatgccataaacattattactgtttgggacgaattgcaacacctttgagggagaagcctttctccaaacaccagccgcatgctcatacattgagaaagtgatctctccggcagcggatttctcatgtacgaactcgccaactctgacatcgacccatttataccttggaagttccctcaaactcacctttttctcttgggggttctccttaccgttaggcaagactagctttaggttcaccggcgtgtcccatccatagg

SEQ ID NO: 127292 - DNA, 531 bp, Arabidopsis thaliana columbia
  unsure (1)..(531): unsure at all n locations
nnnnnnnnnnnnnnnnnnnnnnnnnnnnnnnnnnnnnnnnnnnnnnnnnnnnnnnnnnnnnnnnnnnnnnnnctttttttttttttttttttaatagaagggagaaccttcattatgggtattattatatctataaagaaaggctcgcaggttaacatacgctaaaatgtacaccagaattctacactagaaacccgcaaaagctttgatgtatatgatgttcccatataggcgggctctaaagatcactccagatcttcatatgtgagcatacacgttgaaaacctgcttctgcgccacaactgcaacagccgcanttgcgacaacagcaccagccacagtcgcagatctcactcctcgtgctgccctatagaccggtgcagttcccataccagcgacaacactggtgcgaacatcgtccttatcagttacagccaccacaccactctcaatgcctagcgntgataacccaacaatcccaaccctattaccccgagtacgatctgcctgaccagacgaattcagaatccg

SEQ ID NO: 127293 - DNA, 508 bp, Arabidopsis thaliana columbia
gtcgcagcacgcgtcgtaagcttggatctctagagcggccggccctttttttttttttttttttttttttttttttttcttttttttttttcaacccaaagtttggaaaatccgatccctagaatgttggttttcccccgaacccggggcctgggagaacaagacagcccaaaagggttggcttacccaagaaccaggtttttttagaacgtggggggccaagaggggccccaaacccgggggataaggaatttttggaactttgttttttttttctaaaaaaggttccccctggaaaaaaaaaaaaaaagggggggggacaaaacccggggggggggtgggttgggttatccccctcgttttcgcggccaaaaaaaagttctgacaatttttgaaatgggccccggcgcgacccctccatttggggataagtcccaaagtttttaagaaaccacattaaccccccctggggggttccctcgaaaaaaaaaaaattttggccggaaag

SEQ ID NO: 127294 - DNA, 488 bp, Arabidopsis thaliana columbia
gtcgcatgcacgcgtacgtaagcttggatcctctagagcggccgccctttttttttttttttttttatcaaaaggagaaacctttattatgggtactattacacatataaagaaaggttcggcggcaaacatacgctaaaatgtaaaccagaattctaccctaaaaacccaaaaaagctttgatttttatgatgttcccatatatgtgggatctaaagaacactccagatcttcatatgtgagcatactcgttgaaaacctgcttacccgcaacaactgcacaaatagtattttcgacaaaagcaccatccacagccgcagatctcactcctagtgcctgcctacagagcgctccatttcccataccatcgacaacactgcgtcaaacatcagacttatcagttaccgccaacacaccactcttaatacctgcgttgatcaacccatcaatcccaaccctattacccgagtaccaactgcctgaccag

SEQ ID NO: 127295 - DNA, 516 bp, Arabidopsis thaliana columbia
gacgtcgcatgcacgcgtacgtaagcttggatcctctagagcggccgccctttttttttttttttttttgattgctgaagtaaacaacagttttgtcacactttaggactcggcagtggaggacagatacgggtcacggttgtcggagttccacatgcttcatagagacagaagcccacacagagtgtgctcgatatgttaggtaccctctattctcgtttacgatggtggacacatagagtctgactagggaccctgcaagaatgatcgatattgtgtggccaatcgatcctaaaagagcacgactgaaacctgtaaactctagcttgttgcgtgatgcagagctattggggcccttcgtggttccactgctcgtaacagcgcacagcaccttgcgagccctcgcatagggctgacgcagccgcgaccagcctattaaggcatactgtgctaagtttagcacctacgactcatatcggtgatggcactaagtcagcagcagtagcatgtctagca

SEQ ID NO: 127296 - DNA, 507 bp, Arabidopsis thaliana columbia
acgtcgcatgcacgcgtacgtaagcttggatcctctagagcggctcgcctttttttttttttttttttatcaaaaggtaaaacctttattattgtcactattatatctatcaagacaggatcgcaggttaacatacgctaaagtgtaaaccagaattctaccctagacacgccgaaaagctttgatttttatgattttaccatatatttgcactctaaagatcactacggatcttcatatgtgagcatcccgttagaaacctgcttaccgtcacaactgcaccagccgcaaattcgccaaatgcaccagccacagccgcagatctcactttctcgagctgccctaaagaccgctccagttaccagaccagcgacaacactggttccagacatgcgcccttatcaagttacagccaccacaccactctcaatccctgagtagatcacccaacaatcccaaccctattaccccaagttcaacttggctgacaagacaattaaaatcctg

SEQ ID NO: 127297 - DNA, 444 bp, Arabidopsis thaliana columbia
  unsure (1)..(444): unsure at all n locations
tgacgtcgcatgcacgcgtacgtaagcttggatcctctagagcggccgcccttttttttttttttttttttttttctgaagaaatcgaaagcttgttaacctttactcgaccaatggatgacagagcagcgacatgggtgtctgatctccacatgctttatgaaacttgagctcacacaagtgactcgaaacccatgtaacgaccatgagacataatcattgcaaacatcaagagctgcataggtagccatcaacacaatactcaatgccatgacgataccaacctagaacacaatgatcgaagcccttccatactcggttattacctgttgcaccacctttagtcccacgagtgatgccacaaaacatatcaccgcaaatatacttgcgactcctgcatgttccatgcctagncataagattgaatcgcagacatctgtgatg

SEQ ID NO: 127298 - DNA, 472 bp, Arabidopsis thaliana columbia
atgacgtcgcatgcacgcgtacgtaagcttggatcctctagagcggccgccctttttttttttttttttttgtatggagaaagatgcttctaggggttgcagcgaaccgacacagtttatgacaataccccataggagaactcttacttatatatgcttcatctgtccacagttgtactcaggatagacactactatgtttcctcacagttgctgaccgcaggaaatggggattgtgagatcgatggactggaacaaacatctctggactagtgctgctcccgtccaataagataatgatgactagcgcatccgcgtacgcatataggtggtccaaaaggtttaacagtccttagcagctgcattatgtcagagcttatatcgtatgatgactcttccatagtgcaagcctagctatcggattgtaaaagtgttattgtgcataaacaagagctgttcaagaattgatatct

SEQ ID NO: 127299 - DNA, 405 bp, Arabidopsis thaliana columbia
gacgtcgcatgcacccctaccttagcttggattctttaaaacgggcggccttttttttttttttttttaaaaaacaaaaaccttgggttgatttcccttttcaaattttgattaccacccttttaagattaagaagctggattcaaatacctaattttatggactaattggttcaagaacggcatttcaatgatgaacaaggggaaccagcctaaggggtggcttcttgctaaaaatgaatgaacctggttcttccaaagtgaaggcctttaaatttttcccttccaggccttcccaattgaaaaagttaagccaattccacaagcccaattcccacggtggtaatcccaaggttaatccgggaacaaattttccggccaaacccaaagggaaccagttaaaggt

SEQ ID NO: 127300 - DNA, 524 bp, Arabidopsis thaliana columbia
  unsure (1)..(524): unsure at all n locations
nnnnnnnnnnnnnnnnnnnnnnnnnnnnnnnnnnnnnnnnnnnnnnnnnnnnnnnnnnnnnnnnnnnnnnnncttttttttttttttttggtctaactttcttgatctatatagtatatcaactctatcaaacaacacataagaaaaccccctataaatgtgtttcttcataatcaaaatcataaaaacaccaaaacttccatagattcaaatctcatggaactttatgggttttgcagataacatatagtagcaacaatggaactaccaggctgtaacctgnaaaatgaaccacattcatctcataagctctacctaatgcccagcaattcttgaaatgcttccaatatagagctaatgaaagccagcagaccgatttccgaaacagtcttctgttcgagataacagtgagcggcgttgtgatctcttcttccttccccggtcatggtcatcctctttcttaccagagacagttcgaatgtgatctttgtagatttctctctcagcaaccagacaacacacaa

SEQ ID NO: 127301 - DNA, 218 bp, Arabidopsis thaliana columbia
  unsure (1)..(218): unsure at all n locations
tttttttcttttttcaaaaaacagacatttggccatccggttgaaattggctcataaagaggaaaaggaccccagccattgggaatggaatggtccggagttattcataaaaatggtttaaaaaaaaaaataaacttcggggaagctttttttgttggaggggagggaaccggaccaaggaaacgaaggggggnggccaaacccaaggacccaaagga

SEQ ID NO: 127302 - DNA, 484 bp, Arabidopsis thaliana columbia
tgacgtcgcatgcacgcgtacgtaagcttgggatcctctagagcggcgcgcctttttttttttttttttttttttgctgtggaaaacaaaaacggctttccctaaaaccaagggggattatacctttctgggtcggaaacaacttagaagttattttttcgagttttgaccagaactcccaacacccttaaaaaccaatggaaccctatgcggccaacctccgggaaaaataatttgaaaacaaggatgcttgcatccagaaccgctaacacatgtccttccattgctagataaccctgaagataacgaaaaggaaaaaggtggagggtggttcacctctataaaatcactttaagggtcctttggacctaaaacctgattagactgaaggacccaacaaagttgatgatgcggacctctaaatgcccaaaatgcataaggaccaataggcaaggcccaaattttcttaatttgtttgcacttt

SEQ ID NO: 127303 - DNA, 525 bp, Arabidopsis thaliana columbia
  unsure (1)..(525): unsure at all n locations
atagnnagactatgacgtcgcatgcacgcgtacgtaagcttggatcctctagagcggccgcccttttttttttttttttttcaacatgaaggaagctacagtagatggtaccaactacatctcattacagaggaatgagcttaactacacactggaaggtatcgggaaccgtacttatggacacaagatttgagatcatcacagatgatggtatccatatggagatgnctgtcctagaacacgatactatattcatttgaaccaacacatgttatgactcatgcaatagatggcgaggactttaatgcttgttacgatctactcaacatccaaaggaggacgactcagttccagntatctccactatcgatattgaacgctgaaagcgcctgaaatacggtgaggagacttatatatcaggtgcagctgcagatcctgattccatgtggagggtttagaagccatccaggagaaaacgtacaccaggttatcagaggatgctgggagctcatattaacagatgag

SEQ ID NO: 127304 - DNA, 525 bp, Arabidopsis thaliana columbia
  unsure (1)..(525): unsure at all n locations
nnnnnnnnnnnnnnnnnnnnnnnnnnnnnnnnnnnnnnnnnnnnnnnnnnnnnnnnnnnnnnnnnnnnnnnnnctttttttttttttttgttttgtaccaaaccgatctgtattgaacttggttaaatcattttctagaaccgaatctcgtcacaacttaaaaaaaaaaaaacataaatccgagttcaacatcctaatcatacatatcaccacgaaacatgataaataaggcaaacagaggtggatcctcagatctgcatagcatcttgttcgtcttctgcagcagcttcatcgtttttgattggttcactgaacatatactgactctgatactcaacaagatactgcatcgatctcctcacatccaagaacagtctgtaaactctctgaatatcctcaacctccacgactttccctttccgtttctggcatgacaatgcagctgcggttataagatgaatcgcataccttagagatgtatcacgtccgatcaatgtcaaaagctggttggcctcttcgttcatc

SEQ ID NO: 127305 - DNA, 459 bp, Arabidopsis thaliana columbia
aggtgacactatagaagactatgacgtcgcatgcacgcgtacgtaagcttggatccttcttgagcggccggcctttttttttttttttttttaaaagctgaaggaaaaaacacttgataacctctggcacagggtcgactggtcatacattgtttgaaaaaaaaaaaaaactttaagtttctttggagggcatcttcgcttggatggcccaaaatttgtgtacccccctgctgctagaggacctggagacatatggtttccggaaaacttttacaaaagggattgcatatccctgttccggggtttcaaacctaccacgaccgaactttttcctttggaggtttttgggtttttcaaagccactgggttgcttcttgggtgagccttttcttgaagcactaaacccattgggaacatcaccgtgcttgaggcattcaagcacatgccaataacgggaac

SEQ ID NO: 127306 - DNA, 497 bp, Arabidopsis thaliana columbia
tgacgtcgcatgcacgcgtacgttagcttggatcctttagagcgggcggcctttttttttttttttttagagtcaatggatgaacatgtagcataaattggttagtacgaggaagatatgcccaccattcatgaaaaatgaaatcattacattggatacattgatacacattaccaccatgatcattagaaggacgtctggacgcttgacaatgatgggtttcatcggggaatattttttcaaggcttaattggtgacctggatgacttttatgctggataatcccatcggctttcttcttaaacattttaagggcttcatatacttcttcaagcttttctttaaggttttttccgtcacacacattactttgcataacacatttggaatggactggattaacccattcctttttaatgcaagaatattcttcggaattttcggttatttttggatgaacaacttcaccattcggcaccggtgggtctttgtaaagg

SEQ ID NO: 127307 - DNA, 499 bp, Arabidopsis thaliana columbia
tgacggcgcatgccccccttccttagcctggattcttttgagcgggcggccttttttttttttttttgggtttattgggtgaaggcttaacccaggtccaggcggaaccagccaatttccaaacttatttttcaaacccttgaaattatgccaggttggattatattttttttattccgttacccttaacccttttgatttcaccatccaccatttcccctggaacctcactttttggaaccccttttttttttgaccaaacccaaatggcagcccctgcctattaaaaaaaaggatatttggcctttaaccttatttcttgaattcgctgggttagcccaccttagctttattaacccttttcggggagcatacctgcggtttccttccttaaaccccgtattgggatcggcagaatcacccggaaggggagtttttggaggctcattagaagaaaagggtggcaacttctcatatagttgggccttaacatagagag

SEQ ID NO: 127308 - DNA, 365 bp, Arabidopsis thaliana columbia
acgtcgcatgcacgcgtacgtaagcttgggatctttagaggcggccggcctttttttttttttttttttttaagcggaaggaatctcttgtgtggtaacctttagagaccgaaggggagaacatactggctccatggttaacaagtgcccaatggtttcttaaacaaaaggcccaacaagggtgggagaaactcaagtaccccttttttccttttgctgggaaaaatctataatttgcaaaggtagccttcacctattacccccaggtcgtgcgaaaccgacccaaattaagattatccgaaccctcaaactacaggtttaaagattttacaacacctttaggacctatggtgggttcctcagct

SEQ ID NO: 127309 - DNA, 488 bp, Arabidopsis thaliana columbia
  unsure (1)..(488): unsure at all n locations
tgcactatagnagactatgacgtcgcatgcacgcgtacgtaagctttnatcctctagagcggcccgcctttttttttttttttttatggtagaggctatggatgggaaaaccttaccacacccaacacaatgtccgatgaactttattatgccgccctaacagagtttccggatttttaatgacccaatcacaaaccaattccaaggtcaacacttaaacttggaagacatattggtcggcccatacaagaagaccagtgttattatcccaaatcggaatctaattctattaaccagcggagccctgggaagcttgaaaccatttgggtaccaacaagggccagttttcattttccagccaatattaaatggggaaccgggaaaatccaacttgaacctggacctgaattcgaacttgaatgggaccctgaaaccaaacctggtttcgaaggaaaaccactaaaggggccaggactccgggaaatgga

SEQ ID NO: 127310 - DNA, 543 bp, Arabidopsis thaliana columbia
  unsure (1)..(543): unsure at all n locations
nnnnnnnnnnnnnnnnnnnnnnnnnnnnnnnnnnnnnnnnnnnnnnnnnnnnnnnnnnnnnnnnnnnnnnnctttttttttttttttttttatcaaaagggtaaacctctattattggcatgatcatatctatcaagaagaggttcgcatgttaacatacgcttatatgtgaaccaggattctaccctagagacgcgaaagagctttgatgtttatgattgctccatataggtgggctgtacagatcactcctggtcttcatatgcgagcataccaggttgaagacctgatttctcgtcacaactgcaccaggtgcaattccgactatagcaccagtcacagcctgagatctcactcctcgtgctgacctagagaccgctccagttcccagaccagcgacaacactggtccaaacatcgcacttatgagctaccgccagcacaccactgtcagtccctgcggagatcaacctaacaatcccagcactattaccccaagtacgacctgcctgaccagactaattcagatgctgttgattttcag

SEQ ID NO: 127311 - DNA, 518 bp, Arabidopsis thaliana columbia
  unsure (1)..(518): unsure at all n locations
gacgtcgcatgcacgcgtacgtaagcttgggatcttttgagcggtccggccttttttttttttttttttaaaaaggtggagttaacaacgttggtttacccctattcacttggtggaagagaacaaaaatgggtcaaaaattaccaattccctaagtctttatttaagaagaggccaccccgacagtgcccaaatttttatgttcctctatgtctgttttcgtaggtggagaacttatatttgaccagggacccttgttaccgatgattcgcttattatcttgcacccaccgcttcttattggagcaacaaatgaaaccctgcggagcctcaagcttccgcggtttgttccaaaagctattggccgtcctcccatggttaatctgctcctaccagcncaaaacacagaaaggacccttaccatggtttgatgccgccgggtagaaccctaaaaggtttacttttgttcgtctggaacttaatcttcttataatgaaccccttaagccagcacagcagt

SEQ ID NO: 127312 - DNA, 503 bp, Arabidopsis thaliana columbia
gccgctggcccccttccgtagcctggaatcctttaaagcggccgcccttttttttttttttttttttttttttttttttttttttttttcggggaccggattctttttttttataaaaaaataccatttttttttcacttttaaggcggggccccagtggaccctggttccaaaccttctcctaaaaatatgtaaaaaggatccttaatccaaatcctcacatttaaaaaagacgggctctatataacttaaagctctttcagcctttcggtttggaggggacacggatccggtggcccttccgaaatcgccttctttgagagggaataaacccacccatccctccattaaaattctttaacagcagttggaaaatgaaaaacagctcgtgaataagcacatagtctttccaccatgttctcttcaaaggttagtcctttttccgcggcagcagctgctgcaagttcttggatgagtctcgacactacatctctgaattcttt

SEQ ID NO: 127313 - DNA, 285 bp, Arabidopsis thaliana columbia
gacgtcgcatgcacgcgtacgtaagcttggatcctctagagcggtcgcccttttttttttttttttttttttggaagaaacatttttgagattaaaaggcatcaaagcaaaaaatgtcattttttgccaaaacccagagcatataagtattttggttaactattcctcttattgaattctaatcccaaacttcatcatttatctggcactcatcatcatcatgcttcgggggccttacgaccaaaacaaccatttctaaagtctcattcacctcttttttcttta

SEQ ID NO: 127314 - DNA, 503 bp, Arabidopsis thaliana columbia
gacctatagaagactatgacgtcgcatgccccgcctacgttagcttggatcctttagagcggccggccttttttttttttttttttaaaaagctgaagtaaaccaccgttgtttaacactaatcacttgggtggagagaaccaaaatgggtcaaaaattaccaattcctaaggtcttcatttaagaaaagcaccccccaccgtgcccaaattttatggtcctctatgctgctttcggagggggagacctattattgaccagggaccctggtaccatgaacgcttatatctggaccaccggtcctaaatgaaccccaatgaaacctgcgaacttaagctttgcgggtggtccaaaactattggcgtccttcatgggtaatttggttcttaccgccccaaaccccggaagaacccttaccatgggtggtgccaccctgtaaaaccttaaaagggttactttggtacctctggcaccttattcttctattcatggacccccttagc

SEQ ID NO: 127315 - DNA, 479 bp, Arabidopsis thaliana columbia
gcacgcgtacgtaagcttggatcctctagagcttccgcccttttttttttcctttttttaaaaaaaggaacaacctcgatgatggtggtcctcaccacaagtaagaaaggctctgcggacaacattctctaatatgtatgccagaaacctaaccgtagatcccagaaaagcttgggctataaagaggatcctgtggattgtggggtgtgaacaaccctccagcatttcttatgtaaacatactcccctgaaaaccacgtaccccgaaagacctggacactaagcaaaattcgccaaagccacatgggcagccgagaatattacttccttggctgccctaaagaccgaacaagtttccagaccaaccacatcaatgcgtccaaaattcctacttattcagttcttgcagaaaccctacttttattttctgggatagaatagacccaacatattccaacgctattacttccaggcccacgt

SEQ ID NO: 127316 - DNA, 256 bp, Arabidopsis thaliana columbia
  unsure (1)..(256): unsure at all n locations
nnnnnnnnnnnnnnnnnnnnnnnnnnnnnnnnnnnnnnnnnnnnnnnnnnnnnnnnnnnnnnnnnnnnnnnnnctttttttttttttttttttatgagaaggatcaatctgtttgaagattgtacacaccatgaagaaacaacaggcttctgcgcgacaacgttatgctgatacagaacgcgtcgatactatacctgtgagattcagagagtactagtgggtcgtactagatgtataccgtatagatgtacgaaag

SEQ ID NO: 127317 - DNA, 373 bp, Arabidopsis thaliana columbia
tatagaaagttatgacgtcgcatgcacgcgtacgtaagcttggatcctctagagcggccgcccttttttttttttttttttttttaactcaagaaagcgtctttatacatggaaacatgtttttaacgtaccacttgtccgtgtcgcggaaaaaaacactcctatgattgcgagaccaacaaggctgaaactcttaccaagaaccacatatgtaatcttcagtaatcagaggctgactcggtggactcatgcagaaactgtaccgtgctacaacagatccatctttgtctttgagacagagacagtttacatgaatgtgtcctttgaggtacgctatggagaactccggaaggggattagatacacagaaagc

SEQ ID NO: 127318 - DNA, 379 bp, Arabidopsis thaliana columbia
  unsure (1)..(379): unsure at all n locations
tgacgtcgcatgcacgcgtacgtaagcttggatcctctagagcggccgcccttttttttttttttttgtataaagcgggcggaaacaacgtggattaaatccaacaacaagtggtcgaaacagatacgcgctatgagcatcgctggagactcttggcgtcaacaatgaaaagaaaacgcaacggtcaagacgaaggttgtacctgtatggtgcgtacaaaggcgaaactttcttgtgaaaccagtgcattgggtccaccatcgtttagatgtttttaccgccgctaacgatttgacggactttgaaaatcaaccacttttagggtgtttccgatcggttgactgggtatatgtgancttggctgaaaaccatgcacacc

SEQ ID NO: 127319 - DNA, 182 bp, Arabidopsis thaliana columbia
cgcgtacgtaagcttggatcctctagagcggttcgcctttgttttatatcttttttataaaaaagagccaccacaaagaggaggagacgcttacaccaccatcagggaggagcgcctccaggcgaaattgtgctaccgattctatagaagaaacaccacaccgataaatgccacacaaagcc

SEQ ID NO: 127320 - DNA, 530 bp, Arabidopsis thaliana columbia
gacctatagaagagcttgacgtcgcatgcacgcgtacgtaagcttggatcctctagagcgggcggccttttttttttttttttatggtaatggcatttaataacccaaagaactttggctggagccgattcctcacttgagattttggggaccatgggcattggcttattaaccgggtcaaaccgattggtaatttccggcggccaaaaaccaaagaattgacccacttccccaaggtatcattggcttttgaaccggagaagcggcaacaaaacttttggacttgccaaccgaaatggaccagaaggcttttgttacctgggaacataagtccatgaccctgttcaacagtaattttggccctttcccaagtaatcttcgcaagtggaggctcatcctctttcctccttgggggaccggttggcccatttcctccataccggaagtaagcaagctgactttccgctggctcaagcttctaagccaagtctgatatttgcccggcccatagtctccattgcccacagtgg

SEQ ID NO: 127321 - DNA, 494 bp, Arabidopsis thaliana columbia
gacgtcgcatgcacgcgtacgtaagcttggatcctttagagcggccggcctttttttttttttttttttaaaagccggaagaaaacaacggcgtgttacccttaacacgccgagggggagacagaaccggctccaggggttctgatttccacatgctttattaaacaggaggccccaaaagggagcccaaacctcatgtaccactattgtccttatcgttgcgaacaccaagaacttcatagggagccatgaacccaaaactctaagccctgacccaacccacctaaaacaccacgatcgaaacccttccactccaggttattagcttttgcaccacctttaggccccctcatggttccaccgaacctaaaagcgcaaaacaacttgcgagaccccgcatgttgcatgcctcagcataaagaatcgtaaaagagtcatctttgatgaaaaaagaacccaataagaacattggtggtgcaacttactccggaacc

SEQ ID NO: 127322 - DNA, 501 bp, Arabidopsis thaliana columbia
tgacgtcgcatgcacgcgtacgtaagcttggatcctctagagcggccgcccttttttttttttttttacaggatagtctctgctaatttaaaacgttacaaagtgtttggctcactaataagaaaaagaggcaaagactatttgaaactttattgatcatcaagttaaccagcacattctattggcttttcttctatgaatgagaataacccttttattcttcttctcttcttgctcttgggtgtatatatcgttcaactctcagctagctgctgatgcgatttctatcgccggctcaggaacaacatcggatggagagaaaccgtttgttttcggatagtgcttcccctctagtccccagtattttgcggttttgagatcgtcttcatacatttgtcgtgagaaatcttcatgatcatactctagtgttgcttcaccttcgaattcctttgggagattctcaacgtcaaaatgtgtcgtcatcagttcatcacttgcttt

SEQ ID NO: 127323 - DNA, 490 bp, Arabidopsis thaliana columbia
gacgtcgcatgcacgcgtacggtaagcttggatcctctagagcgggccggccttttttttttttttttgggccaagctgattataacatctttggggagaccttacaacttgttgttactaaagccaaaggaaattgaattcccacacctttttggtaccattttcataaacccacttttggggtttttacgttggatgtccccctatattggcttatttattgggcaaattaataccacacttggaaccaggtccttgcatcatgaaagtttatccccaccgattctaatggggttaattaataaccggaaagcaaacccttccgggtttcccattaacttcgggtaccccaacggttttacttattctgaccattgaacccccaaaactaaccgtgaaggggcttgttggaggcatcaaatggttgaatatggggcttatggctggaacgggcccaaaggcttgatggggttggaaaacttcccgccc

SEQ ID NO: 127324 - DNA, 491 bp, Arabidopsis thaliana columbia
gacgtcgcatgcacgccttcgttagcttggatcctttagagcgggcggccttttttttttttttttcagaatttaaacttggttcgttttcttagcaaaaaaaaaaaattaaactttgatgtgattcaaaagggaccgagatcaaatttggaagattgaccccgttagaaaactggaaaatcccagaattgatctgaatctttttgaacatatctccccttaccattttgatgccagtagcttcagttttgtaatcgccaccacacatgattatggtcttggcaaagatgaagtaacttctgggaccattagttttatttaaattaagcaagttggttgtcggcaatggcattaactttattcacaccaattccttctttttattaatctttatttttggtacccaaattttaatctttgttggttcgaagcattggtttaaccatgaaaaccgatctttcttaaaaaccggcaggaccagttcattggtt

SEQ ID NO: 127325 - DNA, 438 bp, Arabidopsis thaliana columbia
cgcgtacgtaagcttggatcctctagagcggccgcccttttttttttttcttttttataaaaagaaaacacctaataaatgatcgtacacaccccaaggaggtaacagctctaaccacaaaggttcctttgatttttgcatattacaaaaccgcagaagagagagtaacatgcagcgcctctgaagaaagctcctcaggtatgaggtgttacaaacacaacattatctgaacgcaagaacatcttcccggttaatagtccgttaaagaatgggactcatataacccgggcttgacaacacaccggagatttccttatcattgcggataagggggtgggggaactgtaagaaaaggcgttgaacccatagaagccaactgaattcattatcctttattaaccgttcactgaaaacagcgctccttttcgctaaaccata

SEQ ID NO: 127326 - DNA, 466 bp, Arabidopsis thaliana columbia
ttcgttagcctggattcttttaaacgggcggcctttttttttttttttttttaaaaggcgaaggtaaccacggtgacctaaacttaagagttggagggaaaaaccatattgggttcaaaattaacaattgcctaatttttgccttaagaaaagccccccccagcggggccaacctttaaggtcccttttgcctctttacgtgggtgaggacttttctttggcaaggaaccctgcaccattaaacgctaatatgagtacaacggtcccaacttaagcccaaacgaaccccgaaacttaagctttaaagattgtacaaaacttttggcaaccatggttggttaatcggctcttagcgcctcaaatctctgaacgatcctcaccattggtggatccaaccagatcaagcctaataaggtttactttgctacgtttgcaacaaatttttccttataaagaacacactaag

SEQ ID NO: 127327 - DNA, 333 bp, Arabidopsis thaliana columbia
atagaagactttgacgtcgcatgcacgcgtacgtaagcttggatcctctagagcggtccgcctttttttttttttttttttttacttgccagtcttttttcacaacctaactttaggttaagaaaaaattaatcttataacattcattttcaacaattagtttattttttgccaatcaaatcacctactatttattaaaacccaaagaaaaaaaaaatttacctatatccggattattggtttactatgccaaatcaaatcacctattttaaaaacccaacggaataaaaaagccccacctatttatatacatcttacccaactagaggtttt

SEQ ID NO: 127328 - DNA, 496 bp, Arabidopsis thaliana columbia
  unsure (1)..(496): unsure at all n locations
gacgtcgcatgcacgcgtacgtaagcttggatcctctagagcggccgccctttttttttttttttttttttactagcgagtcttttttcacaacctaactctacgctaagaaaaaaatagtcttatagcattcattttcaacaatagttgcattattgccaaatcaaatcacctactatgtatgtaaaccaacagatgaaacaagatactgctatatctgtattatatggtcgactatgccaaagtcaacctcctattttaagaccaggcgagtgaaaaggccccacctatgtatatacatcttaccaaactagagcttttaagaaatgaaatcacctgtcataactaaggataatatctatgcattccgctcatacatatcttaacatttatacaatcttgggctactcacgaaatccagtntgcttgcatattggattccttactgtgcacaaacatcttactttcagttttctccaactccttccataactga

SEQ ID NO: 127329 - DNA, 490 bp, Arabidopsis thaliana columbia
cacgcgtacgtaagcttggatcctctagagccgtccgcctttttttttttttttcccagaaatgtattattgatagaaattaatagcataaagaaaccttacaagaaattaaataaaaagcaccacaaaatgtaataatcataagaataattattagttggtttaatttttgggattctccaagaaaaagttttttttcttttgctcgtccatgaatgccggaacggggaaagacctgccgattcccataggagtcttgaagtaaatcttcttgcttttttgcttcctcatactcatctccacgatcggtacccacaaaaacatctggttactcttcagtccttgtatttttctttatacaacacttgttgaaatagggggggaactttaaaaccgtacgaaacaaaacggttgggggtttcaaaaaaatgcttgaaaggagtgttttgtttattcaaacgtaaacccggggttttaatttttcacaatt

SEQ ID NO: 127330 - DNA, 254 bp, Arabidopsis thaliana columbia
gacgtcgcatgcacgcgtacgtaagcttggatcctctagagcggccgcccttttttttttttttttttttaaagcagcatcaatctgcattgaagcttgtgcacacgctgaagtaggaacggccgctacacacaaagcttttacactacagatgcatcatacgtaaatggagtttcgagagtactatgggcgatacagatgttacgtggtattgtcgaaagtgtgttatatagctgaataactgatgtcacact

SEQ ID NO: 127331 - DNA, 444 bp, Arabidopsis thaliana columbia
gacgtcgcatgcacgcgtacgtaagcttggatcctctagagcggcccgcctttttttttttttttattactacacacgactgaccggtgcctaaaggctccccaacattgtctgtagtgaacaatttcacatctagatgcaaatgtgtatagtcttgaatcctgggttcacatgaagctacaatcacttcactttcatcctactgatttagaagactatgcagagacttctgctgtgccgagtgagctttccttatgcatcagaccgtgatgctatgcttctcactatcatcaccgaacactgaccatgacgagcgcattaatcactcgtcctcccgagaccagactcttgatagctccatatccatggttggccacaccatgactagaggcatgatgctaatgtactactgcacattagaattttgcttgtataaccttcgaa

SEQ ID NO: 127332 - DNA, 351 bp, Arabidopsis thaliana columbia
  unsure (1)..(351): unsure at all n locations
actccgcgttggtggcgaccacgcggacgtttaccagatcaacacatcggttgccatcatccctttaaggaccttttaccacagagttctggaatgcatacattatctgcacgcgcacacaagagacatttgnattttctggcggggaaggcaaacagaggggggaccagaaacgccccgggaaaacaacgggaccagcacgagaaagcacgacgacggggcccaaagacccagacaaacaccgaaaccaaaaaaagggggaaaggcgaaacgaggccgggacagagaccgaccaacggaccggaaagccccaaccccgaaagggaggaaaagcacgaacgagccacagga

SEQ ID NO: 127333 - DNA, 486 bp, Arabidopsis thaliana columbia
ccgactcgaccacgcgtccgaagctacttacactgatatttgaataggcgctataagcgatgatactctaggtggtgatgaactgactaggtccatttatatatataaacgagctgaccgagggctcatcaggaaacaatacacttagccctggaggcttatctgagaactgaggaccctcacacagcggaaaccgcactttcttcttgcggtgaggagccagcacaagtagctgacaaacctgccagcgttccttctgcgatggctcaggagccagacacctatgctccggcacggggaaacgagtttgctgactcacccccggctgtctctggcgagaggaggtcagtttccagagaatccctggcgtgaccgagactgaggtgggcccaactcacggaggtgtgacaagccggcatatgaagatgtgtgtacgaacaccacgaaccaagcacaagatggcaggaaccaatatgagcccaaaga

SEQ ID NO: 127334 - DNA, 523 bp, Arabidopsis thaliana columbia
tggcacgcggtaccggtttcggattcccggttggacccacgctgtccgaaatccagttagaagcacttcaagggatatcaccgaaaaggcgccaggccgtgggtgaatacatgaatgatcttgtggaggccagaaacaccagttatcaaggaactcagcccgaaaaagagttgggttcacagtattcgctattcttgaagtactctaccgactagaaaaaacagagcaatttgggtatcctctaaaccactttgaacaaatacgaccttttaataatggggcagggacagaataactccttcggctccagaccgtacaccatttattcttataatcccaatcacatgatttttcacacaatttctctttactcttgggacgtggaggttgttaataccctcattatgaactggatccttacgaaaatgtaatttgcttttgaaaagtcaaaacggattattcgcttgggggctgtcaaaaaaaaaccaaaaaagaaagggccgggcgtttctggtgcatccat

SEQ ID NO: 127335 - DNA, 116 bp, Arabidopsis thaliana columbia
gtccctgagccgtcgattcggtcgccacgcgtcacttttgctgtatggctgaagaacaagctgtgatgatcctagtctgcgagactacactctcatggatctagtctgataacaga

SEQ ID NO: 127336 - DNA, 439 bp, Arabidopsis thaliana columbia
  unsure (1)..(439): unsure at all n locations
taccggttcggattcccgngtcgaccacgcgtccgatgctagatatgtcgtatgcatagaccgcatcatgacatgaccatccgttggagttccatgcggtgctattgatatctctcgatggactcaattgtcacgaccatcttactctcttgctcgtagacgaatctacacgcccaatgtatttctatatgatctccagcatgcatgctgacttacactcatctaggttggggcatgctctaaggtatatccaatatgacaacggtccgtggtactttcttcatgttgccgctaagtactgtggttccagttctataacatagatagatgacacgtgctagcttgcttaacgaatattgtcttagcatctatggagacgatcgtatgcgctcgtgacgcatatggacccgattacggatttggactgcgatactactaa

SEQ ID NO: 127337 - DNA, 504 bp, Arabidopsis thaliana columbia
  unsure (1)..(504): unsure at all n locations
gcctgcaggtaccggttcggaattcccgggtcgacnacgcgtccgagagcttctctgcgatggtacaaaacagatgagattgtgtggccatcatgnactctatcccaactgtcttctccttcgtgacttcagctacaaagacgatgattgctcattcaggctctggcatcagagcagttcatgataggctgattactgtcagctgtagcgcgtatcttggatcatagcatgccgccatgacctccatgccagctatctagagccagctgaaagtatactggatagaggcctttgagatttgaggcaggctgcgactctgtgacacacagctcacaccacgtatccttttacatcagactgctcgctactgcactcgtctattgtatgtatagtcactcaagagcatagcgcacttatgcgtgtcccgtgtagcaatcccgatagattaaagagacatgctatggtctcttgagagcagttgttatgtctgcacttcgtgagtgt

SEQ ID NO: 127338 - DNA, 418 bp, Arabidopsis thaliana columbia
  unsure (1)..(418): unsure at all n locations
cagagtaccaagccggcaaaccctacaagcaacaccagaagcacccaccggggcgccctaaaacgattcaacggcccggccgacgacaggggagagacgggcaaacccgcgcaaccccaaccggaacgggggggcagaaccacccccccccgacggggagcgttaaatacgaggggggccagccccaaccggccgcccaaccagacaccaagccggcaaggcccgggggaggggcccggnagcagcgacaaaaaaacagccaccgccggccgacccccgcggggagacgcacccccaaaaaggccccgagcacccgcccaggcccccagggccaacacccaccaagccacccccggcccaccccaagcacccccaaccggaggcgcacgaacccaacggacccccacccccccgaaag

SEQ ID NO: 127339 - DNA, 502 bp, Arabidopsis thaliana columbia
agtaccgggttcgaattccgggtcgaccacgcgtccgtatcttttcgttattggttgttgtatcctccacgattgccgtgggccttttgaaaaggggttggacccaaaaaaacctccgtccttggaatcaccagccgtggaaggatggccaaaagcctcgtccaaccagaaccttgcctaaaaaaaaaaaaggccaaaggctgttaggataaaaaagaattttcctgataggattccgggaatggtggaaaaggctgaaaaaagtgatttcccacccttcgccaaaaaaaagtccctagtcccggctgatctgactgtggaacagttggtgtatgtcattcgcaaaagaatcaaattgagtgcagaaaaggctatcttcatattcgtggacaatgttcttcctccaacaggtgcgctcatgtcttctgtgtacgaagagaaaaaggatgatgatgggttcctctatgtcacttacagcggagaaaacacatttggatttgga

SEQ ID NO: 127340 - DNA, 512 bp, Arabidopsis thaliana columbia
gcctgcaggtaccggtctcggaattcccgggtcgacccacgcgtccgacgggtgctatatgcgactgccctaacgagttgatgccagtgctgattgtgttgttctgagaccaggctggaggcaacctgtagcgacacgatttaggacgatgtcacgataggtcaacctgcttacgagcacgctcatcggccactgcacatctaaggcgcggcagattactcatcggtatatgggacgacatctcatgcaagcgcgcgttatactcgcggaactacttgctcacgtggaggatactattgatgcttacaagagacaacagctccgggagatgaccgtgatcaacggccgtgcttgagagcaacgatctgcactgtgtgttgacatctctcctgacagtaatctgaccgagctcagagctaacacagggggctaataccacgtctgagttcacagatgtgtgctatggctctctcatcttgaccagaaagtatatctgcaccgtaacagcttcc

SEQ ID NO: 127341 - DNA, 444 bp, Arabidopsis thaliana columbia
  unsure (1)..(444): unsure at all n locations
tcgacccacgcgtccgaaaggagctgagattttacggggacaggaagaccannaacataccagaaggtgaactcgaggatcctgatcgggacaaaccaggggactggaatagaggcaacactgattgctacttgatttcggataactggccatgcggatatgagtatagggacaaagccacgcaggttgnttattttccagctgaagagaaccaagaccgaggaggacgagacaagcagaaccaagagcaaggaggagcaagngcgcccccgaggacgcacaaggaacgcgaggagaaccgggcagaccggacaccaaagggaaggggccaggagggcccgccaaggaccagcaaacacgaaaaggggcgcgcgcaggcgaaaaagaccaagggcgaggaaccaaaacaggcaggccgcacaagggcgcacacggccagaggag

SEQ ID NO: 127342 - DNA, 470 bp, Arabidopsis thaliana columbia
cccacgcgtccggttaattgaggaaacatttgcccggattgtggaacccgcgatgcagaggatctccttgcaatctttggcgaggcacgctaagcagcacgcgtgtaatcaattggcctccattagtgataatcctcgagagcctgggctcggccaacatatcaaacagagccagaggcggaactacttcgtcgtttgagggtgagaacccgctgaggtgatcgaccacaaggagattggtatgtcttagactaacaggcacgaagatctgttccataaggttctacgttaaccctacacactccgagacacttctccaaaactgtaatatgcccgaaagaccatctaagtgccgaagccatacttggtccatgtgggagacacagaacgtgtctcattgtaagaaccatcgaagactaaacgaccccagagctacccatgggaacaaataaaaaccgggtttgacaaac

SEQ ID NO: 127343 - DNA, 510 bp, Arabidopsis thaliana columbia
  unsure (1)..(510): unsure at all n locations
caggacccgtttcggaatttcccggtccacccaagccttccaattttttcctaaattggattgcataaggattgttcctcatcttttcattggtctccgccagttcgatcgttttatatcctttttggtccctgaaacaaaaggccgatcacttgaagaaatacaagcactgctcacacctctgtgcaataatatcattttcctttttcttttggggtaaatgatcatatatataagtcgattgttgttatttggtgtgagtttgaatgtgatccgtgtgcgtatcaaattttggatgggaaatttgaaacagtaaaaatttgtatattcctcgtttgggaaaaatgtatgttttggttagttatatgcaaaaatgttgttgaagaagtttatacataaaaagttaaatacaaaaagatggtaagaaancctataaaaataaaactaaaaaggggcggccgctctagaggatccaagcttacgtacgcgtgcatgcgacgtcatagctct

SEQ ID NO: 127344 - DNA, 425 bp, Arabidopsis thaliana columbia
  unsure (1)..(425): unsure at all n locations
gaccacgcggcggaagagagaacgtacgggggggagcgcaccacgaagccccancgggggagcaccagcagacgggcacaacaccccacggacgaacccaaagcaggccccaaagagaagggaccaagcgcacacttgctgaaaggggggggaccaaccgaccagaacggaaggaaggacaaancaccggaaacagaggggcgagccgaaaaacaaaacgagaaggccccaggccacgccccagcaaggcgagacggacacncaaaacggggacaacaaacgaacaacaagcaaaaagccaaaggacacgggggccccaagggacccagaaaccggccacagngcaggcagcaccagaaacaaagcgaccccggggaaaccccgggaaaaacagcaaaaaccggcgcggaaaaacggagacaaac

SEQ ID NO: 127345 - DNA, 495 bp, Arabidopsis thaliana columbia
tccgggtcgaaccaagcgttccgggaatggacaaaacctattcttttttcgggcttaaacttaccttaaccaccgttttcttccgccgttagcaccttggggcttgcattacccataatcctggccacacttttaaggatggaaaagggggaaataaaaaaagtaaaatgcctggtaaaagtgatggggacgttagggacagtggttggatccatatggatgatattctacaaaggtcctttcattaatttcttccggtctaacctcacggccgccttttcgccgccgacggctgactatcttaaggctgccgtcttcctactcctcgcttccttctcatgggcgtcgttctttgttcttcaggctgcgactttgaagaaatactcagcccatctctcaatgtcaacaatggtgtgtttcatgggaacgttacagtctttagccctagccttcgtaatggaacacaatccttctgctttgaacatcggttttgaa

SEQ ID NO: 127346 - DNA, 515 bp, Arabidopsis thaliana columbia
tccgcctgcaggtaccggtccggaattcccgggtcgacccacgcgtccgcaaagtttcaccaaggacgggaggctactcgggaaattctatctcaatggaatcccacctcccccaataggaaccgatcagatggaggtcacatttgaggcggactccaacggtattcttaatgtgatagctgaggacaaggcgagaggtatatcgaagatgattactatcacaaacgatatgggtgagtctgagccaagatgacattgaccggatggctaaggaggtaaagaatttcgcaaaggaggacaataacgttaaggacaagatcgacgaccggactgccctggagacatacgtgtacaacatgaataaccatgtgaacgacgcggacattcttgcctacttatgggaaggacatgaagacgagaagatctgaccagcgactaaagaggctctggagaggctcgacgaaggccaatgctcacagaaagaagagtacgacgagaagctcaaggaggtagaa

SEQ ID NO: 127347 - DNA, 517 bp, Arabidopsis thaliana columbia
  unsure (1)..(517): unsure at all n locations
gcctgcaggtaccggtctcggaattcccgggtcgacccacgcgtccgctacttatcatcgatcgtctcgtggacgatgtgttcttcgatgtagagacatatgttccgttattggcgaagcaagcttctagccaatcgctcacggtggccacggaggtgcagagcacctgcgttggagacactaccaagagcattgcaagaagcgtccgggacaagtacgagccagctgctgagtattacgcagcgacgctgtggcgtatactgaatcaactgccgttgctccctgaagatgctcatatagtgatccccacggcgttctactggactgacgagtacagcgatgcggatcgttacgttgtcgacagagactactatggggcacagtatctacccatgattcctattgacgagatctctgctattntaggacaagatcagtgtcgagctgattgactatatactcttctgaagccaaagataccttcttctatagagtgtatatagctgatgtactgtgt

SEQ ID NO: 127348 - DNA, 508 bp, Arabidopsis thaliana columbia
gcctgcaggtaccggttcggaattcccggggtcgacccacgcgtccggatggtgcaaaggactacatgatggtttttgttgccgtcaactatacgctggtgtgttttagaccgatgctatacttctcaacggacctatgtgagttgctgccctcattcagtccatctaacggtgacacgctccgggagatgacaagggatacaaggggccataatctttgggttactgggtaccacaagggagagaagccggagccttccgtccagggaacggtccttactcccaaaggtcccagggatacttgaaatcgaatggatcggactaacaagatggggaatttctcgtacgtcagcttcaggggagtggggatggctatcaaagacgatctggtgaactgccacagggctcaggactactctcgagatatgttatgatgactgttctcacgaagagtttgcttacagggactacagagctgctcttacgtctgtacactgtagaccgaaac

SEQ ID NO: 127349 - DNA, 459 bp, Arabidopsis thaliana columbia
tcccgggtcgacccacgcgtccgcgattcttcccggagatcgggaagaaggaaaaatggctttctatggctcttcgataacggtttagcatggtaggaattaacagagggcaggtcaaagactccgctcgatgccaatgaaaagatccttttccacattgtggatttccctctttcttaaccaactctggtggttggccgatttgattataatgattccggaccaagaataattgtggctccttgcctaacaaaaaaaggattcccaggctgggggccaaggactgtagatacccttagaggggagggaaccgcttaaaaagtttagtgactttaggttctggcgcccactaagaatgcgactgctcaggcggatggtttagacttgcatctgcaccaacttatcagtcgggcgctcgtgcctctgatctacatgcctgatcatggctaatgagctctc

SEQ ID NO: 127350 - DNA, 490 bp, Arabidopsis thaliana columbia
  unsure (1)..(490): unsure at all n locations
ccacccacgcccncgcacaatctcagaatttgggagaagcaaaaggccgcacgagagccccagaagcggcccgccgcagcagtgacgaagagcgggaagggcaaagcctggctccaacccaacgaaagcaccgaccagcccatggccaaagcccagaaaaacaacaggaagccctgggaaggaaggagcttctctttaagaagcgcaccaagaanccacacacaggccacagcgcgcaaaaaagaaaaccgccaaaaaagagagcggcgccactcctggaaacgaggacgaggaagggaaccccgagaagccagggccgccacaaagggcaccgggcgaggcggaggaagcagcgcccaaacggcgacgagaggaagaaagacagagagaccaaaaagacggacaagcacaagacccaagacccggaacagggcgggcaaagggaacgagcncaaaaacaagcgaagcacgaggaaaagaagcacaagaa

SEQ ID NO: 127351 - DNA, 523 bp, Arabidopsis thaliana columbia
ggcgcctgcgggttccgtttccggaattcccgggtccaccacgcgtccggctaactcaactcaccaagaagtttacatgctaaagaggactcagtggcgctcctgcgatgactctccatgtgaggaaatacacctttggagcttagaaggcagtactactcgaatctaatgcctaattggacaatactcttcctggtggtgcgtaggatactaatattccatataatcccactcctctccatgctgatacttaacattaacatacttcattacttcaatgctataggcttgctcttgctgccttacttgcatgccctactcattctacctatggcccttctttgaccatgtacttgtccgccttcaacgctgctattatggcacactatttgagaagaacccctacattactcggatctcactgacttccatgctccctacgatctacgaccaacggctaattgagagctttgatctcacgaggtacagaacgattcccgtcgatatatctctaaacaaaata

SEQ ID NO: 127352 - DNA, 505 bp, Arabidopsis thaliana columbia
  unsure (1)..(505): unsure at all n locations
cctgcaggtaccggttccagnagttcccggtcgacccacgcgtccgcatagatttggctcatatttaatatgacactgtctattgatatgacaatagtcctcctcgacgactgacatgtcatacaagactagatagcatatttctgagtttttccggagatactctaataaccttctcaaatgatagcacacaatgccacatgactcaccgtagcagactgtactttagatgggaggtctaactcatgatactctgaccacagcgcctgagcatgacattccattgatgaatgggactaccacagttagcagctcatgctctactgaagagtctcacagtactgcgtgtatatacatgcacgacactgtgtacagaattgactaagcatgccaaaagatacgagcgaggctctactcttgtacaactaatctagactgctacatctgtgacaactatctgagtgagtctgataagatgcgtaaaacagtccaatgggtctccagc

SEQ ID NO: 127353 - DNA, 482 bp, Arabidopsis thaliana columbia
  unsure (1)..(482): unsure at all n locations
cgaccacgcgtccgcgaaagaacagacncatctatcatcggatccatcaagctagnacaagaacacccaacgcaatcagacgactaaccgatgatccgcaccgagacgtcgggaaactcttaggaatctggtcgcatcaccgcaacacggttctggtttacgagtacatggagagagggagcctgaggaaatttttttttaaggagggggaaacaaagaagatgagatgggggaacaggatcaacggtgtgaaatgggtggggtgagctcttgtgtattcgcttatagatcgggtccccgcgaagggtgagcgcgatctaaggagcgggaaaattcctctacgcgaggatatggactgaagatggctgaatttggcacctgcaaacttcttaaacccgaattctccaatgtggtgccccagtcggtggtacttacaggctttgctacgtccaaaactagcctttgcgaataaaggtgacaga

SEQ ID NO: 127354 - DNA, 477 bp, Arabidopsis thaliana columbia
gcctgcaggtaccggttcggaattcccgggtcgacccacgcgtccgcgtgatagcagactaccttagatagaacccgccagacacggctgactgtgccagaactgatagacctattctgagactggacattagctcgctgtggagtctcccgtttgtgcaagtaccacgattcaatgggtttcaacatcgtttacgttaccacatggggttatatcagactcatcggcgcttactacatatggaatactttcctctgtggatacctgcactacttgttattgagactgggtgcacttttgatctgtagaatttctggatggatatagatgacttgtcaaagctgccttatgatatgggctttatctctgggagcagatcatgctggtgcagatgatgcctaagacgcgtgccactgtttggaagagagatcttctgctttcacaccgatgctcttgctgacttctatggtaagaaaa

SEQ ID NO: 127355 - DNA, 468 bp, Arabidopsis thaliana columbia
gcagtaccggtttcggagtcccaggtcgacccacgcgtccgggaaaatgcaccatatattgagaagtactcggtgtgtaataattagctccaatcctcctctcctctggcataactgaataggtggaatccccatggccaagtattatacggcacggtcgggaattttctacaaaaaaacttggtgagcgactcataacgaaggcttggccaagggaggttttttgaatgggatcaaaaataatataatcgtttcatatgtgccagatcacgtagctgtcaccggacccgattcgtttgaattcgagtgatgcactgctgcgcgtcatactcgttatgagtatactgacgctgggggttagctatagacacgcgtatggatttgaatacgaagcttaggacaagcaggtattaaggatctgccgactgcctagcttccgcaagggtagaaaatgtcatgtttgcacac

SEQ ID NO: 127356 - DNA, 422 bp, Arabidopsis thaliana columbia
cctgcagtaccgtcgaattcggtcgaccagcgtcggaatgtcagtgtggaacaggctgaaattgttcacgccttctcaaaatactaaggggggtgtccatgccaagactgaccggcaagatctggaatgtcccacactaaaacgtggtcagaggtcaagatcgacagtgttgactagcggaagtattatgattgggatcaacaataatgattttgtctgatatgtgcttgatcttttagatgctacaggacgatgatcgaacgtatatatagaatgcactcctgggtcacgcactagatatttctctacttacgtgtgggatttgctatagacgagcgctatctttaagaagatcagcgcatgacaacgagctaagagcgtgctgcgagtgactagctttccggtggtgagcaaagtaagag

SEQ ID NO: 127357 - DNA, 287 bp, Arabidopsis thaliana columbia
acgtcgcacgcacgcgtacgtaagcttggatcctctagagcagtcagcctttttttttttttttattataacgaaatttataggtacaccgaacacaaaatatgcaaacattggtacaggagcatatgaaataccaaacaggaccctctgttataggagtatacaaacatagtaacagaaacgtcgtgattagccgttaccagtattttgtttatgcagaaggcatctccataagacaacagatcacgaaacggatcattgttttgaagatgctgatcaaacattag

SEQ ID NO: 127358 - DNA, 458 bp, Arabidopsis thaliana columbia
cttagaaacttgacgtgctgccgcgtcgtagctggatcttaagcggcgcctttttttttttttgaacatgggaccgacaaatgctcacttcgagtcttgcgtacatccgacctccttattgcataccaactggtacaacctcggatcactcgaaccgaacagcgtttatgcagagtccactgcataaaagaagagatcaccgatctcgtcattggtttgagctttaccaccaaacatcgccagtcctttcttaccatcaatggtacctgttgtggacgcagaccaccctttgatactgggagaggattcctgtttacctaccttatgcagcttctggcacttgaacgtctctgagtacaacgcataagatccaccagtcaattgacccggacctttgtgagctttggagcacattgtatgtaaacttgaaagaccaaaaagtgttgacgaacaaccga

SEQ ID NO: 127359 - DNA, 494 bp, Arabidopsis thaliana columbia
  unsure (1)..(494): unsure at all n locations
cgcgtacgtaagcttggatcctctagagcggtcgcccttttttttttttcctgttacaaacattgcatttgcggagactgagcaaatcaaagctaccaacttacaacaactcaagaagagttagtaaaacaagacaaatggaacaatgctttaagcatccgcttgaatcactttgctctttgtgctttgatacaaatgcctcatataaacatgtaacgcaanctgcacttggatatatagtacaatcactctgtccacttcttcagctctctatgaggaattcgaatgatgcagagaggcagtcggatccagtgattgcgatggttgtcacaaactcaaaccatggttcagctgctgatctagacttctggataggatgctcactctccatgtaacagagtcaaccataactgaactaccacatatgcatacaccacatccatgagatgttgacagaataactgacagaactggttgaacctaaccacagagga

SEQ ID NO: 127360 - DNA, 479 bp, Arabidopsis thaliana columbia
  unsure (1)..(479): unsure at all n locations
gcgccgtagctaggacctcagagcgttctgcctggttttatcccttgtaaaagaaggaccgggcaccgggggagaacaggcgaacaaaatgcaggaggactagcaactccatacacgacaccttcctatggcagcacccacaaggatacagaccctcaggatgaccggaccacccttttcttgaggggggggaaanacaaggaaggaggagaggaccacaccgaaccccagagaggaggggggcagcaaaccacccaaaagcccggccgaccaccaaagggaggcggggcgcgggacacaaaccaaccggaggaaccaaaggggcggccggcccaggacagaaacgaaagggaggcgggggccaccaccacggccagggaagggaaacggcaaaagcaccagccacaaaaaggaacccggacccccagaaaacgccgggggggcaacgcacagcgaagccccaaaacacagaaaagggc

SEQ ID NO: 127361 - DNA, 478 bp, Arabidopsis thaliana columbia
ctatagaaacttgacgtcgcatcgcacgcgtacgtaagcttggatcctctagagcggcgcccttttttttttttttatttatcgattatgtggccccgtgcacgaaatgcaacaactacaggatcattagctacggatagacctcttatgatcaacacacattttcaaacactatatcacgaaccaaattttgttatgcagaggcaactccataaaagaagagatcaccaaaccgatcattggtttgagctttgccacaaaacatcagcagtcgtttcttaccattaatggcacctggcgtggacgcagaccaacctctgatactcggagtatattgctctgaacctaacttatccagtttgttccacttgaacgactatgtatccaacgcataagttccaccactcattcgacccggaccttcatgagcttttgggtccatcagtgtctcacctccaaagaccaaaaggtgtttccc

SEQ ID NO: 127362 - DNA, 467 bp, Arabidopsis thaliana columbia
tatacaagactatgacgtcgcatcgccgcgtacgtaagcttggatcctctagagcggtcgcccttttttttttttttttttataagagaagcgattggcactcgggccaatgactatgcaaaccggcgttacagataatacgagctcaagaatgacgaccatcagctagagcatgacgctccgatatttacaaactgctcatgatgcctcaagacagtgcttttttaaagcataggcatcttcttaagagaataaatcgccctaccgtacatagcgttgagctgtgcctcaagatctacacactcacttgttactatgtatggtgactgccgcggactccgaccacgctttgatactcagagacgtactgtgtgaagataccataggcaacttctaccacttcaccaactgtgagttctaacgctaagacggatcacggacgtgtcccagaccttagtgaatttagc

SEQ ID NO: 127363 - DNA, 467 bp, Arabidopsis thaliana columbia
ccacgcgtacgtaagcttggatcctctagagcggtcgcccttttttttttttttttttataaaaatagttattgtggacactggcactgacaaagcatccgagctttagagctcaagtagacctacgaaggatgaacctcctctgtggaatgactctccgtagaaaacaactgccatggtgcatcaaaccactgcctcgattcaggcaagtgcatcttcgtctcagactatatacaatactcatcgaaacgatactgcggtgccttgagatgatcaacatcagattctttcaaaacatgtaccatgatgaggacgctgagcaccatctgctactctgagagaactgctggtcaagtacgctaggagaatatgaacacttgatagaatgagagctcaactctacagagttaccgctgatgtgtctctgacctttgtgagacttctgtggccttcgtattgtaccctta

SEQ ID NO: 127364 - DNA, 525 bp, Arabidopsis thaliana columbia
  unsure (1)..(525): unsure at all n locations
nnnnnnnnnnnnnnnnnnnnnnnnnnnnnnnnnnnnnnnnnnnnnnnnnnnnnnnnnnnnnnnncttttttttttttttttttttaaaaagaaatattgtggtccctgtatctgacagatcatccgcacatagagactagatcttgacctgcggtaagatgcaattcttctattggtatatacatatccgatagaccacaacctgcgcttatttaatcaccgccaatcttgttgtgacagtcaagtgcatcttccatcgccgacacatgtaccaattcttccttagtcggttcgccagcgtgctatcagtataacttagcagctttctctaataaacactgagctcgaaagtgggcgaactggctcagctgcatcggcctgatacctgcggtgcaaatcgcttaccgccaagtgatcacttcggtgtgtgtgaggtcaccccccgtgtctaccgcatgggatatctcggaccttagaaagaacgctgtcacttttgtattgaacaattctacgagaggaactgca

SEQ ID NO: 127365 - DNA, 500 bp, Arabidopsis thaliana columbia
acgcgtacgtaagcttggatcctctagagcggccgccctttttttttttttttttgttatagaagatgaatggggccccgggcaccaaccatgcatacaaccatacaggctcaaatagacctacgagggacagaccctcccttattgaatgacactcacatggatacagacactcatcatgactcgaagcagttattgtttatgcagaggcatctccatactagactagatcaccgaactcatgcgatgggcttgagctgtgctacgagacatgaaccagtccgatgcttaccataaatggtacgctgctgaggacgcagacccacctctgatactaggagactactgctgttcacctaccctatgcaaatatgcccactggatagtatgtgagtcgaacgcaaaagcgccaccagtcgagtgacccggaccttcgtgagctgtagggggcattgatagcgtacctgcaaagaccgaactgcgctgggcaaccaccgcac

SEQ ID NO: 127366 - DNA, 435 bp, Arabidopsis thaliana columbia
  unsure (1)..(435): unsure at all n locations
ccgaagcgggaccccagagcggcgccagggnggaaaccccaaaacaaaggagcaaaggaccagggaagacaagcacccaaggcgagacgaaagcgacccacaaggacgaaagcaccgagaaagacagccgcggaaacgaaagaccggagancaaaacccgtccccccaggaagagaggccgacggaaaccnacacaagacaaaccgaacgaacagggagccggagacgaccaacagagacgcaccaaacacagcgaccagcaggggggggccaccaagcacccaccggaagaaacgcgagccggacccccggacaagagaacacgagcagacgaaagcggccgcaacgaaaagcaggagccgaggccaaacacccggaaacacaaaggcccgggaaaggaggccaccagacgcaaagcaaggggacaaaagaaag

SEQ ID NO: 127367 - DNA, 513 bp, Arabidopsis thaliana columbia
tgcactatagaagagcttgacgtcgcatgcacgcgtacgtaagcttggatcctctagagcagccagccttttttttttttttttgttttactagttttatacacaacacctcgacagattggattttacagagggcacacgcccgatgataaaggctgacatggcagagccgccaggtgccataccgatgccgatgctgcttcccagaattgctctttccaacattacaacacgcaaaatgtctgtcttagagatcaacatacacaaccctaatcaggtttataagatagcagatcatattgcggacttaaacgtttattatgttgtaggaccgcatttatatcctggttacagaaggaaccaaagtttccgtaacgaggctgtattctttctctggggcacccctcaattttatcttgtaaggtttagacaattcagaacgtggcagttgggcacacttggttgaataatgatggattccgatgctgtcaacctatggctgtaaaaaaaggc

SEQ ID NO: 127368 - DNA, 468 bp, Arabidopsis thaliana columbia
  unsure (1)..(468): unsure at all n locations
acgcgtacgtaagctagagacctctagagcggtcgccctttttgttaaccttntgaaactacttttataacctctcgaccaagaaaatagtttctaacaggaggcttgcccaaggaaatgaactaccgggctgagccggcaaagagaatcacgaagctgactctgactaaaccccaatggcatgaacacccctccttaacagggagaaaccggccccacgaacacaagnaagaaccaacacccgcgccttcaaagcgcggatagcaatcctcactcatacgaaatcgaaaccatcactctgcaaagaatccttagacccttgccaagaccaacccttgccgttcctaaactactcctataaaagccaccggccccccttcgcctacccgctagcagcccccccgcacaaacagagaacccggacagcgagcccccccccggctcaaacaaaagcagggcccccccccg

SEQ ID NO: 127369 - DNA, 525 bp, Arabidopsis thaliana columbia
atagaagagctttgacgtcgcatgcacgcgtacgtaagcttggatcctctagagcggccgcccttttttttttttttttttttagagaacagattagatagcttgcaacacaagtcaaacatatacatatacatatacgagagattgacattgaaacgaatcatccaaagaagcttgggtcgtatccattgctggaagtagccaagatgtagtaagcaactatgtgtccaatagaaccccaagcaagaacatcaacaatgttgaatccaattggatcgttcgatttcaagagactgacgtactccttagcacgatcatctccagcttcgaaatgggtttttccgttctgctccggtaagccctgttttgctacgttctctctctggaagttgaagaagacgaaacgaccgaggaagagggagagacctgtgctgagacttatgacgatggaagggcttagctcagctctcacgacagtggaggaggattttctcccggtggttgatagtttgggtagggcggagg

SEQ ID NO: 127370 - DNA, 521 bp, Arabidopsis thaliana columbia
  unsure (1)..(521): unsure at all n locations
acccacgcgtacgataacaagcggctatgcgctacactgaggggatgaaacccgtcttcaccaccgttactctcctttgtatgggaaagttcctggaacctgtctggggttccacggagttccttaagttcatcctttgcggagaactaacttacgtatctctgtgtttaccgaacagccattgccggaccccgctccttagggggggagnnnacccaaagaagcccggagccggctcttatggagcctaggcaggccgctcgggagggttaaagtagataatacctcgaccaggagatattgctgttaaaaataaaaagcaaagcaggctccccctcaatgccggctatgtgtggccactatgccgcaaggctactcccacacctagattcaactagcaatatgttcccccccttagataatgcgggggcacaattatcggccctcggttgattccctttaagaacccgacacgaaggaagacccagtaaacaaaagccttcaaaggggagaaccaagaa

SEQ ID NO: 127371 - DNA, 456 bp, Arabidopsis thaliana columbia
tctacaagactatgacgtcgcacgcacgcgtacgtaagcttggatcctctagagcggtcgccctttttttttttttttgctacaaacatcttatttgccgagacagaaccaatcatagtttcaagcttacagcaattcaaatgagtaagctatcaagcaaagcgcacaagggctaagcattccttggatcactttctctttttcttcgataccaatcttttcataaacattaagcatactcctctgaataaatgtaaaagcctctgaccacttcttgagtctctctagagtgtctgaatgatgcagagaggtaggcgtatccattgaaagcgaccgttgtgacaaaaaacaactatgaatgaactgtagtcatatcctctagatcgccatgtgcatttgacatgaaacaaagtggccataactgatctcaagctgtgcatacagcacatccgggag

SEQ ID NO: 127372 - DNA, 478 bp, Arabidopsis thaliana columbia
cgcgtacgtaagcttggatcctctagagcggttcgcctttgtttttaaccctttttaaatttttttatttgtttcaacggggacaggtttttgtttttggttgtcttttttcacaaaaaaacaaggtttcaatttctcatggcagtccctaaaaatgggccacccaaattttcccattttaaatccaaaggttctctttaagaagtttggaacaccccttccgaggaacactcgatcagaaagttcacccaaaaggaaatgtgcggggaccaagacgacgctagacccagcgttaacaccgagcccgacgccgggagttccaaaaactttttgatacgccggccactaaatttccttaacttcctcggaaactccactaaaaaactggtttttcccttttttttcctccgccgtttttctttgctcaatgggtgcttttatcccggctcctagcgggaaaatctccactttcttatct

SEQ ID NO: 127373 - DNA, 530 bp, Arabidopsis thaliana columbia
cgcgtacgtaagcttggatcctctagagcggctcccctttcttttttattcctttttttttttaaacaaaaacaatctcattgaaatttgatgtctcgaaaagctttattttcgaagcaaacaaccatttgtaaaaagccaatgacaaaattcaaagggagagaagtggccagctattatattaggccccattcctctccataggtatttagcaaatgggtggcattcatcacaagcatgttttcttggggggaaatttctttcaagatttttcaaaagttagttgaaagccacaaggttcaccggaggaaccttctccatcttgttagtgcccttgaccctgaattgacatagaccaacacctttttgtttgaaactttaccattaagtccacccgtagatccctgggtccaattctttagttcccacaaagatattctttaccctgctccaaaggaacttcctagaagcgcttaattcatgttttttttcctcaacaagggggaaacccgaataacctggggtaacca

SEQ ID NO: 127374 - DNA, 441 bp, Arabidopsis thaliana columbia
cgcgtgcgttagcttggatcctctagagcggttgccctttttttttttttcttcttatggctttgagaccatggaatgtagagcccatggaattaagacatacaattaatacccaacacggttattagaggaaacagttgagaccaggactgagagcagagagttttgggttgaaagcgaacattcattcatttctctccttttagggggtagaggcattgagaggaaagagagttcgatgatggagagagagagatagagagggctttcgcgattttaattggttggcggctgggagaaggagatcctagaaaatgggtccgcactagagaaggctgggtggtagtgatacccatgcttggcgaagttctttcgttggtttcaaaatggggccagagattggttttttttccggtaatataaaaaacgttttgtgtttcc

SEQ ID NO: 127375 - DNA, 402 bp, Arabidopsis thaliana columbia
  unsure (1)..(402): unsure at all n locations
ccacaccaaagaaggagaaaaacaaagacaaagggagagaataaaagcnctaantcttgaggaaagatctacgccacggtttatacttaaatgcaattactatttgcaccaagcatagaactttttttccttggacggagacnnaagaaaaaaaaggacacgaacaaggaaggggcgccccacaagagaaaagaanagagccacggaaagcgccccagccgaaaacaccaacacccaaaggaccagccgcgagcgccggagaggaagcgcccaacgccncaaaaaggccccccgaacaacaggccaaaaaaacaagaaacgccagaaaaaacccgagcccaaccacgggaagggacggcccaaccccgaaaacccaagccgaacagaaaaaccaaccagacc

SEQ ID NO: 127376 - DNA, 517 bp, Arabidopsis thaliana columbia
  unsure (1)..(517): unsure at all n locations
nnnnnnnnnnnnnnnnnnnnnnnnnnnnnnnnnnnnnnnnnnnnnnnnnnnnnnnnnnnnnnnnnnnnnncttttttttttttttttgttaactacagaactagcctctagtacataaaaattgcttactaaaggtcgcccgtcaaggaaatgtactgcctttcgtgagctgttaaacagatttcacaacactgactctgtatcaacgccaattggcttttctctaatgacaaaccacaatcaactgtctccatgatcacttgttagaaccatctgcatactttttaaaatgcttattgctatatacacttatacgttatcttatcctgactctgaatcaatctttggtccttgcaggaaccaacctctccgaccctagtctgttcttttaagctgtagcccgtctatctgtactcctggatgctgcagcatattcacatcctgacgatgttgcaccactggtacaatcctgatggtgttaactggcggaattctatcttgcacatgcatcctgtga

SEQ ID NO: 127377 - DNA, 519 bp, Arabidopsis thaliana columbia
  unsure (1)..(519): unsure at all n locations
nnnnnnnnnnnnnnnnnnnnnnnnnnnnnnnnnnnnnnnnnnnnnnnnnnnnnnnnnnnnnnnnnnnnnnnnncttttttttttttttttttttttcttctatattaaaaatcttcttgacccactgtctttaaaattacacacgcgtcggagatgtataaactctagacggcaaaccgaggtcccatatccaagtccaggacatccatattctgtgtctggagaatcaaaatggcatgtgcaatggtcttcacacattccatatattaacacagggtttcgatgcatgagatcgagatccgctttgtggacaagcaaatattggatgacacaccattctgaatgctgcaacccgaagccctatcaaaacagatactctacaacatgcttctgtcatgatcacacagtcccactggtccttgcctttcttatttgaagcatcgagacattcaatgcctaggcacttcgctgatgccacatggtatcctgacatttgcatgcatggttcggggctaaggg

SEQ ID NO: 127378 - DNA, 499 bp, Arabidopsis thaliana columbia
  unsure (1)..(499): unsure at all n locations
cgcgcacgtaagctaggatcctctagagcggctcgcctgggggtaaaatcccgttacaaagaaaggatccgccacaaagtgggggatttagagcgccctccggagaccaccacacaaagaatgggggggcacacaactctctaggccaatgccctgaaacatcgacccgccagcaatagccgctataggaattggaaagactcccctccacatagaagagagggagaaaagggagaaggggagagaagannaagaaaccactagcccccggagcggggagggggcgccaggcgccccaagcnagacacccgcgcaccccagccaaaagccccaagccacggagggcggcgggccacccgaggcacggccgcgggaccaaaggggcgggggcaaagcgcgcccggcaccacggcgcgcacccccaaaaaaggaacaagagggccgcccgccaacagagccgaccaagagcaagcagcgccccgccaaaacccgcgagccg

SEQ ID NO: 127379 - DNA, 468 bp, Arabidopsis thaliana columbia
  unsure (1)..(468): unsure at all n locations
tatagnnagactttgacgtcgcatgcacgcgtacgtaagcttggatcctctagagcggccagcctttttttttttttttgagagtactacggtcttgtgcatatgaactgggtaaatgattgttatacaccgaagaaatatggacaaagaccatgacctgaagagaagtaccagacacattcacacaccatacattcatgctgctcgaccccaaagaagctactcttgttcttatcgctgtcatcaaagcactcaccttttccgtctagattaacggaagatgtgggcgctagctcggactaatgaattccgtcagctgtccctgtaaaatgcttgttttagtctagagagagcccccatcaatctttccaatttctcgtttacaatgctagattcccacttctgtctgtaaatatgccacctctgctgttgacaatggtggtcaagcatcacaagtcccattacagc

SEQ ID NO: 127380 - DNA, 504 bp, Arabidopsis thaliana columbia
  unsure (1)..(504): unsure at all n locations
acgtcgcatgcacgcgtacgtaagcttggatcctctagagcagccgccctttntttttttttttttttttttttttttttttttttttttttttttttttttttggagggggaaaatttgtggcatacgcgctttaaaaaaaatctatatttccctcttgtttcgaaaaaatctgccccagggggcccccagcggattttttttttaaaaatataaactctgggagagagatatattttttggaaaaaacccccctttttttttctggggttggggtctgagacccttgggggtgcccccttttttttttttttggacccgggagatttcccgaaaaaaaaactgatcaaaatgctccctctgggaacacggggtataaaaaaaaacccctttctttttgagggttttttttttaccccaaatatttttttgtaaagggtccccggcccccattttaaaccctttctaaaaggaaaacagggtttccccctttttttaaacaaa

SEQ ID NO: 127381 - DNA, 518 bp, Arabidopsis thaliana columbia
  unsure (1)..(518): unsure at all n locations
nnnnnnnnnnnnnnnnnnnnnnnnnnnnnnnnnnnnnnnnnnnnnnnnnnnnnnnnnnnnnnnnnnnnnnncttttttttttttttttgtctaaaaaattacatatccgttcctgcacgaaaatcctctgtacctggaggattgcacattggaacgtgctgctcctacgggcctacaataggtcatgcgtaaactccttatagctctgacgatgactcactctctcacgacttacatgcatgagatggatgacccatgggcacgagtgcataaccccaccttcatctcttaaatgaaggttgctaccctactttagtgccatggtacacacttgctctgcaactaattttataaatgctgcttgaacaaagacattgcgttgctccacggtccccaagaacgcttgcctcttcatccttccgactggatgctcttgctccttcggatcctgccgatgaggaacgattggcagaataaagatgccctccagtgaccaacttgcccttacacaaacagtc

SEQ ID NO: 127382 - DNA, 439 bp, Arabidopsis thaliana columbia
acgtcgcatgcacgcgtacgtaagcttggatcctctagagcagccgccctttttttttttttttaagagcaaccagtgaaatctccgatcacagacgaaccaaagctatatacaggcgagttgtccaatgaagttgtacacacaatcacaaaggtcattggaatatcccaagctgaatcgctgtacactcccgattccttgaaaccaatttaaatactcagataaccggttgccctggcctcaagatatactcagcaactgatctttaacactagttatagctatacgcattgacaagattggtagtggacaaccatgcaagacacttttgaagcctgtcggaagaagggttacatgggctatggatgcccctggaacgctggcggagagagcgtacaccaagcttattcgagatgatcgatagcttgataatattgga

SEQ ID NO: 127383 - DNA, 377 bp, Arabidopsis thaliana columbia
atagaagagctagacgtcgcaaccacgcgtacgtaagcttggatcctctagagcagcctgccttttttttttttttttgtataaccacttttatagccaacctggcagagattctagagtactatcaggcgggttagcccaatagagtcgtctacctttctcgagctgacaaaagtattcactgaagctgaatcagtatcaacgccatgttgattaccaaatatctctttacaagattctctggccagatgaacacaagtcagatcctacatccgcttattcaatttgcttatagctagtcgcagtgatacgagatctaaaccattactctgcaagtaatctttgagacttggaggaccaagctttcctgcctagat

SEQ ID NO: 127384 - DNA, 413 bp, Arabidopsis thaliana columbia
  unsure (1)..(413): unsure at all n locations
acgcgtacgtaagcttggatcctctagagcggttcgcctttttttttttttttatttcaaacatatcatattgagcaccggacacaaaacatgctaccaaacttccagagatcatatagtgtctctgaaacacgaccctggcttattgcatgacacacacatagtaacactctctcattatcaccgatacagttctgtttntatgcagagccaactccactatggaagagatcaccataccgagcacagttcttgagctctctcaccagacattaccagatccatattacgctgaaggatccactggcgtggacgcataccacacactgatactatgagtcatttgctgttcatataacttaggccagtatttccacttcaactgttcagactccaacataaatgatccacca

SEQ ID NO: 127385 - DNA, 206 bp, Arabidopsis thaliana columbia
cgcgtacgtaagctaggatcctctagagcagtctgcctttgtgtttaattccagtttaatacggagttataattctcgatgctggtcccatcagacaactagggttttttctccccaaatgtctcattgtatcccaccccgaaacccaccttctgtttaatagaagccgtggccccaaaaattcctgtagaagaaccaaaagaatc

SEQ ID NO: 127386 - DNA, 406 bp, Arabidopsis thaliana columbia
  unsure (1)..(406): unsure at all n locations
nnnnnnnnnnnnnnnnnnnnnnnnnnnnnnnnnnnnnnnnnnnnnnnnnnnnnnnnnnnnnnnnnnncttttttttttttttttgtttaactactttaatacaacaccgttagagaaaattgcatttaatgagcgtcgccagttcactgagccataactcccgctgtcgaactgcctaaggaggttaggaaacccaaattgacaaaacaattttttagctcgcttattgtggctccaattaggtctgaccgcttgatcacattggcgaagcagaaaccgttatttaaacatgcttactgcctgatgcataaccaagtcttctaaccaatctctgaaactggactctatggttcgtgcaggaacgagaaaacgcgtaccgaacaagtcttctagatgtatgaaacct

SEQ ID NO: 127387 - DNA, 368 bp, Arabidopsis thaliana columbia
acgcgtacgtaagcttggatcctctagagcggtcgcccttttttttttttcttgttacaaacatagcatttgcagagactgagaaaatcaaagctacaaactcaccacaatacaatagtgtttgtaaaacaagacaatgagatcactgtattaagcatctcctaggatcactctgctcattatcctctgataccaatcatcctataagcattaaccaaaccacactgagaagatgtaaaatcatctgcacactgtttggctctctatcaagacattaacagatgcatatacccctgtaggatccagtctcttgcgaccgcatgccaccatgtgaaactcatgattacattgctagttctacactttta

SEQ ID NO: 127388 - DNA, 492 bp, Arabidopsis thaliana columbia
  unsure (1)..(492): unsure at all n locations
cgtaagcttggatcctctagagcagctcgcctttgtgttttttccttgttaacaactttcatagcctggagcgcgagaaaattggttctacttggcggcaagtccaaggaagagactacctctcagagcagacaaggaatttacgaactcgcacatgttaaacgccaatgtcaataacattccctccttagaagagaaagccgaccccgagaacacaacggagaaccagaaacccgcttcttaaaaggggtnataggaatctgcacttcatacagtaggaaatccatgaatactgcctttaatctaatggggcttgcgggaaacaaaggtttccccaactttagaaactcctacaagaggtgcgttgcccctgttagaattcaccacctggatggccttagctcaaacaagcacaaaagcgaatggcgccccctcttgtccaaaaaaaaatgatactccccctagtagcattttgacccctcacccgccccc

SEQ ID NO: 127389 - DNA, 212 bp, Arabidopsis thaliana columbia
cgcgtcgtagctaggacctctagagcgttgcctggtgtttattcttagttactacttatatcctctcgccgagaaatggacttaaagggaggctcgtcaaagaaatagcctacctctctgctctgccaaggatctacgaaactgattctgtataaacagcaaggtcattaacaaccccttcctcagggggaaacggaccacaagaacacaag

SEQ ID NO: 127390 - DNA, 499 bp, Arabidopsis thaliana columbia
  unsure (1)..(499): unsure at all n locations
cgcgtacgtagcttggacctctagagaggttgccttggtttttaatttctagaaacaatatttattgaaatgacaacaagccaacaagtgataatgcagaggaaaaaagaacaatttaaagcggatgatacatatagattacataattggaaatgtaaggaaaggatcgctaaattaggggagacggttttnagaaaaggaaggngaaggaggagggacccccgggaagagatgagccggagggattccagggataagagggaccggatggatgccagggagttcaaagacccgagggagcggtaccaggaaagaaggtggggggtaggcgtactgaaggcagattcaccatagggacagtgggaagaaccagaagaggtggaacaagtcggacaggttgaaacccggggaaaaataagagccgagggacgaagaataaaccgaactgaagggaaagatggaagaataagaataagagaatgcgaacccatataatata

SEQ ID NO: 127391 - DNA, 163 bp, Arabidopsis thaliana columbia
cgcgtacgtaagcttggatcctctagagcggtctgccttcttttttttttcttggataactactttaatatccgctcgggcaagaaaattggtttctaaatagggtgggtttgtccaagggaattggcctaacctttcttgaggtgggcaaagggaattttcg

SEQ ID NO: 127392 - DNA, 517 bp, Arabidopsis thaliana columbia
  unsure (1)..(517): unsure at all n locations
cgcgtacgtaagcttggatcctctagagcggttgcccttttttttttttttcttgctaactacttttatatcctctcgtccaagaaaattgtttctaattggtggtttgtccaaagaaatgtactacctttctgagctgtcaaaggaatttacgaagctgattctgtataaacgccaatttcattaacaattcctcatctcaaagataactggccacatgaacacaagttagaaccaacatcagctttttaaaaatgcttatttgaatcttcaattatacgttatttaaaccatcaccttgcatttattttttgttccttgaaggaaccaatctttcccgtcctagtctctcctttagaagctcttgccccttttttctcttcttcctggatgcttaaaacaaatccagaaccttggcaatgcggggcacccctggcaagaattatttattgtccttaactgggnaggcttttgatccttccccaaagctttccggggaaagttttatggtattgta

SEQ ID NO: 127393 - DNA, 511 bp, Arabidopsis thaliana columbia
tagaagactatgacgtcgcatcgcacgcgtacgtaagcttggatcctctagagcggccgccctttttttttttttttggtataaacattttattagccgagattgcgcaaaacaaagtttcaaacttgcggcaagtccaatgtgtagtgctaacatactgatcgtgcaatggtttacacatacgcttgaatcagtatgctctgctctctttcataccaatctattacatacacattaaccatgctccactgaacacatgtaaaatcctccagcaccttcttgagctctctataaagaatttgaatgtaagagatatgtagacgattcctctgcttttgatgtttgtgacttactcaaaccatggttcacctgccgatctagtcctctagagcgctatctcctttttcatctcacaaagtatgctttaactgaaccagcacctgtgcatgcgccacctctggtagatgtttgctgaatttcagtcggaacttgttgaacttcaccacagagc

SEQ ID NO: 127394 - DNA, 178 bp, Arabidopsis thaliana columbia
  unsure (1)..(178): unsure at all n locations
tcgttgctaggtcctctagagcgttccccgggggggaancctgtgataactacttttatttcctctcgtgcaagaaaattgtttctaacttggcggtttgttcaaggaaatgtactacctttctgagctgtcaaaggaatttacgaagctgattctgtataaacgccaatttcacaaa

SEQ ID NO: 127395 - DNA, 531 bp, Arabidopsis thaliana columbia
  unsure (1)..(531): unsure at all n locations
acgattgcnnnnnnnnnnnnnnnnnnnnnnnnnnnnnnnnnnnnnnnnnnnnnnnnnnnnnnnnnnnnnnnnnnnnnnnnnnncttttttttttttttttgtataactacttttatatcctctcgtgcaagaaaataggttctaattcggtggttgagtccaaagaaatgtactacctttctgatctgtcaaaggattttacaaacctgattctgtctaatcgccatatttcgttaccaattattatatacagcatgaaacctgtccacatgaacacatgtaagaaccaacatcagcttcttgaaaatgcttattgcaatttccacttatacgttatctaaaccatcactctgcaattcatctttgctacttgcaggaaccaatctttacgttcctagtctctcctctagagctcttgcccctctttctctcctcctgtatgcttcaacagaatcagaacctggcaatgctgcacctctggtagaataatcatggacttcactggtgacatttgatattccacaaagcatc

SEQ ID NO: 127396 - DNA, 427 bp, Arabidopsis thaliana columbia
  unsure (1)..(427): unsure at all n locations
gacgtcgcatgcacgcgtacgtaagctaggatcctctagagcggtcagcctttttttttttttgttgaatcaagagtacatataccttgctactagcctctacaagcttttgacattgtcagactacacacaacagatttttgattcctagggtcacaagttatgataaaagagaaacanatactcatagctcgtattctgctgttgtatcctttcgtgttgtttgatcagagtatacaacagcgctgtctgagattcnctcttctagatctgctagcacctagtaggctagcaaacgatcttaatagccgcatcaacactagttttacattctgctgagatatagactgccttgatatactctgcgccctatcagctccctagttctcaccctgagcggatanatatgcacagcctccagtgctcg

SEQ ID NO: 127397 - DNA, 342 bp, Arabidopsis thaliana columbia
acgtcgcatgcacgcgtacgtaagcttggatcctctagagcagccagccttttttttttttttttgtttaaccacgtctttaaccaacgcgaggaaagaaaatgattcagagcggtgcgcacgccactgtagaagttcgacctgcccagagcaaggcactggatgactacacaaatcgcaatcagttacgatacatattccattgaccgtatttattaccgaattagctgacttaatgaccagatgtccaaaccatgatcccctgtttgaaattgcttatcgcattccgaccttagaatactctgaatagtcactgtgcttaacatctatgcaccgtgccat

SEQ ID NO: 127398 - DNA, 490 bp, Arabidopsis thaliana columbia
  unsure (1)..(490): unsure at all n locations
acgcgtacgtaagctaggatcctctagagcggccgccctttgtttttttttttggttttaaaagaaaatnaaacaggcgactaagcacagattgacgagtaaaaatggtacacaccgtcgaagaaaggaatcagtcacagtccagaacacccaaagaggagaataagaaaatccccaaggagataaccccagctagcagtatgctgagaatcctcttagcacaaaacgaaaaaatacccaccttagcagtatcaacccgggggagaatcaggattcccgcttaataaaggagcgaagatccaacctgggggcccaaaacaaaatctgccggagggcagaccgataccccggataaaaatctacgagagggggcctgtgaaagaaaagagaaccaccaacgcgatggacctccaaccactccggggggggaaaccccaatcggcggcaagaccgtaaggcgtctggaacaaacccaaaagtctgcaaaccg

SEQ ID NO: 127399 - DNA, 497 bp, Arabidopsis thaliana columbia
  unsure (1)..(497): unsure at all n locations
ctctagnagacttatgacgtcgcacgcacgcgtacgtaagctaggatcctctagagcggccgcccttttttttttttttttgtataacaacattaatatcctctcgcacgcgagaatggtttctaaatgtgtcgcacgtccaaggaagaagtcgacctttcagagccgccaaaggagattacgaaactcgaagctgtatccacaccanagtctctagcacctcatagacacggaaaanaactgactccaagaacacttgtgagaaccaacatcacgcttcttcaagatgcttatccgcactctccaccaaacacatcatcgaaaccatcactccgcaattaatcttatggtccttgctggaacaaagatacccgctcctaggacctcctctagagcgctggaacccatttctctaatcctggatgcgtcaaacattccagactctgccaatggcgccccattgcctaaaccttcatggtctccactatcggcattgc

SEQ ID NO: 127400 - DNA, 356 bp, Arabidopsis thaliana columbia
  unsure (1)..(356): unsure at all n locations
atgacgtcgaacgcacgcgtacgtaagcttggatcctctagagcggtcgcccttttttttttttttttagataactacgtttatatcctctcgtgcaagaaaatctgttctcattggtgcgctgtccaagaaatgtactaccttttctgagctgtcaaaggactttacngaaggctgattctgtataaaccgccaagttccttaacatcttaattaagacagaggaatctggcgccatgtactcaggtaagaacccacagcagcttgttcaaaatgcttattagcaatctccacttatacgttatctaaaccatcactctgcaattcatgtttgatccctagcaggaccaaacctt

SEQ ID NO: 127401 - DNA, 542 bp, Arabidopsis thaliana columbia
  unsure (1)..(542): unsure at all n locations
nnnnnnnnnnnnnnnnnnnnnnnnnnnnnnnnnnnnnnnnnnnnnnnnnnnnnnnnnnnnnnnnnnnnnnncttttttttttttttttctatagaaactgaaggttcgatgtagacgctaacgcaagctagcttctgtctacaacactagggaaacaggcaaaccattgcaaaaagagtcaagagataaacactttcatagggacacagaacatagtgtgttgagtaccaaaaagtgatgacacactaggctagttcctggtgtaatatctttaaaaagaccaactacttgttgaatacttgtccggtatgtaagaagatcagctatgcagaggttaccaattgtgagagcttcttgcatctgatacttaacgagcctgtctcttggatatttagaccaatagctctcgatgctcgattcctcctaactaaactgctaacccagctcaccaagttaggatttctctcatcaagagaataatcttcaatgggatctgtgcctgtgatgagttcaaacagaacaactccaatgcagtagacgtc

SEQ ID NO: 127402 - DNA, 489 bp, Arabidopsis thaliana columbia
atgacgtcgcatgcacgcgtacgtaagcttggatcctctagagcagccagccttttttttttttttttgaagatcaagctttagttctttttcaatatatatctaaagatgatgaacaaagcttgtaccgattctaatcttgggggccaatattagaccttggaaacaggctacttttaaaagtttctaacacttgttcagacaagtttataccccaaaagcttttttgtgttccataacattagcgaaaacaatttcccagacacactgaacatggtcaaatttgaaaggcgggggcgcttgaagagatttaacaggagaggcgccaacctgtttccgtatttccttttgggcccctgccccatgatgaaaaacccaagctgtcattctcgttgtcaaacgaaacaacccgtaagaaaggggaaaataaaccccccttttctctttcaaaaagggggcttcggcgaagacccagttttaagggggtta

SEQ ID NO: 127403 - DNA, 338 bp, Arabidopsis thaliana columbia
  unsure (1)..(338): unsure at all n locations
agcttgatatcgaattcgggggcggcgatcatattcccctgggtgattggttctttcacaaacgggaattaaatagacattagaattcaaatttaaagtcgaattaaattacacaagagagaaaaagagagattaatttcagtagttctgtggttggggagctggctcggtgtgggggtgttagatagaagaaaaacttctctttttttaggcgagggaggnccaccggcgaacaagaggggccggcgccagaagaccccaggaggggaggggccatggcacaggggcacccacccgggggggacagaaaaggccacagggagggaaggcacgggagg

SEQ ID NO: 127404 - DNA, 136 bp, Arabidopsis thaliana columbia
  unsure (1)..(136): unsure at all n locations
tgcctgcaagaacttcgcaggcccgcgcggtccgcggaaaatnctaagcccgtccagaaccatgccagatcaagaaacattcgccattaggccagtccaagatgaaagcccccagtcccgatgccttaaaggcggg

SEQ ID NO: 127405 - DNA, 490 bp, Arabidopsis thaliana columbia
ggggggggaagttccgccaaaaaaagaggggaccagagaacgaagagcccaaaggcgccacggcgcacaaggcggaacaacgcgacacacccagcggacgcgagcgagacaaagggggggaggggcaagaaaacagacgagaaaaaaaaaccctcttttaagggggtggggaaagggaaagccggcggacccccacaaacgcgggcaggcggcgcggggggggaggggcgaggacgcgcggagaagaacgcccaccagagagaggccagaccagcgggaggggcgcgcgagaggaagacgcaagagccacgcaagagcaccggcaaaaccggacaaaaaagaaacacacaacccggcccacggcacggagagcacgaagaaaggaaaacgagcggccaagagcagaaaggccacgcccggcgcgagcacgcgcaaaccggacaccgacagcgacgaggcggcagccggaagcgccgcgcgcagaggcggg

SEQ ID NO: 127406 - DNA, 500 bp, Arabidopsis thaliana columbia
acaacactggagctgcaccgcggtggcggccgctctagatctagtggatcccccgggctgcaggaattcgaggccgcgcttcggccaaaaagttccatcacatagtttaccagagagaccacaccatgtctccaaagcaactccagataaaattcatggatgtgagctgcacgaaggcgactggggcaaagtcggctctaccttcatctggaaatacgttcatgatggaaagttaacagtggggaagaataagatcgaggcggtggatccggaaaagaacctgatcacgttcaaggttttagaaggtgatctgatgaatgagtacaagagcttcgcatttacactccaagtgacccctaagcaaggggagtcagggagtattgcgcactggcacctggagtatgagataattagcgaggaggtagctcatcccgaaacccttctccaattctgtgtcgagatcttcaaagagatcgacgaacattttttggccgaggaat

SEQ ID NO: 127407 - DNA, 224 bp, Arabidopsis thaliana columbia
cggatggacgatatgagaaccccgaaagattctgggaagagtcttacgctccattcgactccataacgaaccgagagacaggttcactgccgacccacggtcgaaagactccctgtggcccgacgagggccgatagacccttgtggaagagagctttgggagagtgacgaggaacgaaagcagaagcgacttcaggagccgaagaaggaacgaggcattgtggt

SEQ ID NO: 127408 - DNA, 480 bp, Arabidopsis thaliana columbia
cgagctgcaccgcggaggcggccgctctctactaggggagccacactctgcaagaattcgcggccgctctcgatgcgccaatgtataaaactcattccacaaatagatctctccatctgcacaggagactggaagctacaacaaaaaagagcttgtattctctctgtggaagaaaccaccaacatctcctctttggagagttatgacaaacgagaagaccagagaggctttcttatttcgcgaacgctccaaggccatcccccgacatagtaatgcgccccccgaggctcaatgtaccgcttctgagccgaggaagaagaggagccgtcgctccagctgagaggacgaagaagggagtggacgacgctacccataagatgtatagagcttcacacaccaaaaccgggctgcaccacaccctaaatcgagttccaacgagagagacgcagttgaaccacagagcagcctgtcgcacaacat

SEQ ID NO: 127409 - DNA, 512 bp, Arabidopsis thaliana columbia
gccccccctcgatgtcgacggtatcgataagcttgatatcgaattcgcggccgccagaactcaaactcacgaaaaagaactgaaaggagaagctacacatcacatgaaacttctcatatgagacatgatgataataacaataagtctccacttctttcactcagctctagactgaccagctcgagatgagaggatgataccaacaatgagaccatacagtgcaagcgcttgcgcaaagatgagaatcagaatcattcccacaaacagcttcggttgttgcgcattcgctctaacaccagcatcaccgacgattccaatagccataccagcagagagaccagcaagaccacaagctagcccagaagagagatgagcatagccatcgaataggtaataagacttggccttggggttaatcccagtactgatgataacagcgatgatcaaaccataaatacctaacacaccagccatgacaacaggaacaatcgatttcataacaagttcaggtc

SEQ ID NO: 127410 - DNA, 508 bp, Arabidopsis thaliana columbia
  unsure (1)..(508): unsure at all n locations
nnnnnnnnnnnnnnnnnnnnnnnnnnnnnnnnnnnnnnnnnnnnnnnnnnnnnnnnnnnnnnnnnnnnnnnnnnnnnnnnnnnnnnnnnncggccgcgcctttcttcggattcctcggcgccgccgctgcgctcgttttctcctgtatgggagcagcgtacgggacggcgaagagtggagttggagttgcgtcgatgggagtgatgagacctgaacttgttatgaaatcgattgttcctgttgtcatggctggtgtgttaggtatttatggtttgatcatcgctgttatcatcagtactgggattaaccccaaggccaagtcttattacctattcgatggctatgctcatctctcttctgggctagcttgtggtcttgctggtctctctgctggtatggctattggaatcgtcggtgatgctggtgttagagcgaatgcgcaacaaccgaagctgtttgtgggaatgattctgattctcatctttgcggaagcgcttgcactgtatgg

SEQ ID NO: 127411 - DNA, 450 bp, Arabidopsis thaliana columbia
gaggaggccgccccttacagaggagcacagccagcaagaaaaagggccgccaacaagagcgcacaacaacacaccgaagaaagagccgcgcacaagcacacaaagacggacaggagcggaggaccaaacaagccgccgacacaccgaagacaccaacacaacaaaacaaaccctactcgagggggggaaaaagggagaagccacgaagaaaaacaaaacgcgggcccaggaggaggggagacagcgggcacaggaccgaccccccggcgaggaaccgggagcagcagaacccgccaacaaacaaaggaaagcggcgaacagacccggccccgcggagctcaaaggcaggacagcaaacaaccccgcggcagaaaacagccaccaccacaaagggccgaacaaacccacagcagcccagcgaaagacgacaaccagaatgacaacacgcca

SEQ ID NO: 127412 - DNA, 414 bp, Arabidopsis thaliana columbia
  unsure (1)..(414): unsure at all n locations
tatcacataatggaaacgcgccgatgaaaaaagacaggaaattcgaaatgagtaccagcctacgcacatatctatctaatattaactgatgagacatatcacatcacagaaacaggagggacctctttcatgggcgttgtcggnaanaacgaggacggcgtcgcaaaaagagagcaggcactggattgtgacaggaagtacggccctgtatgacgccagaaccccagcggcacgggcaagggtaggacccggaccaacggctttaccgagcaaaggagagcaccggcagcctagcagacagacggacggtgcactggcccagtctcaaaggtcagcaacccccgctgcggcccccttggggaagccgagccccccagtcccggacgcaaagccccccgtcaggtagccggtacc

SEQ ID NO: 127413 - DNA, 379 bp, Arabidopsis thaliana columbia
aggcgctgcaccgaggaggcggacgctcactacagaggagcacagcccgcaggaaacgcggccgcggcagacggagacaggaccacggagaaacagaggagaccaaaggaccgaccgtcagcgagagccctactcgggccaggcaacaacatgagaacgatgggcggagggagacccctccccctaaaagggggggcagaaagggaaaaaacccggggcaggcaacaaagagcaagcatgcgccgggagggaaccacagcaagcaggagcccccggccgcagaagacgatgcgggcaggaccgcgcagagagaccgtgaagccccggagcccgggctccgggcgggtcaccgcaagcacggcaaacggacacaggcgag

SEQ ID NO: 127414 - DNA, 426 bp, Arabidopsis thaliana columbia
aaaaaaaaaagaacgacaggggcaagggaacagaagaaaacaaagacaaaccaggccaagagagaaacaaaccggcacgcgagagaaaaaaacggggacggagggcgaacaggaccgaggaccgagaaaagaaaacccccttctccggagggtgggggaaagaacagggggggggaaacgccaaaaaaaacgcccagcacaaaagaggaggagagaacagagacaaaaaggaaaacgggaacgaaacacgaagacacacacgaaagaccaagaaaaaaagacaaagcaaacgagcaaccaaaaggaacggggcgccaaagaaaacagcccgaacccaaagagaaaaagaggacccacacgaagagagcagaccgccagacagagccacaaaccaacaaaagaaacgccaaggggcgccgccgacca

SEQ ID NO: 127415 - DNA, 444 bp, Arabidopsis thaliana columbia
  unsure (1)..(444): unsure at all n locations
gcccgcggcgagaaacgggcccccgaaaaggaccgccgagaggagcgcacgggccccccccccagggaacccgccacccgccgaggaagagccaggcccaaagagagggaccttcttactaaaagggggggagggacaacaaagagggaccagggggaaagaaacaaaaacaaggagggagggggggcggcgagacgagacacccacccaccggaaaacgccaaagaaaacgacgaaaaggaaggccccccagaccagaagcgggccgccccaacagggggccagacgacaggaaggcacccgcccagacagccaaaaaagaacccacggagaggccggcccccaccacgagcacagggacgaggccccgggcgaggagcaggggcagcggagccgaagagcccanaagaggccaaggggcgggagcggaaagcgcccccaggc

SEQ ID NO: 127416 - DNA, 559 bp, Arabidopsis thaliana columbia
  unsure (1)..(559): unsure at all n locations
tggagctgcaccgggggggcgggcgctctagaactaggggatgccccgggcctgaagaattcgcggccggcttcataaaattctaacgtaaaaaacaatcatatctgtgagatggtttttagagaaaggaaccaaagttccaaaagacacatttcgttctcaaatcaaaaggaactatggaaaccctaaataaggatcttttttgtaaccaaggaaagggcctnngaaaggaaagaccaggaaccaagagccaccaccaaccggaacccaccaggctccaacgaaccaaacccctgggccctagctcccacccagctacaacaccccggaagcccagggctgggaaattcaagcagggtggctccaagccctttgacaaccataccttttcaaccttggattaaggaaccttcaccgggatttccatcgtctggccacccaaacctttcctgtttttccatcaaccacggaaaaggggcccacgggggacagggcacccaccaaccttcaaaaaggtcgaccaagaaggctcctggtgcttcttcaaaggagcagggac

SEQ ID NO: 127417 - DNA, 536 bp, Arabidopsis thaliana columbia
tggagctcaccggggaggcggacgctctatttcagaggatccccaggctgcaagatacgcgggcgcacacaaagagacaaccaaaagggcagcagcgaactcccaaggacaacctccggttcccatctcaagaagaggcaccctaggggaagaacggcacagggttctgctggtagagaaaacgataactttttttcaagggcggaaagcggggcagaacccgcaagagcaaagggaacacatagggcgagggataaccaagaggcgaacaggaccagaaagaggccagcacgaaccgggagccaagggaaaggcgacgcaagcacgcaggagaacaaaggggccagcggagaccaacagaaccgggcaaacgaagccaagaaaggggcaacaaggcgcgaaggagccgggcgaccaacgggggggaagcggaagccaagggcgcactctcgagaagcaccgagaagcaaccactgggacggccggaaacaaacgggaggaaaggggggagcaaataaaggcgaggcaaactaaag

SEQ ID NO: 127418 - DNA, 171 bp, Arabidopsis thaliana columbia
gggggggggggcgctctattctagggggtgccccggcctgcaagaattcggggcccggaaaaaaccactaggtttaacaaaacacttggtaagaagggggctggtttgaaaatggtaccgggtctttaaagaaccctttgaaaggttcccaaaaccgaaccataccaagaa

SEQ ID NO: 127419 - DNA, 445 bp, Arabidopsis thaliana columbia
  unsure (1)..(445): unsure at all n locations
agctagatatcgaatncgcggccgcctctttcttatccatgaatactaactaccagatgataaataaatgacaggagagggaatacaaagagatacatgaggctttcgacgaaaagaacaaagagaaagcacaccttgtttcaatcttaatggaggtaaatcaattggagcctatcccagctctgaatctttttttttttgagggggggggagagccgggaaggcggaacgcaacctatgttgttctttcttggcaagttactagagttaaaaaatatttttttgttactctagggatttttgggggcaactcccctaatggagaatatacaaggaaattctttttgaaattcatatttgtgaatgaaagactgtcttttcttcacggagatatgtgcagctgaatttcttatctccctacccgagcgatttgctttgttcaaat

SEQ ID NO: 127420 - DNA, 469 bp, Arabidopsis thaliana columbia
  unsure (1)..(469): unsure at all n locations
gagctgcaccgaggaggcggacgctctctactagaggaggccaagccctgcaagaacacgaggccgccggcgatcgctggaggttagaccccgaagaggatccgatagccaagaggtctgctgtgcctcaagtgagcaaccctccagaacacaaagagtcagagagagaggaggacaaggaaaggccccctctaggagggagganaggcgacnagcaacagaaaaggggaaacatctggtcatgaagggagcgcccgcaaatccccgaggaggcagaaaccaagaggttgcagaatccggaccaagactaagtgagggagatgcagccgtggaacgaggccccgatgaccaaaggggccgcgaaagcccttcgacaccaaaggaaacagccccctccgaaaccttacaaccaaagaaccccgcccccgaccgcgaaaataacagcaactgacacccaaaaggtcaccac

SEQ ID NO: 127421 - DNA, 512 bp, Arabidopsis thaliana columbia
  unsure (1)..(512): unsure at all n locations
cccctagncttgtgagangtaacanaagcttgatatcgaattcgcggccgccattactccaaggaagaggagtacgctttctctgtttctctacaaaattatacaccctcaggggggtctgagtcttatgcagcagcaacctgctatttcagttcaagcttttgcctaggaagctgctcgtccatcctttacaggatatgaaatgatgaagggtgtcttctttttgttcaagaacaaaatgcacgccgatggtgatctcctacggaaggaaaaggacaccccttgaacaagagacccaactagccgtatatcagttagcaactggaatgaagatccattatgcagagggcagacatgttcttagaatttcaacgcattaaacatgacatcgatactgagactcatgaccttccagatgctcgtgcatacttggtgaaaatgcaaganattcgcaccaggagggggcttactgatgagcttggggctgaagccctgatgtttctaggcttaga

SEQ ID NO: 127422 - DNA, 463 bp, Arabidopsis thaliana columbia
  unsure (1)..(463): unsure at all n locations
acaggaaaccaaagacccgagaaaagaccaagaaaaaggcnncaaaaaaaacacagggaaggcaggagggagcccacncggaagagcngaacccaaaganaaaggaaaaacnccgaaacggcgggggagtattttttttggggggagcgcgccangcaagagcccggccgtacaggtataaaccactctcgcatttgtagagagcagaccttcctttttcaaaggggaagctgtggtctggacttaccttcagggagtgcaccgggccgacttcccaagggtaattagcttgaagcttggaacttgaagagaccggcctccatggggctttcacaaaatatgtagggatctatttctcattatccttaaagtgcaccaatggggagcttataacacttactggaagccacaattggaatttaccctgaagggacctgcttgggcttgacgaaaaggttgatga

SEQ ID NO: 127423 - DNA, 266 bp, Arabidopsis thaliana columbia
  unsure (1)..(266): unsure at all n locations
ccggggaaaaccgacgccaaaaaactggaacaacaccggcagggggctgctcaccggaagaaggaggagaaggggaccggagaaaacgcgaaacgaagggcnccggaaggaagggggcgcagaagacaacaggcacgggacgacgaaggggacaaaccgaagacgggcctgaagaagagaccgggaaggggacaagcaaccaaccgggaggcaaagagggccccccaggggaaaccaagggggggcgcaggaagggaaaggaccaa

SEQ ID NO: 127424 - DNA, 292 bp, Arabidopsis thaliana columbia
gcaaatgtctgggggagctctcctttgtgtttcataagattggtacctatgtaagattggtatttcggggttttgacaattaactggcgtggaagatgatagtctctccacaatcgctccgggaggggtcagagcgggtggatgggggagacttgtgcgagggggtctgaaacactgggagaggagtcaaacttggaggcttacgtgggggtgggaggcgaactaggaagtatctaggggttgtgacaaggaaagaaagtttttaaggacgttaactatttaaagggttgga

SEQ ID NO: 127425 - DNA, 510 bp, Arabidopsis thaliana columbia
cccccctaggcttcgacggtatcactaagcttgatatcgaattcgcgggcgcttggtttttattaattgttttcccgagtacacaaacattggcattggcacatatcaaagtattacaccccaatgaaaacagaaaaaccagaagaaatatagtgcatagttttaccagccaagttggcaattttttgacatacataataacacaaccattttagaattgtttttattatgaaagggttttttttggggggcaaaaacttaaacgttggctggacttctgaaagatccaagtggcttggaacctggaacccttaagacaattgggtgttaaatgcgactttcgcagctcaatgaatggtgccacccaagatattcaggggtcctcccatggcttggttctggtattaaatacaggagcttcgaaacttcttaccgggttgatgcccggttccgtgatccggattgggggccaatggtccattaaccccggaaacccaattgggaagggcg

SEQ ID NO: 127426 - DNA, 489 bp, Arabidopsis thaliana columbia
  unsure (1)..(489): unsure at all n locations
tggagctgcaccgaggtggcggccgctctattctagtggatcccccagtcctgcaagaattcgcggccgcgaacattcgttctcgtctacacagtcttctccgctactgatcccaaacgtaacgctagagactcccacgttccggttttggcgccacttccgattgggtttgcggagggtatggnacatccgtttcctatngcgatcaccggaaccggcatcaacccggctaggagtttcggagctgccgnaatctataacaagagcaagccatgggatgaccactggatattctgggtgggaccattcattggagctgcgatagctgcattttatcaccaaattgtcctaaaggcttcaagttccaagtcacttggatccttcagaagtgcagccaacgtttgagtttttgccacacaaaaaaacctattcatattacaacaattacaaaatggttgtgttattatgtatgtacaaaaattggcaact

SEQ ID NO: 127427 - DNA, 424 bp, Arabidopsis thaliana columbia
agcttgatatcgaattcgcggccgctctgaattgacagtggaagacaacgctcgcctgagctagtcaacgaaacgccagccacggagtgacagcaaaaaagcgagcctcaaccaatggtcaccgagctcgaacggaaaactttaccacggagcaccggagcactcgccgtcgtatatcacaaccgagagactactgtccttttttctatgagaggaggagcggacctgctaatgaccgttcccagatgaagtctgatccagacgaaggaaccggcgccgagaaccagcaggaggctcaagggggtaaatctcagtaagaatagcaaggccgcgaaggcatcaacacattgaacctacaactgggaatcacgattttgtgtatggttgaaggccaagacatggaacaccaaaggtccagggctac

SEQ ID NO: 127428 - DNA, 516 bp, Arabidopsis thaliana columbia
aggagctgcaccgcggaggcgggcgctctcttctagaggagccaacgcgctgcaagaatacgcggccgccttcagagaggaagaacattctaatatccacagagatgggaccagactgtacaggtagcatcacgatagttacgactcaaggagattgataggcacgagtgcaccggcacagacgaaccatcctttcctacaggggggttggagaaaaaaagggtgattcagcggaataaatgagcgagccacgagcgagatggtgcggaatttatgctaggagcgcggagggggaggaacagcgaatcgataagagagaacagatagggaggcggaagaagaggtgccgacggcctctcctgccgaagggagaagagtccgccggataagatccacgggctggcaaagaggacaggacattcggagggaaaggtctcgcctgggagaacggggaaccacaagctgaaacgcgggtcttgaacctaagacgcccgggaagcggcgcggtcctcggac

SEQ ID NO: 127429 - DNA, 556 bp, Arabidopsis thaliana columbia
  unsure (1)..(556): unsure at all n locations
caaccactaggnaggaaggcacttttaccaacaatgcgngcgaatcaagttgttaaacccggatgaatgtccgatggttccccttaaacccaaagtgcaggacccgtgtttaataaaatgtagcttcttcgtttgttcgttaaccaggtggaccagtaggattaatggcgggaggatttctttccttttgaaatgagttgaagaaagccggaaggcgaggaaccctaacgagctttaaaaggtcctaaaggccgttgaaaaccacgagggccatttgacggtgtggctaagaaagggataatcgttgtatttgacttacggcgggtccgttacttcccctcgttggagataatactctataaagcccgagaacttttgaccttacagtgttaaaagaagccttcatgctaggtgggctggatgaaagtgctcttcttattggtttataaaggtgaagtaagtgggacaagaacgggacttcttcggacgactaatgctgggcttttttagtacaataggaggaacctcgggatgcgaagtagctattagtttttaa

SEQ ID NO: 127430 - DNA, 370 bp, Arabidopsis thaliana columbia
  unsure (1)..(370): unsure at all n locations
aaaggacaaccccagaacaggggagagccgccccacgaacaacgggcccacaaaaaaacaaaaaccaaaccaaaagacgacccaaaggcagnnggaaaacgcttatttgaggggggggggnggaagnggggagagggaacggcgaaaaaaaaagcgcagcaggggggcaaaagggaagcggcagaaaaagaaaaacgggaccaggaggaagcgaggcgcaaccaggccaaagacgaagagaaaagccagcagcaagcgaaacgggcccgccgcggggaagcagaccggagaaacaacgggccgcccggcccccggcagaacaccagagaagccgggccagccccggggagggcgcccgggaggacaaaga

SEQ ID NO: 127431 - DNA, 599 bp, Arabidopsis thaliana columbia
gggccggtttgtcctttgccggggaggtgaatcctttctggcctggaagctttgctcctcggatgttgcagcctccccttattgcgcttggaaccctgcagaggagtttcaatagcgattttttgtgaagctgcggtctacccgggccttttatagctcaacaaatcacccttcacccgaggtcttccctcccttctgggaggctttttaggggccacccccttaataaccgaaccggtataaattcatggcctgctccccatctttttcaaccgccattatctaaagccctccttctaaataattcactgaccaactcttgtctctacttttcccactccacatctattttcactctatattagatagcgtcacgtgatctagagcctttactctgatagttccaacaatctttgaacctacccgggccgcgaatccgccatccatggtcgaccggacctaacccaacacgcaaggtagcatgcgatccatcctaccctttcccatacgggtttccgcgtgcgtagaaaacccttagacccaggctgatggtctgtggtgtgcccatcttgttgcacgccccacctattatgatttaa

SEQ ID NO: 127432 - DNA, 496 bp, Arabidopsis thaliana columbia
gcttgattcgaattccggccgaagagttttgctctaaactgaaagacatatgcagtattgcatggatcatcctgatgagattagcaagcttgctaaggtgaaggcgcaagtgtcagaagttagggtgtaatgatggcaaacattgagaaagttcttgaccgtggtgagaaattgagcttttggttgtcttttccgaaatcttcgctcacaggcacaagatttcagaacatcagggacgcagatgagaagaaagatgtggcttcagaacatgaagataaaactcatagtgctcgccatcattatccgactgattctcatcattcgtgctctcagtttagccatgagttaaagtgttaaccccaaaaaaattcaaaccttctgaaattccttctaccttcgtacatcggaggtgccttctcttttattggtcaatctttaatctaatgttctagttggaataggttttgttagatagactttatgtatgctactaatt

SEQ ID NO: 127433 - DNA, 466 bp, Arabidopsis thaliana columbia
  unsure (1)..(466): unsure at all n locations
tggagctgcaccagggaggcggccgctctatatctagaggatccccagggctgcaagaattcgcgggcgccagatctcttgtcaagtactgactggttcgcaagggatcaatgttatcagatgcagcaatatagcaatgatagctacatattgcatcaacaaacaataagcaaactttttgaaacgacanaaagagaggcactacgangacccagagagaagaactaagaactcaggaaccccagggctaacacttaaaccatgggcaactgagagcccaagatgaaaaccagggcaatatggagggcaacactttgaagtttatctcaaggtccgaaagcacttttttctcttattagagttcctgaggtctaaaatcttgtgcctgggagcgaaaatttcggtttgtccaccaaaagtcaattttctaacaccggcaaaaaccttgttaaagttttcaacattt

SEQ ID NO: 127434 - DNA, 532 bp, Arabidopsis thaliana columbia
  unsure (1)..(532): unsure at all n locations
nnnnnnnnnnnnnnnnnnnnnnnnnnnnnnnnnnnnnnnnnnnnnnnnnnnnnnnnnnnnnnnnnnnnnnnnnnnnnnnnnnnnnnnnnncggccgcgcgagacacaatttcatatattttcttttctttttcccaaagagaaaccctttttttttttacaagcaaaagccacacaatcataaaaactttaatttcttcggaaataaacaaagaaaataattaaaaagttacgaaaccatctcaaccttaatcttgcgacacgtgtccgtaatacaataacataatgaacggctgagatccaccgagacaatcgaaattttctcagggtaaagatagaaatcggtcaacggctccgattcatattttctgaagcttcgccgcaataaccaacggattagctttcgcgatctcttcacgtcccgccgatttgaaatcaaacgtacaaccatgaacctccggatacctatgactcccacaaaaagtcgtcccacaccgacacataaacccggttaacccgacccgtttcctact

SEQ ID NO: 127435 - DNA, 161 bp, Arabidopsis thaliana columbia
tagaaggggacgcaatgccttaacagcagcttaccaatgaggttaagctcttcaaccgtaggagctttgatagacgttttcggttacagattattaagtctttgtggactacatttggtggtgcagccatacgaagcccgcaacttaaggatggccatgac

SEQ ID NO: 127436 - DNA, 495 bp, Arabidopsis thaliana columbia
tggagctgcaccgcggtggcggccgctctactctagaggatgccccagtctgcaggaattcgcggccgcatgcaagattacagaaattatttagacccaacaaggcccaaagagatttcctacataagaagaatctggaatttggctctatctgacaacacgttgcgtcaataggaagaagacctatactcctcctatgagaagccgaaaaggaacccgcttcctttcttgttttttcttgcaccgtttgcggggaagaagggatcacatccgttaaccatccgcataggttcttttgatttttcgtcggtctaaaatattcgaacttccatttaacccacaggttacggcattgatataatgcaagggttcattttctttgtttattcttaaacttcaatctctgtaaattttccggcagttgcgatcttaaaaattagtggcttggtttattagcatttggaaatggagattgcgttggctttttttcaccaa

SEQ ID NO: 127437 - DNA, 516 bp, Arabidopsis thaliana columbia
cccccctggcctgtgaggatatcactaagcttgatatcgaattcgcggccgctgtaattcctcaagagactgaaactagctttgatgagaattaacagcgagtgttcacggtctttcgaatcacactactctcaaactagaacagggactatatcatccgtgagctactcttgctctacgaccctcattagcactctccaagctggaaacacatggacctggacagaattgtttctaacgtgaagtggagccagagacttcctggaccacgttagacagatgcgagacctacgcccatgcagaaagtgatacgatgtgatcaaagacactgtgcaagacggcttagcagtcgctgtgcaacacatgacgaagaaactgtctatgtgtatcctgccgttactttcgacacaacaaagttgccctgcagaagccacctggaaactcgagacggtgtaccaacgtgctcccgaacaatactgcctgaagtccttattaccataaagaattgcaacctat

SEQ ID NO: 127438 - DNA, 496 bp, Arabidopsis thaliana columbia
ctggagctgcaccgcggtggcggccgctctattactagtggatccaccgcgctgcaagaattcgcggccgcatgactcaaaacaccatcacacgacgaacgacataacatcacaccattcacgaccaaagagactacacattgctctaaggacactcagacgtacccgaatatgtttactatacaaccgctcctcctttgagacggtgataaagacactatggtccaccctgtttgaccttgccagtgtgtagcggcgaggagcttactcgtatgtgtcgctagaaacccgcgaggactactgagaccactagctgcagcattgagcagcagaacgtaatgcaaggcctggacagccctgacataggtttcctccctgctaccacattgctgacgatcacaagagcacgagtaagcccaactagcccataacggatctgggcaggacttatattacatgcactcggaagcactaagcagagtgtgcaacatgaaca

SEQ ID NO: 127439 - DNA, 437 bp, Arabidopsis thaliana columbia
agcctggtattgaattcgcgggcgcggagaaacccttcaagagccggaagagcgaaaaccctgttttcggtgacccccttggccaacacattcaaaatggcggtggtcaccaaaggcaacctgacctctaccggttcattaagaggtgggacctcccctttgatgggaaggaaggggtggtccaaggggagttttttgttggtggtggggattaaaccttggccaaaagaagaccgggtgggccccggaaggaaccttctaaaggatttgattttatttacaaatttaatccccaaatcggagattagcggcgtttggaaattccttttaattgggaagagccgcaccgttgcctttcccaacccaggcggttcctggaatttgtcaaggcaaagggtggtggccttggaaggccacgtaaccaaggctaacccaca

SEQ ID NO: 127440 - DNA, 439 bp, Arabidopsis thaliana columbia
  unsure (1)..(439): unsure at all n locations
acggcgagcaacgggggaggaaaagagagccaagggggaaccngaaaagggaggcagacgcaanaaaagttaagtacagtataaatggaaagttgaaagggaagataggacaaacatggggacaaacttttctttggggggtgcgaagaaaggagaaagagaaggggaagagggaaagaaaaaacaggaaaacggggggcggacccggacgcaacagagaaggcaagagggaaacaaaaaggggaagagaaaggagaaaagggggaggaccaaggaccaagagcggacaacagaggggcagacggggaaaagaggaagaccaggaaacgaagagacgggagacaaagaagaagaaaaggaacacacagccgacggggcagagccaaaacgacccgaaggagcggaagaagggcgacagggagacggcggcaaggggaaa

SEQ ID NO: 127441 - DNA, 528 bp, Arabidopsis thaliana columbia
  unsure (1)..(528): unsure at all n locations
cccccctcgnacttcgacggtatcgataagcttgatatcgaattcgcggccgcaatagaaagagattttgggtctttcgaagagtttttggaaaggttcaagtcggctgcagcttcgaattttggttcgggttggacatggcttgcatattaggcgaatagacttgacgttgcaaatgccggtaatcctcttccaaaagaagaagaccagaaacttggtattgtgaagacccccaatgcagtaaatccgctcgtatgggattattcttcacttctcaccattgatacctgggaacacgcttactatttggattttgaaaacccaagagctggattccttaattccttcctggaaaagcctgtgtgctgggaaactggaagcaccaaggtggaattcggaattgcttcagccgtgccaagagaacaagaagggaccgagacgggagatgaagaaaattccgttggtgaagttcccgaaggtcttttagataaggacctccatgggtccggaggtgacctaaaccccggc

SEQ ID NO: 127442 - DNA, 394 bp, Arabidopsis thaliana columbia
  unsure (1)..(394): unsure at all n locations
nnnnnnnnnnnnnnnnnnnnnnnnnnnnnnnnnnnnnnnnnnnnnnnnnnnnnnnnnnnnnnnnnnnnnnnnnnnnnnnnnnnnnnnnncggccgcgttttaatcaaccttagatacctcgatgtcacctatctaaataaacctttggtacttcatcatctggattctcttcatcttctggctctagtccttcttagatctctttgcactagctcaactcttgcagattccaaccctgggcttacaagttcccatgacacaagccttttcattaatgtatttatgtattcaacttttcggttcttaaaattcaaataattaaccgtgcttccaagtattaatggtgaaaagtggaagattattccattccaaccgatttaccggattgggcgtt

SEQ ID NO: 127443 - DNA, 526 bp, Arabidopsis thaliana columbia
ttgggtaccgggccccccctacgagtcgacggtatcgataagcttgatatcgaattcgcggccgccgggactcgtctttgtcacattccctttctttgttttccaaaaagatgataaaccctttcaatttttttatttcaaattgaacttcgtacttgttttctctatattgatttctattgtttatttaaggttctttagaaactctttttgtaaagaatcgaagttttttatgatacttcatcagatgattgtacaaggaaagtaaactactaggttttagaaaggaaagccgggaaaaagaatcataaagaacttttttttttattggatcgggaatctcattatgtattcggtgtggataaaagatcttcctatgttatactattaaattcttgacgatgaatcgattttatagctccgatattgttattcatgatatttctttcattcgatatcatcgcaatctaattcatctgagtaagtttacaagcgaaagatttctcatctctatgggattaaatcc

SEQ ID NO: 127444 - DNA, 558 bp, Arabidopsis thaliana columbia
  unsure (1)..(558): unsure at all n locations
ctgcaccggggaggcgggcggctcactctagggggaccccaagcctgcaaggaaacgcggcccgccaaacacggaggcgagaaaccaaacaacgaccgcgagcgaacaagagacaagacggatcgcatgaccaacaaacggcccccactagaaaaaggaccgggacaatggaaagggaggacagggcaaaacaaaccctcctttctttgaagggggggagnggaagagacaganaaacaagcaaggggaaaccaaaccagtcaaccagcccaccactgggggcgaggggcagaaacagccccaagggaggaagcacgccaggaggccgaaccccgggatgtgcggtaacggaagaaaaagcacctccgcgacggcgccaagggaaaagcccaacgcagcacacgggcaagcggtagagaccccgggaaccacacgagaccagagccaaaaaaaccagaaggcgacacggcaaaagccgagcagagaaacgcccaagggggaggccccgggcccagagccccaaagggccagaaaccccccgtaggcagacccacccgg

SEQ ID NO: 127445 - DNA, 518 bp, Arabidopsis thaliana columbia
cccccctcgccgttcgcggtatcgataagcttgatatcggattcgcgggccggccagaagatgggacagagactgtctcacaccttggagaatggttaccaatcttattacttttttcaagacggggaaatttaaaaggagaaaaaaaaaggaaccccttttggagaaaacacttaaccgaatttggcaagaaaccattatgggaattattaactgggggaaccgtttcttcagaagaaatcaaacctaagattattacctttggtcaaatcttacacttgaagatgcgggtggtggcacaataggaattagattcaaaggtttaagaaccaccgggttaagaattttcgggggactggcacattggaccaaaagccaatttacttctttaaagaaagggtggtggtttatttttggtggttcacgcctattagcttattcatggtgggggttccttaccagccaacttcctaataaattccttagtgggaaggttaccaccggagaatcaagggatt

SEQ ID NO: 127446 - DNA, 307 bp, Arabidopsis thaliana columbia
  unsure (1)..(307): unsure at all n locations
agcccgatatcgaatacgaggacgccaatccctccgagaggcgcgacagttctaccaacgtctncatttagctcagaacgcagcgactcatagaaggagactaatgctgctgtcgcagcaaaataaagactcatccgtggtagaggcaaccagtgttcaaccgatgcattcacgactattcaggcattctttccttctaggnagggcaacgccaacgaaggaggacaaacagaccccacagaagcgaacggccagccaaggaggaaaacacagcgcggggcacacaccacccgaaaagaaaaaaggg

SEQ ID NO: 127447 - DNA, 508 bp, Arabidopsis thaliana columbia
  unsure (1)..(508): unsure at all n locations
gggtggcggtcgctctattactagaggcgcccctcctgcaagattagcgggccgtatagacctcgtgataacctggtggcagcctcagggaccctggtggggaaggaccttgcatggccattactaggcttcatctaccttctacgaacaggcataacaactcttaaaaaagcctcctccctttagagaagaaaaaagaagaaggcatcaaccggaactttatttgttcttgggagatcaaataccatttgaattttgcaaacagaggaaccgaatttggcagttcgtggccaaggacagaaccataaacctganaattggtgactaataaccggcttaactaaatgggaaccaacccatggtgatcattactcgctgcttgatgtgaataaaaaaaaaagaactgcgcgacagtgtaatcacccaaacccggcacctattaccgggccgggtggataacctaattgattccaagaaatttttggacccccttcttaactttgaggta

SEQ ID NO: 127448 - DNA, 531 bp, Arabidopsis thaliana columbia
cgcgccccccctcgaggtcgacggtatcgataagcttgatatcgaattcgcggccgcggagaaacactacaagagctggaagagcgagaaccatgtcttcgctgacgccattggccaccacatccaaaatgtcgttgttcacgaaggcgaacatgactctcacgggtctatcaggagttgggactacacatatgatggaaagaaggagatgttcaaagagaagagagagatagatgatgagaataaaacattgacgaaaagaggactggatggtcacgtgatggagcatctcaaagtatttgatatcatctacgaatttattcccaaatctgaggatagctgcgtctgcaaaatcactatgatatgggagaagcgcaacgatgactttcccgaaccaagcggctacatgaaattcgtcaagcaaatggttgttgacattgaaggccacgtcaacaaagcttaaccacaaccatcaccgtcatcactatctcgatcgatattgtattattatgagtgtcttttcgataatca

SEQ ID NO: 127449 - DNA, 487 bp, Arabidopsis thaliana columbia
  unsure (1)..(487): unsure at all n locations
agacccacgcgtnncgaaagaacaaatgcattggtcttttactggaatgacaatttttgctattatctggctaggaaacttcccctgagtggctaggtgaactagcctttcatataatagattaggtgaaaaaccatcttgacaacaattatttccaagaggttacggatgaaggagatacttcggagatagaggaagcggccgacggaaggctttcctgctttaagggggggtgccccagaccactttataggctgggtctactattatgaatgatgataaggcaccaaggtaaccctggaatctggccgagctacctagacttcctggaaagaaagaatatgttcaaaggaataatatccgagtttacatgagtataatacctgcttttcaagagctaggcggctataacagtttgaccgcagaattaaaggttgcagacttgttgcaggtctctctaaatattaattaagtacaatagaataac

SEQ ID NO: 127450 - DNA, 473 bp, Arabidopsis thaliana columbia
  unsure (1)..(473): unsure at all n locations
agcctgcaggtaccggggcggaantacaggcttcgaccgaggcgtccaattccacaaatacatggactgcactggaatgacagtgtcgggaattcttaggctgggaaaacttccctgactacctggagaacaggcttcataaaatagatagggaaaaccatctgacaacaatgtcccagagggcccagaaaattcttttttggagaggaagaggactatgagaagacctggaagaagttgtgtaccctggcaattgttggggtgggattatcatgcgaagagggagagttaggaaggtattatgggaaccgacaagtagacgagactcccgccagaagagagaatcccagagacacagtcaaaatatatggctacaaaacgcccttataagacaggggtcgccaaacgaatggcaggagaacacctggaaatccctagaataagcattaaatgcggctgcgtaccggggagtc

SEQ ID NO: 127451 - DNA, 537 bp, Arabidopsis thaliana columbia
  unsure (1)..(537): unsure at all n locations
cccctagcctttgagggtatagcataagctagatnnatcgaattcgcgagcccgctagtaaattgttggagtgaagctggatagatacatgatttctgcaagaatactaccagtgatccacgattaatacgatgccacacgacacttaaacaacatccgagaatattacacctagcgactacgttctcacgcagctggtattagttcagatctgtgaaaagctaaccggaaaagaattgtctattacaaagattggctgacaagacttcctctgcctcgttgcacaaatggagattccacaccaagcagggataggacatctgtatcacatgttctatgaaggacgtctcactgatcacgaaggcggagaagacgacgaagctttagccggtatccttgcgtcaagtacaaacgcatggatgattacttaaggatgttcctctgatttaacgcaaccttatctatactaaatacacatatcagaattatgatggtgtatattcacttcttggactagtctatatgcaaatgcgggcg

SEQ ID NO: 127452 - DNA, 474 bp, Arabidopsis thaliana columbia
tggagctgcaccgcggtggcggacgctctattactagtggatgccccgggctgcaagaattcgcggcccgatttagctatatagcagaacatgactgaatctaatacatcaaacttttcatgtgtgtatatagtatagataagaccaggtcaaatcagaggaaccctctttagttatcatccctgcgttttctcctctacggcagagataagactagaagcttcttcgtcttctccgatgtatctgatcaaagagacatacttcataaactatgatgtagaagaggtcttatactgcttggtgtggaattcccatttggccaatgaccgcgaggaagtctggtgcaccagtaataggattctccacttgttctgcagggtagctatctccagaactgaactaaattcaactgcccgagaacgttgtcgggagggctaatgatcacggcttgtgctaatgcccaaagatcgttta

SEQ ID NO: 127453 - DNA, 324 bp, Arabidopsis thaliana columbia
  unsure (1)..(324): unsure at all n locations
gaaccacgcgtgcgttncgaggcaggagagacttctgcgacgaagaaagtgtcacgatgaaaagcccatggcgactggacacgagacggaagagctttgaaactgaacttgagggaaggaggctggatgatcttgacttccctgaaagtccttttggacctaaagaagctcctgctattgtgaagaaccaccattttttttgaagggggggcagacacggaggcgaaacgcaagacgagcaccagatacggacggcccagccaggagaaaagaaaggccatccgaacgcccgggcgagcaccacaacgacgcgaagcgagaagg

SEQ ID NO: 127454 - DNA, 462 bp, Arabidopsis thaliana columbia
  unsure (1)..(462): unsure at all n locations
agcccgcaggtaccggngcggaagacccgggctcaaccaggcgggcaaagcgagacagaagagacggccgcgaccaagaaagaggaggaagcaaagcccanagcgacaggacaccagaaggaagagccggcagccgaacgcgaaggaaggaggccggaagacacagaccacccagaaagccacgagagaattctgtcagcgggggcgaaagagaagacccacgacgacaagcaaaaagagggctgccccggcggagaacgcgaggacaaccacaacggagaccgggcctggcaggaaaaaggaaagtcccgcagacgcccagctcgcccccaaaaccacagaccgggaagaagccggccccggtcgccccccaaacggccacagcaaccaaagacaacaacccaacccccactgcccgcccccccccccccccaacagacccgtgcgcagagcacagcgccc

SEQ ID NO: 127455 - DNA, 508 bp, Arabidopsis thaliana columbia
  unsure (1)..(508): unsure at all n locations
cccccctagcttgcgagggtatacataagcttgatatcgaattcgcggccgcaagagcccataaaagaacgcagacaacaaacatcttaagtttattaagtttccacaacaaacttagaaacacactcctttacatggcatctccaccacaaagaaatatgcaatgaaacgtccacgatttattatccccaaactttggtaaaaatgtctgaaaaaaagtttctttcacgattggaggacgggttcgaagctcacttgttccaccaatgcaagaaatccttgcgcctgttgattttcttctgaagctggagtagtccatagagcaaagcctcagcggttggtgggcaccccgggacgtatatgtcgactgggacaattctgtcacatcctcgaaccaccgagtaggagtagtgatagtatccacctncattggcacaacttcccattgaaatcacccaccttggctcaggcatctggtcataaaccttgcgaagagccggagccatct

SEQ ID NO: 127456 - DNA, 467 bp, Arabidopsis thaliana columbia
aagcctgatatcgaattcgcgggcggcgaattttcttgattggggattacccccagcctggtgactttgccaagaaaggccaccagggggccattaagattggtggttccaatgccgaaaaaccaaagatggttggaaggcacctttgcctgggagaagaacctatgagtcacatatcgaggagaaccattccctcccttaaatcttaccacccggatgaattatcggtggaagaatggaaacttagtaggaaaccggaaaaccttctcaagattcaggaagaaaatcaaatggcttccttggaacctggaacccttttaacttccttggtatgcccgggctgggttgattccaaaccaattaattccgtcttccggctcttaccgaagaacccttcccgaagaattggaagaaaaaccagaaaaaagttttcgtttttgggttaatttccttccttttttaggcct

SEQ ID NO: 127457 - DNA, 423 bp, Arabidopsis thaliana columbia
  unsure (1)..(423): unsure at all n locations
tcacgggggggggggcgctcttttaccaaggggaagcccccgcgctggaagaatttgggggccgccaaaaaaggctttttaagacgatgtgggggattttttaagaaccaaaggtttttttttccctggcatttggccagatgaagggttaaggacccattattcaagaatttttaaggaggtctctctaaaagaggaaggaaaanaacccaaaaccaaaacccctttctggtttctctttaaaacgtagtggggaaggcttttccgttaaaggaagaaaaacaaaccatttggtccggattggaccaaaacacggattaccaaggctgggaaaagggttccaggctcaaaagagaaccttggaactcccaacggattctggagaaggtctttaattttaactacaaggttcaatgtttccaa

SEQ ID NO: 127458 - DNA, 255 bp, Arabidopsis thaliana columbia
tggagctgcaccgcggtggggggcgctctttactagaggaggccaagcccggaagaaacgcagtcgggacggaaaagacagtgctcaatacaacagacaactgatcgaacacataccagatagagttctgacataacggggaacactcatttagggtacaaacccagtccaacatggggcttaggggagagttttctctttcaagggatggtgaaaacaaacccaagaaggatacaccattttttttttgaaacc

SEQ ID NO: 127459 - DNA, 480 bp, Arabidopsis thaliana columbia
  unsure (1)..(480): unsure at all n locations
gcttgatatcgaattcgcggccgcatgaagcttacaacgttatccagagctcacactttcgcaagcactggcagaattatgtcaagacttggtttaaccagcctgcccggaagaccaggagacctgttgctagacagaagaaggctgtgaagatcttccctggaccacctctagtccctctcgacctttttttcctgagaggctctnnaagacaacatggaaagttagagcctggaataaggatcactctttgaagagccttacgggttgcttggttttccaaaagaaagttggctgcgaccattcaggaatttctggtggatcacccgccgcaaggacccggtcttttgggaggggtccttcagtccaatggccccaagagttaaagaactaacaaggctaaagttggttggaggtcccttcgccgtctcccgtcaagcaaaggttagggatttctacttccagaggaggcctggccat

SEQ ID NO: 127460 - DNA, 475 bp, Arabidopsis thaliana columbia
  unsure (1)..(475): unsure at all n locations
tctatttctagaggaggcccaatgctgcatgaattcgcggtcgccagaaacctttgagatctatgtatggataacccgaccaaaaagaaaacagagtcgtgcacaaaatcaaaaaccagaagaacaagaattcaagaatgattaagctctataaagcaacgaatttttttttggggggtgcgaacagagccgggggagccccgcngggctcttggaccagaatgacgtgcgtttgtgcgctccaaacatttttatcgtaggccttgaacctttcaatgttgagtcagcttaactagctctattagtagcttgacactggcaattgggttgtaatcaccttggactttgataacgatggccaagcttcttttggagtagaaaaaaccagccttggacttgacgggaacggggaagggaacaccgccaacttatccttggaagttttaaacctttggacatttgactggagaccctc

SEQ ID NO: 127461 - DNA, 504 bp, Arabidopsis thaliana columbia
  unsure (1)..(504): unsure at all n locations
cccctaggctcngaaaggttaccaagcttgatatcgattcgcggccgcgggctatatacttatcttgacatgccagcatccatgagtatggaaagaaggggtcttttaaaggcatntaggagctgagcttgtattaacagatcctgctaaaggcatgactggagcaggtcagaaagctgaagagatcttgaaaacactcctgatgcatacatgccctaacagtttgacaaccctgcanatccaaagattcattacgagactactggtcctgagatcttggatgatacaaagggcaaggtggatatctttgttgcaagaattggaactggaggaaccttcactgggggtgggccgaattattaaagaagaaaaatcccaaaacgcaggttattgggggtagaacccaccgaaagcgatatactttttggtggcaaaccgggacctacaagaatcaaggaattggaacttggtttatacctaaaatttggaccagaaaatatggat

SEQ ID NO: 127462 - DNA, 519 bp, Arabidopsis thaliana columbia
ctggagcttcaccggggtggggggcggtctaatttaatggatcccccaggctgcaagaattggcgggccgatagactagtggtggatattcaaaataaaacttcaaccacattcacttatggcctaatgattaaaataaaatgcttaacacttcaaccggaattatgggaagaagacctttgcaaaattttctcattttgcagatggtaaaaccctaaggttgattttcttccactttttccggatagaccggaaccagggggggtcattgaatatttttcccggaacctgggaaaaccaccagctttaattttttcaacgtttttaaaggttttttaccccaccttggttggcacgcaccagcttgcaccttcaaaataatttaccaacccttcaacgccttccttaaaaaccaattagctttgggggtctctttagctccccaaccttgaaattggttttaacttaaacccataaattctcggatcccaatttcttaaggttaaaacccccatctcc

SEQ ID NO: 127463 - DNA, 474 bp, Arabidopsis thaliana columbia
gtatcgaattcgcgggcgccttaactttccctgagcctactcaacagatgtgggatgcccagaatatgatgggggcagctgatccacgccacgggagggacctgacagcctcagccatgttcagaggcaaaatgagcacgaaagaagttgaccaacagatgatcaacgttcagaacaagaactttttcttctttgggggatggaacccaaacaacgggaaataaaccgtgtgtgacattccaccaacaggtctgaaaaagggtttcaccttcattgggaactccaaatctatccaagaaaagttcaagcgttcgaaccaacaagtcaaaccatggttagaagaaaaggtttttttgcattggtacaccagtgaagggatggaccaaaagggttcccagaggccgaaagcaaccatgaatgattttggcttaaaagataaataggtccaagaccccaacggctgaataagaaaaa

SEQ ID NO: 127464 - DNA, 476 bp, Arabidopsis thaliana columbia
  unsure (1)..(476): unsure at all n locations
aggagctncaacgggggggggggcgctcttttactaggggatcccccgggctgcaagaattcgcgggcgcgggaaccttaatttgcattcgaccacaatttatataaaggacctaataattttaaggtcaaaatgatatttggacaaacatgatcacacacaaacgccttcaccttcccataaacctttttttttttcggaggtgggggggaaagcaaggaagaatggggggggaccaggaacaggaagaagggccaaaagaggatcaaaaagaaccggggcaagggagaaggggcggaaccaaggacccaagactggcaacataagcaaaccttcggtcttggatcacttgggcccaaaattcttgagactaaccggggttacgggtacccaacccaaccggtgggacccttacccacccgggggaccaaccgttagagccctgaaattttttggttgggaaaaatgggcaaagt

SEQ ID NO: 127465 - DNA, 525 bp, Arabidopsis thaliana columbia
ccacaccccccctaggcttcgacggtatcactaagcttgatatcgaattcgcggccgccaccattagtctctatcaccaggggtttttggatgatcaattcacagaattgaaaaagctgcaagatgaatgtagtcctgattttgtggctgaggttgttactctcttctttgaagactgtgagaagcttatcagtaatatggctagagctttagatcagacaggatatgtagatttcaaactggtaggttctagtgttcatcaactcaaaggtagtagctcaagtgttggtgccaagagagtcaaaggtctttgtgttaccctcaaagagtgttgcgactctcagaactatgaagggtgtgtgagatgtttgcagcaagtggatattgagtacaagacattaaaagcaaagcttcaagatctgttcaatcttgagcaacagattgtccaagctggtggtagaatccctcaagtggatatataaaccatagacctatcgacaacagaacagcaagatgatgatcata

SEQ ID NO: 127466 - DNA, 509 bp, Arabidopsis thaliana columbia
cccccctaggcttcgacggtatcacaaagcttgatatcgaattcgcggccgcaacaagacattaaaagagagatcacagtgaataaaactaaaaagatatcacaccatacgatatcaacgcttgaactactctatggcacaacaaaaaccattacaaacatgtgacagtaaaaaaaaacactcatgggcgacaaaactcaaaagatccgtttaaggatgtctttatcaagaagaagagaagatgtgtctggctatggcctaatggttaggcaaagattctatttacaagtttctattcctttgctatggctctacggcaacaaggaccatcttcacaagctctaagccaaaggtttaagccagaagaatggaaactatgggtacagggttaagatattagcatgtcacctttaatgaaactctctaacatatgctacaatctttcatctcagatttaaccctcgctgagctaaaaagtttgcgttgtaacagttaatagcatcttgagt

SEQ ID NO: 127467 - DNA, 492 bp, Arabidopsis thaliana columbia
  unsure (1)..(492): unsure at all n locations
tggagctgcaccgaggtggcggccgctctattactagtggatcccccgggctgcaagaattcgcggccgccagggcttcaagtgacctatgaatgcaacaagaaaccacaaggtcttactcaagatgctattaactgtttacaccggcaaacttttagctcagccgaggttaaatccgagatgagagattgctgcatatgtgtagagagtttcactaaaggtgacatgctaatatacttaccctgtacccatagtttgcattcttcttgcttaaacccttggcttagagcttgtggagattgtccttgctgccgtagagccatagcanaggaatagaaacttgtaaatagaatctttgcctaaccattatgccatagccatacacatcttctcttctttttgctatagacatccttaaaacatcttctgagttntgtcgcccatgagtgttttttttactgtcacatagttagaatggtttttgttgagcca

SEQ ID NO: 127468 - DNA, 412 bp, Arabidopsis thaliana columbia
cggagggaatgatatggagaaaaaaagagaaggcccttaagacgacgccccccctagcctatgaggggataaataagcttgatatcgaattcgcggccgcgacaagtcaatctaagaggataggaaaaaaacagaaactattgagagaaacaccggaacgatctcagctctgagtgctgtcgtcttttagctacagttttatcataaataagatgctgaatgctcattgaagaacaccgggttggggaatttttgtctgaggaaagacactggaactcgcgtgtcttttatgagaaaggtaagagtagtagaaagatcgttgtggtgccacggaaaaccattatgggggtcggatgaatggtattgaattttggtgtaccgacactcactttataaatttgcaacttggctt

SEQ ID NO: 127469 - DNA, 404 bp, Arabidopsis thaliana columbia
ataatagagtgatgttagaggggggcaaatcttaaaagcggggaaatttgggttaaaagatagacaccagcaaacggcgcagctaaaagcacgccacctgcacaatgatacggaacatccaacggaacggagcaaatgaggacatagcaagagacgaggtacaactacctgagaggaaagggcctttttttcttaagggggttagagtacaccaaacagaacgactggtcataggacgccgcatagacctaaggaagctcacgcatcaaaataaatatctcataaaatctaaacggggaatgaggttcacgaactgtatgcaagagacgaactgagcaagaggtatgtacatcaagtcgaacgccgcgagataaagacacgcagtccctcacctatctcacgac

SEQ ID NO: 127470 - DNA, 481 bp, Arabidopsis thaliana columbia
  unsure (1)..(481): unsure at all n locations
gcagctggatccggtggcggtcgctgtataacaacgaggacgccagatgcctgaaggacttcgcggtcgccatacgcaaagccaagagtcttaaactctaagacccactcaaaccagaatgagtcaaacaacatcatgaagcaaacaacagcaacgcagagacttcaagacactaagactgaacggaggctttctccttcagggggaggcacgacnnaggaagaacactacggaggccagagccattacatcaaaccggagctcattattacttaatctgactagggagaagcagcttcgagatagacttgatcggcttgactcactcatttctaaggcttccttcctttcttggacttgtagtaaacacctatgaacgttccaataagtgtatccttcgtggcggactactcatacaatgagacagtaaacaggacccagaaagatgtgaccgtgcgagctcaaacaccgcgccctgagg

SEQ ID NO: 127471 - DNA, 489 bp, Arabidopsis thaliana columbia
  unsure (1)..(489): unsure at all n locations
aagccagattcgaancgcgggcgcaagttctaacggcgggagttctccactatagaattggaacatcataaaaacgaaagaaatgaaacgccttccgttgaggtgaatcaagagatccaaaatcaaatatgagttgaagattcgagctcaaggatttagaagagctgccgtcaaatgttttttttttcaagacgatgagnaggaagagacactncaaacgaacgcgaacacagaagacctgtgacgatgcctgcatagaagttcttagaaaggagctctttaagaaaaaagtaccagcgggtgaactacgatgatgtgagaccttatatcgaacgtgttgcgaatggagagccttcaaatatttttcagggagaaaccatgactaattcgctttctagctacgggaccttctggaggggaacaaaaagatctttgcctgagaccaacaaagacttagagaatataatactctatccaggcttgaaggct

SEQ ID NO: 127472 - DNA, 375 bp, Arabidopsis thaliana columbia
  unsure (1)..(375): unsure at all n locations
tttatttttttttaantttttttccccccccccaaagggaattctctcattttataaaaatggatagcaaatatcaactactaatattggagagtttgcaactatttttaacaaaatctaaggaaatagagagaaagcctaaaaaaaaaacaatggactaatatactaacataatatatggacagacaaaaatagccacttgcgttttctatttcttgctcttaatcaaaagcttttgcttcttgttaagctttgttcaagcaaacccaaaaccttcattggcttcgtgaattgcaagaagcaggcgttcctgaacttgttccttagattgatactcagggaggtctagttggttaaaacatgtatgagctgatg

SEQ ID NO: 127473 - DNA, 322 bp, Arabidopsis thaliana columbia
cttctcgggaccacaaacaaaagaatgagactactaattacatgctttcttgctcttgttcactttaaacaagccacagtgtcaatcttttcttgcacttaactccaaaaaacgccaacaagaaagagctcatttatcactggaacatatcagcaattgtatttcctgaatctgaagaatctccattcccaaaatccatcatcatcatcatattcatccactcctccatattgcaatcccctccttctccgttccattgctctgcttaaactgaatctgtggcgctcacactggcgcttgcacttgcctttgcttctatatc

SEQ ID NO: 127474 - DNA, 171 bp, Arabidopsis thaliana columbia
  unsure (1)..(171): unsure at all n locations
gcagcactatggancgggggaaaaatttagagattgctaaccctaatccggcggaaatacattgggggtgttgtggatagactaaaaggccaaagcagagtaagctgtgtgcctgtgtcacactcacacactctacatatataataatacaagcacggctcgttaaagaac

SEQ ID NO: 127475 - DNA, 200 bp, Arabidopsis thaliana columbia
tcctttttttttttccctccttaaaaggaccgaaccaaatttcaaaacaaagcactttatcatcatccagatcagtcaaatacaagcatagaaataaacctgcacctggcagttgcggttctcattttttgttctaagaaaaaaaagggcaaacaactaaagcgattttgtcaagcggggtttataactaaattactctc

SEQ ID NO: 127476 - DNA, 111 bp, Arabidopsis thaliana columbia
ccctcctaaaagaagaaccaagatatacactggtgtgggatattgaatgccgctgatcataacattggtgtcatgctggagtagctcgctcaacaaaaagaacctgcaact

SEQ ID NO: 127477 - DNA, 254 bp, Arabidopsis thaliana columbia
  unsure (1)..(254): unsure at all n locations
tccttnctttttttttttccccncncncnncccccccnnggggggtttatttttggttttcttaaacattaagaaactttttaaatacaatcagccgaaaaaaatccaagaaaaacaattttttatttaaatccttgaagagaattacaaaatccttttagcagacaacagtagctgctccggaagacacagggcttgcaacatcaagcattatgggattccacttcatcaccactttatcaccgcattttcca

SEQ ID NO: 127478 - DNA, 406 bp, Arabidopsis thaliana columbia
  unsure (1)..(406): unsure at all n locations
ngtttttctccgaccccaaatccagaaatacaagcgaggaatagaatgtgccactagagaaaagcaatcccagaaaccctacgtactgcacgtttcgaggtctaggttggtgatcaagcaggaaatcttctagagatgagagtgtatagctacttcgttctggagaacgatgcagggttggatgtgacaagaatagtgagagaggaagatagagtcgggggggatatacagagccaacatgacgaactagaggcaaaattccgggaggagagagctattcttgaagccaagtatcaaacgctgtatcagcctttgtatgtcaagcgttatgagattgagaatggcactactgaaggtgaactggctccagaggatgataccatggtggaccaaggagaggagaaaa

SEQ ID NO: 127479 - DNA, 241 bp, Arabidopsis thaliana columbia
  unsure (1)..(241): unsure at all n locations
gaatataactaaaatttcctacaaattgatcaatcattgaattccagngaaagagactctaccaaatccaagatgaccaatctgatacaactctaaccacactctctcggcttcaactcttgcacttattcgcgactcatcatgatcttctcctttacacgacgtcgttctctcctcctcctcctcctccttcgttaaactcccatctctctctaccacaaaccggtgatcatcataatct

SEQ ID NO: 127480 - DNA, 290 bp, Arabidopsis thaliana columbia
ttttgtatactagaataaaaaaaatgcagtttttgtatacacgaagactttcttgagttcttcagggtccaacaaatttacaaagtcaaattcggttgctttggggaaacccaaactaaaccggaaggaatggatacaaaagaatggtttctttaaccgtttaaagaatcacaaatgtgaaccggatgatgagccgtcatggctgctcaaatcccaattatgtttcttcttgtgctcgaaattctgaaagcatgtcaatggcctcatcctccattggcgcttgtgaccca

SEQ ID NO: 127481 - DNA, 215 bp, Arabidopsis thaliana columbia
aattaagaacatctccaattggattttttacatttttaaacattaaaaaaaaactaacaatttaaaaaagctccccaattttctggtaattcaggtggctttaaatttaacacctttgaacgaaacagggaataaaacaaaagggtccgaagaaattagggaccaaaaaacttttgacaaagaaaaaaaggtttcgctggggcacgcggtttttt

SEQ ID NO: 127482 - DNA, 155 bp, Arabidopsis thaliana columbia
  unsure (1)..(155): unsure at all n locations
tccttgacctttattatttccccgggcggacaaangatccttcgcacttttggtcggatacagatagaaatccactggaacttttttacaaactaaaagaatcataactgtttggaaagaaaaaaacatgaagaataataacacatggattgagc

SEQ ID NO: 127483 - DNA, 304 bp, Arabidopsis thaliana columbia
ggggggggatacaattctatttctattgtatctaatgaaccttggggtatttatgcccttcaactatagtatactatacatatagacctttttttacttgtttgattcaacggaactcatttaacctttcctttcggatatgtattatgtatcaagtattatacattctttttgaacggctggattcacaacatgaacaaaaaaaagagaggggataaagcataattgcactttttttactaaagatacgtttaatttgaagaataaaaacttatcaaaattaataaatcctctgccaagaacc

SEQ ID NO: 127484 - DNA, 481 bp, Arabidopsis thaliana columbia
tccttttttttttatatttttttttttttggaatcaactcgagaaattcatgttcaagtgtaaccacaaaacaagtattgtttatgtttttatcacactatcaaaaccatctaatcaacaacttcactgctaaacaacttgaacttattagcatcaagaacaagtttcctaatggaggagaaagctcccatgagtcctgcacaagtgaacacaaccattatcgtcatgtttatccaatacgtgaagctccgtctggttggcttataggtcatgttgtatagaagcattggcagcacgaaatcgagtgggataaacccaaacgctcctaccaccgtgtttatatccccaaagaacggtagcatcgctgccatgaacccgcaaaacgccatatatagtgttcttagtatcaaacgcggcacaaggttgcgttttgagaatatcccttttgttgtatccgctgatttcttctccattatttcat

SEQ ID NO: 127485 - DNA, 317 bp, Arabidopsis thaliana columbia
ggggactttttataaggggttttgtcgtttaggcccagggaagaataaagaagaaacaaacatgagagaaagctccaaaattcttgggcagacaatatattcttaatatccataatttcatccaatgcgaatagtgatgatgatgatctgtcttttcttttgtacaaaacgcagagaaacaccttcacacggtcaatcaaattcagcaactaagcgcttcgtatttaaccggaatcggttggttaaacccggtccgcgcaatcaaactcccaaccaccgtgaaatctttacaaaacactcctttcaccacattcgta

SEQ ID NO: 127486 - DNA, 312 bp, Arabidopsis thaliana columbia
gggcatcatgggatcaaaataaggagacacatgacaacactatatttgttaaaaatgtagcaaaatgctttcaactggcttgagttaagcacttaagcttaatgttaccggagttcatacaccattatctccgatagctcggccccaacaactttcctgtaactaaccaacattgattcgagttgtttctgaaccactggattcttgaaccgcggtatatccttgtatcgaagtcgaagtccattaagactgataaggatattggtaatgtcactccggtttctgctactgctagagtctgagtctgagtct

SEQ ID NO: 127487 - DNA, 390 bp, Arabidopsis thaliana columbia
tcctttttttttttgctccataaaagggtactctattatacaaaaaaggaatcatttatctggaaaaacgtaaacataagtaacaaaacaatttctctaaataggatatattgtaataaaaatgataagtactatgctttaaggatggtaaaaatttgaggtagagaaaaaaaaaaaaaatagctttggcagaaatcaaaagaataaggttctatgtaattcccaaaatgccccctcacggtgaggatacggcctcgatggcgctacccaatggccacgcagcttccacggcttggtctccgtatttgaccttcttcactaacgttattgtctgtgatggctccaatccgaatccatcaatgagcagagtatattggtaaacgagatcca

SEQ ID NO: 127488 - DNA, 428 bp, Arabidopsis thaliana columbia
  unsure (1)..(428): unsure at all n locations
tccttttttttttcctccttttattnggnggcgttaatttataaattaatacttttttagattacaaatgaatcaaaagaaaaagatatacaatattcttcttcttccaattattattgttattatttgattcagaaaaagaaaacaaaaaccagaagaatttgatgattcctcaggtaactcatgatttttctcctcctttaattttgttattcaactatggaaaaaagggaatgacggattggccaaatcttctttgattgtctcgtttttattttacctattggagcaagaaaaagacattggagtgtgcttcaagcctgatacatcgaatgactccaagaacctttgatccgaaactctagctttagccgctgcaaatcgcttatactcatcgagtatcgatgttatgcaccatttctggagtt

SEQ ID NO: 127489 - DNA, 481 bp, Arabidopsis thaliana columbia
ttgccttccttttttttctgtactaaacaagaagattagtagtattaagtatcaataattcaaccatgttttaagattacacgagattaaacgttacaagttgtaacttacaaccaaaccatgtaaaatactttaatagctgcgggctgttacaaaatgttctcacagccacttcagctactcactttctctttctccctcatttccccctttattactcacaattaaaacaccaaacccaaaaaaaaaaacctttaaaaaggggaaaccccccccaaaagtcaaagatcctttcccctgatttttttctcctttccatatataaaatttagtaaaaaaaaaggaggaggaatagcgaaattagcggagagttttcttttgtctcgaaccactttaatttctcgaatttcctccaaattttagtttctcgaaactcgccttaaaccctgaaattcttcccgacaaaggtttgaccaaactg

SEQ ID NO: 127490 - DNA, 359 bp, Arabidopsis thaliana columbia
ctgggggaaactggaactttgttatagattctgattcagtttacaatatacaaaattccatgacagtggatgtaaatatgtaatgtaaggacttgtttgaattagatacaaagaatgcagaattttgtgctatgaaaaacaaacttgcttgcctcatgggttgagtatcaatttggttctccacatctctgccatgaccttcctcggggcgggatcatctggacctttgtctctttgtcctgaggtgaagtataactgtccatcccaatacccagccagcgttgtcttcacacggtatggtaatttcccaatcacataccatttcagtgtatttaagttgaactggaagatttcaccaa

SEQ ID NO: 127491 - DNA, 284 bp, Arabidopsis thaliana columbia
aagcaaagggatcattcaaatataaaaggggctttctcatggaatacaacaaaaaaatgcccatgccaaaaaaaggtaatttaactctaaaagttcagaagcaaatttatgaattttactacaccggcaagtgtttcattttggctcagggcattaagccaagctatactctttgtcgattcactagttccggcaaagtagtctaaaccactatgcttataacaatgattgttgcttacgggcatacataacacaaccaataacgatgaatcaaaagcagacct

SEQ ID NO: 127492 - DNA, 299 bp, Arabidopsis thaliana columbia
gggggggtaaataaaacccccctttattattcaaataataatctcacaaaaataaaacattttaaacattccgaaaagaaattgccttaaaaaatgaaaaaggttttttaaaacgaaccctaaaaaaacgtcaccgggcctttactattttttcccaaggcatgtgccttgctttttttgaatgcattttaggaaaaccaatccatatggtttattggggtaattaactttaaaaatttttcccttttttttaataaatcaattataaattgccgcccttgggggggggaactttttaa

SEQ ID NO: 127493 - DNA, 251 bp, Arabidopsis thaliana columbia
ctgaatgaaagacgtccaaaacaggatattatagaaggacctttgctactgaatgtgagttacctattggctctgaaccctggatacaaatgtatcaatgttagtatccgtagaacctccttcattgagggactggacagccaagtctttccattttttcacgttcttcttcatcttttggctcctttctccttccatcacttccttaatgctaaactaaatctcctttttctgggcaatcccactttcct

SEQ ID NO: 127494 - DNA, 270 bp, Arabidopsis thaliana columbia
tcctttttcttttttttttatattttcccccccccccccccctcctggccaaaaacgcttggaaatttttttataagaaagaaacagaggttacgtatgcggtaagccgtttagattacaagaaaaataaaatttttggtttattaagaattgaaactcttttctctagatgattatgtgaacaaaaattgatagtaaggaagatgttgacgataaaaaaaatttgggggaaggcaaaaaaagcttggggggattttgggagaaactaaa

SEQ ID NO: 127495 - DNA, 409 bp, Arabidopsis thaliana columbia
  unsure (1)..(409): unsure at all n locations
tcctttttttttttnntttatgacaaaccttatgataaattacttagaatactataatcacatgactttaaaacaaatccaaaattttgaacacaagcatacatgcatgcagcaatttattacaaaagaataaacacaacttgatgcaaaagcccccaaacatccactttgtatttgaagcttttggctccattataaagtacttaatcagatggaccaatcatcttctcgggaacaacaagagtatcaaactcttccgaagtaagaacacctaacttcatagctgcgtgctttaatgtgcatccttctttgtgagctcttttggctactgctgcagcattgtcatagccaattttaggattcaatgatgtcacaagcataagagacttgtgcaatagctttgagatcc

SEQ ID NO: 127496 - DNA, 454 bp, Arabidopsis thaliana columbia
  unsure (1)..(454): unsure at all n locations
tcgtccttttttttttttcntaggttaaagttttcaacttttcaccaaaggtaattaagcatttaactacataaatcaaacccagtagtatactaaaagacattagacaaatgagagagacagcttcgattttcagacagctttaggttggatttgttcgaagtcgaaaaccttaaacatgagccgccgaacatcgggtttcccgtagatggtgtaggcgaggccgtgaatggcttgttggacagcggttgtcgccggattcctaagtctccggttatgttcataccgatcatgaacctcctctgagtatattataaagttgtgaagacgtttttctctaagataccggccgcagaatttgttcattaatagacgtctatgcttctcttgcaaccactttcctggtgcgtccaagtgcttcattaacaaacgttcagccattgctatgtcctgt

SEQ ID NO: 127497 - DNA, 411 bp, Arabidopsis thaliana columbia
  unsure (1)..(411): unsure at all n locations
ttgccgtcctttatccnnntcctccttccatggaataaggaatactattaattgtaaaatttttcaagtacaacaatttttgtataactgccgaacttaacttttagcaatcgagtctaatgatttgaaggaaattaaaaacaattgaaatgagaaatcaggctttagatgacatgcaaaatgctttataaaacttcttggtatatttgtccttcggttcatctacttgagctccatgaatcttcttcttcccctccagagcttgaattagatctttaagagatccatcagcatctatttcagtattcttcttcatcaagttctcagcaacatcagctggggcgatcttcgtttccttcaataatgattcgatctttttgaatagaggatgagttttaagatcaagatagt

SEQ ID NO: 127498 - DNA, 317 bp, Arabidopsis thaliana columbia
tccttttttttttattattttttttttcccccctttttttttttttgtttaaaaacgcagggaaaattttttataagaaagaaacagaggttacgtatgcggtaagcagtttagattacaagaaaaataaaatttttggtttattaagaattgaaactcttttctctagatgattattggaacaaaaattgatagtaaggaagatgttgacgataaaaaaaatttgaggtaaggcaaaaaaagcttggggtgattttgggagaaactaaaagaataagaggtttagtgcaaatacccaaaattgccttcctcatggg

SEQ ID NO: 127499 - DNA, 378 bp, Arabidopsis thaliana columbia
aatggcacataaatggtgcagattttttttaagaatcaaatctaaaaacagagaggttaatcgcaatggaacatttagaaatcgaaccaacagttaaacccaaaccgaaccggtttatcccaagcttgaccttgtcatctcataagccaagaagcaagcagcattagcaggaacactcctagccatagctggaccaaatcctttatacaaacctttaactccttcagatttcaaaatcttccgaaaagcatccatcgaccccgtgtatctcgggtttttgtaatcgtcgacttgaagaacactttttacaacatctgtcggatatactattccccaaaaagaagcaccagcgactccacccgccatgatcaatgaccc

SEQ ID NO: 127500 - DNA, 351 bp, Arabidopsis thaliana columbia
tccttttccttttatttttttttcaccacgcgcccccaacgagaaaggggacatttaaacggaaaattggtcttttgagaccattacaaatctcaagaaaaataaaagtttgactctcaaaaaaagagctgaagactaacccgaataggttagcaagcaatcctctgtgactgtgaaactctgacaaataaaaaaaaaaaaactttatatattgtaaaagaacaaattgtgacgatcgatttgattgaacgccaagcaattgatatgtgaaaagaaagaccaggggtggcttaatggttgagatgaccactctgctctcttttgtgacagagcacgagaagaccacaggct

SEQ ID NO: 127501 - DNA, 400 bp, Arabidopsis thaliana columbia
aagaaagcttaactctaggagcaaccagattgtacaaagaaccaaaaaaaacctatacagtttttatagtcactaagccaatcttagctttagactgtcactttaatgtgcacaaaagtacaaatttacagaatttgggggctgaaacataccctgactctgtttctctcttataaaaccaatagataaaaagcgtcttaaaaaccatcagcgataacctcttttaggttgtagcagcaacctcttctcatctactacttaaccttagcttcttcttcttctctatgaccaatgcctctgatttacagattgggcaaacgttcttgataaccaaccacttcttcaagcattctgcatggtatttgtgcatgcaatccagcgttgcgatcttatcttcgtt

SEQ ID NO: 127502 - DNA, 207 bp, Arabidopsis thaliana columbia
aaagagagagagagagagagccatttgcttgataaaaacgtaccatgctggggataatactactagagtaaattatctattacataacggtgcaagcgttgggattctcgtcgctaaaaagagaaatgtagtggttctggggagctcccggcaacagctagaactgcgactgctcagatttccagacataaccggccggagcttttt

SEQ ID NO: 127503 - DNA, 234 bp, Arabidopsis thaliana columbia
gaatgattaatggataaccaggggtgttttcaacttgagttgggtgacgtacaccactgaaatattaaacatacatttcatgaaaacgagagaacctttggtgtgtctacagaaccaaaaattacaaatacgaatggcttgcggcacaaaatcaccggcggaaaaagaatggttcccttccccaaaactgaatatgagatcccatggagacaagacaacatgttgcttttggaa

SEQ ID NO: 127504 - DNA, 400 bp, Arabidopsis thaliana columbia
  unsure (1)..(400): unsure at all n locations
tccttttttttnntttattagacaatatcgactcttttatttccatatatattatctacatgttattgtatgaaactctactcaaccatgtctcaaatcttgcaatgcctcttgggttttacatagctacatcttcgtgtccattatgagagtcttcatggtatatggattttgattatcttatcttatgtgtctgattgtttatctattttaatctaaaggtaaaggtattgctcttgcggcagctctcggcaaagctagagcctgcaatggagtcctcatgttacaaagcaatccaggattctcgctcatgtcaatcctctctccaggaacaggggaactccatgagaagcaatgcaacaaatttcccatcaccaatgtcatcaagttcatgctgagc

SEQ ID NO: 127505 - DNA, 436 bp, Arabidopsis thaliana columbia
aattgtgaattaaacaagagttcaaataataagggtaacggatttaatgtaaaaatatagttttttaaaaaacattacagagatttctatgcacataaattaagttttgactggtatatcgtgtatatgtaaaaatcaaattttctggtaagaagagaaacgccgagacagaggtggctaatgtactccttcccctggagctacggctcgagcattcaacaaaggttgaagagctttgacaacgatactcatattcggcctaaaatctgcttcatattgcacacacaacgcagcaaccgcggctaacttagcaacagcttttggagggtaatcgccaccgagtcttgcatcaacgcattgtttaaccttgtcttcactcagtttaggtgtagcctgatgtatcataagtaacagtttacatggttgatgatcatgc

SEQ ID NO: 127506 - DNA, 439 bp, Arabidopsis thaliana columbia
  unsure (1)..(439): unsure at all n locations
aaattgatatttatcaaccaaaaggtatcattttaacaaggtctgtgatatacagaagattacactttctctctgattctgagatgggtgtcagaggttttggttaggaggatcaatctctgattagagtgttgttgtttccatttcaaagctctgatcatgaaaatttcctccatgaatgttcttctcgcttctaatctctgagaaccaaaaccatggtcgtgggaagatccatgaatgatgtatcacaatcatgtgagatgcagattcaaatcagggaggtgtttattaatctgaatcttcttcactctcttcttcagactcggagctaaggaaacgagctgagcttctgagggaaaatgatttgttactctttggaatcttcgttctcttttgttntgttgcaaaacctttcgccactagtgtatcaaacaaatct

SEQ ID NO: 127507 - DNA, 302 bp, Arabidopsis thaliana columbia
caaaacctcatgtctagggtgcaaattgcaattagataactgatccttctttttaaaaaaacaaaaataatactaccaaactggacttttgagaaaaggaaaagaatcaaccctcgagtgggggctttatttatggtcttacttctaacgtctggtccaataagcaaatgctgactttgattaaaatctactcgacaagcttaactacacacaggttcccatcaccatgcataaaactccttgccgttttgtgccaagataagaagaaacgactacaagaaggctacaaagcctacaacatt

SEQ ID NO: 127508 - DNA, 138 bp, Arabidopsis thaliana columbia
atccagctgtgaaatcatgttttcgagcccacctaaaacactattgacagctacctgggttgaattatccatccctggaaagccacaaatgcttggggcacattaaaatcgggctgatttggtccctgaatcgctggc

SEQ ID NO: 127509 - DNA, 420 bp, Arabidopsis thaliana columbia
ctaaattggccaaggtttttctgattatctgcgattgcacgttgttctattctggccaagttgtcattttagaactgccaacataactaatgttatgaccaaaatataattattgttttcaactagcaaaggaaatgattgtaggctgtttaagattcaaatgccaacatggatgactactcaaggtttccttttaaatgaaaaacaattatggtgtaatcaaagctgattctttgatttcgcttcgctggatggttctccgttcacaggaacaagctcggtgtcgaatatcagtgtcgccccacccgggatttttggtggtgagccgttatcaccataaccaagcttggatgggattttcaactgtgtgttcttacctacacaagctaccaataaaccctggtcccatcctgggatgac

SEQ ID NO: 127510 - DNA, 117 bp, Arabidopsis thaliana columbia
ttttcgcggccgcaccaccatctttgagaaaaacgaacctgaagaatccgaggggagcggcgccattcgctgttctccaatccaaatgcgccaaatcttcccaaacataaagaaacc

SEQ ID NO: 127511 - DNA, 439 bp, Arabidopsis thaliana columbia
gatagaatatggggtttattcaatattattagagaataaaacattgaacactgcaagttcatctatatcaatgtacaaacacaaaagtcttgtttgaacaagaaagggttacctatcacctggaagagaccaaaatgctcactttgaaactaactgagagtagaagaacccagaaacacatgaatattaacattgcccatgctgaactattccctgatttttcgggggcggtattcccttggaccaaccccaaagaaaggatcaagtcaaggttctcgtttttgccgtatgaccagcccatgttgctgtctgatatcgtgatcatacctgcggttacatgaactgaacctgatgattgtgctgcgtgtaaccggatagctgcatcctttgtagggaactcagaagcatttgcaagcggagcaggaatagcacccaacat

SEQ ID NO: 127512 - DNA, 137 bp, Arabidopsis thaliana columbia
gtggggagtacaaaaacagttgtatagacctgtccagcccatttcaaatttgacataaaatgaattcttccttaattatggcgtaaacatatagtgattattttatttaaaacatatgacagggttaaagttttgcg

SEQ ID NO: 127513 - DNA, 134 bp, Arabidopsis thaliana columbia
  unsure (1)..(134): unsure at all n locations
ttnattttttnctcttnaccaaagaactcagctttgaagttaaatccaaaaacaatgggtgcatttgaagtacattaatggtctttgaacaccaaaaagaacatttcaaaaaacgaataccaaaaggagcaaac

SEQ ID NO: 127514 - DNA, 271 bp, Arabidopsis thaliana columbia
atgggaaacttatgaacagatttgtttcataaattcataattaaacccttcagatacaatcataagccaaaaaagaaaaccaaaagtccaatttagttctacaagaagtttttgaaaggaaaaaaaaaatcttttttttttctatataatcaaatcattcactttgactcatacgattttggggcttttttttcaaaattttagaaatccagagatccacattggttgctctctatagattttgctacagatccaggcttttttgtttcct

SEQ ID NO: 127515 - DNA, 423 bp, Arabidopsis thaliana columbia
aaaaggctaatagtagatttatatgaaactgtacatcactttcaatttttgtttttaaccaaaaagaatcataaatctaaatcaaatattttgaggttaagaaaaactgatgcttttagttttagctatacacaagagtaaaaaaaaaagaagatgtgactcccttgttccaaaaactaagggtgtcagtttatatggttatgctcccgccatttcttccgacggttttttattgatgattctgatcctccactggctttattctgtttaaaaattacatcttccttcggattctgattcactcatttaggttggaaatagctatcgtagatggcaagccgatcaaacgcatcaaaatttgcttttaacccgacaaactgacttccgacatgagcacatcctactttaggccatcgacatact

SEQ ID NO: 127516 - DNA, 171 bp, Arabidopsis thaliana columbia
gggggttaaaaaaaaatgcttgttttttctcaatctcaatacatttggtagggaacaagattttcggatttggaaaaatcacttcgcttgggtcatttttcacactacaacttttattaccccctttcctttcaaaattaacgcccatttcgaaaaaagaaatttcatggg

SEQ ID NO: 127517 - DNA, 319 bp, Arabidopsis thaliana columbia
atacatataataataacattctgttaatgactgatctgtttttttaagttgctttgttgcaaaagagagattaaaatgaacaatgggggccaagaataaaagaacacaaatggagaagttgtgagtaattatagcaaatggcttcagggtgaaaaactgatatcaaaatttttaccgctcttgttttacttggtgacttttgatcagaagcacttcctgtggacgatcgacggtccaaattcatcatactgggctttcgcaatccacatctgctggaaagttctgagagaagccaagatagagccaccgatccaaacac

SEQ ID NO: 127518 - DNA, 267 bp, Arabidopsis thaliana columbia
gacctgacccattgggttttttaataaaaaatttttagtttttaattatttacggggagatcaaattaaattttctgacaacaaattaaatgacgatgggaatgatgatttggtcgggtaaaaagggtttattgttttaccacatttcccaaatggatcattgttgttacgttggggcttaacgtaaccggtatttccccaatttaacccccatgaattgggaatgaaccaataatttttaccacttgggggtccatattcaacccc

SEQ ID NO: 127519 - DNA, 308 bp, Arabidopsis thaliana columbia
caatcccttgattccacttcaagatggtgaagaataaagacattccattagagaaaggtcctggggacaaaaagaaaatcacaaactttgtatccaattcaacggatgctatagcctttctttctttcaacaagaaagacaccatttgcatcaaatctaccttcgactcaaaatttttttaagccagtgattgaaccaaataaaacacatccattttagagaaaaaaaaaacgtttccttgctcaaatcaagctttgcttcactcggcactggcgagctgggagcggatgaccttatccgtatcaacc

SEQ ID NO: 127520 - DNA, 353 bp, Arabidopsis thaliana columbia
attatacaaatccaaaattttcttcaaaacaaaaacttgtttgaaaaagacttccggtacaaattgaaagctctcctgaagatgatacgaagcattttttttttcgagaagagttagaattttaaattctacaacaacaactgatatgagattggatgtacacaaacaatgtataaggagcttaattcttaatcatgaagcagagctttattctttatcactttggtcttgaaggagctttgttcttgatcatgtggcttaaacccctcgctttttctggtccatagccgcctgtagcagtctttgcatgacggcatcttcataagcttgaagaccggcacctactatgttac

SEQ ID NO: 127521 - DNA, 323 bp, Arabidopsis thaliana columbia
agccacacaatgtttatttatttacatataaaacataatagttttacattaaggtctatgaagaattttatatacaaagaatcaaaccaaacaaacaatctaaaagaaaaaccaacatttcatcaactttcatcaccagcccaattactcttgagtttaggcccagtaggcccatcttcaccataaacttcatcaggaattttcttcacaaatttaacaaaagcctttttcaaaagcccaggcaatatcctttccacactcttaacttcatcatcaacattataatcaatcttcggcccccacttcctgaaatacttaaccca

SEQ ID NO: 127522 - DNA, 171 bp, Arabidopsis thaliana columbia
ctttacaaagcaaacaccaaaaaaaacagtgatgggtttggttacagatgaagtgagagctagggcggagcaatacacatgagatgagatatgccgtgggaagacaaaggagattcttaaggaagtttctatgcctcatggtttattgacattgaaggacattgtataagt

SEQ ID NO: 127523 - DNA, 263 bp, Arabidopsis thaliana columbia
ttccttttttttttattttttttttttgaaggaataagcgattgagcgaatggatggtccaaagttgtgagacaaagtaataacataacctaaaagagtaaacgcttgaaatagagaaaccgatggtggaataaatcagagccctccaaaacatacattgatgaaccctaataaaaaccatttaacaattacatacagccaaatctatttggtgaaaaaagattcacgttttttttaacgcacttagagaagaacaaaacgaa

SEQ ID NO: 127524 - DNA, 233 bp, Arabidopsis thaliana columbia
ggggaaaaggaagggttaaaccgggaagaggggacccaccctgggtctttgtttccaaaaattctgaagacccattaattggcacaaggtttgggccctgccgttttacgggccaatggcccaaaaaaccaggggaagaagaaacccttggggttcaatccccgagatgaccccggaaaaacaaaaaaagaaaaaaccccttattggggtttttaaaaaaggggaagaatttt

SEQ ID NO: 127525 - DNA, 239 bp, Arabidopsis thaliana columbia
atttttgcctttgtccacacatgcggaggcacagagttacagacacgcgttttctagatggttgcatgacgccgacagccaccgcgtgtatgtccttcccatacggaatatgccacgtcgcgtcagtataaagtgactgactagggctctagcatagtataagaaacgagaccagacgccattcagcggataggcaaagagggaaggaggagaaagccaatggcacatgccacgtttac

SEQ ID NO: 127526 - DNA, 264 bp, Arabidopsis thaliana columbia
gcgtgcaaaaatatttggatttgtgattgcgagatatatgtgatgggaaccattctattatacatgaaagaaaatttaaaaaagttaacttttgagattccgaggaagatgttacctgatatgtccttggaaccggcacgggaaactcatgaatgtcatcaattcaaggattaatctagttcttctagtgcttggacggatcgatagtttttaaagctcttcaaaccgcactatttcacttaaaaccggatccaaaagcaattt

SEQ ID NO: 127527 - DNA, 237 bp, Arabidopsis thaliana columbia
aaaaggggttgaaaaatacgtattccaaatccggggtcatacatttttgaattaggaacagacagcgccattaataaaaatagaaagagagtgataagtgatcatcatcgtcttaagcagcatcgacttttttgcccttcttcttcctccgccgcaagagactgggcttgaagccgaccttgagcaacttttcgacctcctaaaactgaagccctttggtctcaggaacgagcaacc

SEQ ID NO: 127528 - DNA, 227 bp, Arabidopsis thaliana columbia
cttttcgatagagatggcatttgctccggctccttgggttatcatcgctggaagaatctttgacgggttgggtgttggtatggcttcgatgacgtctccgttggatatctctgaagctcctccggcgaggattacaggtgcactagttagtaccaatggtcttctcatcactggtggacaactcttttcgttcctcatcaatcttgcttttgttcatactccgggaa

SEQ ID NO: 127529 - DNA, 146 bp, Arabidopsis thaliana columbia
gaaatattggctgtttcattacaacgacgattgatacttaaacacacaagtaacttgcatatttcatgatattacacaattgagatacagaacaagaatcaagagatcttcttgttttaacggaaaaaaaacaaaacaaaagatga

SEQ ID NO: 127530 - DNA, 228 bp, Arabidopsis thaliana columbia
ggggaaaaaagttaaatgattttgaagatgagaatttgtagcaaagatgttgggagagacttttcagtagcaaccaaatgtgtgtttgaaggaaaaacaagtcaaaccaaaacaatagtctacacttttcatgtgaaatcatacaggactcaagataattctcatgacagatgtaaagggagaaaaaacccgcaagggggaaatttggtaaccgaacaaaaaccggtt

SEQ ID NO: 127531 - DNA, 367 bp, Arabidopsis thaliana columbia
  unsure (1)..(367): unsure at all n locations
aatgaaccgagtcgtttcatttctcagctttgagatggtttttctacaacaacaatggaacaaacactctcaaagtcacaggttacaatgtaaaagtggaactttctctaaagatacagaagcataaagtcccgttattttcttggtgtcttggacaactatttactctattgaaagtgcggtgaggatcatccgatcattcaggtacgcattggtgcaatctgaaccaatcgtttgatagtgacttaacaattcgtctatcgagcctatcggaaccagaaccgggccgaaggatacccgagtcaccccagacggaacacgagctacggtttttactagaatntgctaaacaccaaccaccaggcac

SEQ ID NO: 127532 - DNA, 245 bp, Arabidopsis thaliana columbia
atggggttccctttcatatcaaggaaccaaattataacaacaaccaacaattttggccaaacttaatcaaagaaacaacaaatccttggattacacaccttcccacatctttttccttatttaaatcttcctccctttaacaaaagatctaacataaattcattttttttttatacattctcacaatttcatcccctaattttttttattggtcccccatgccccaaaatgttccttaaaacgga

SEQ ID NO: 127533 - DNA, 430 bp, Arabidopsis thaliana columbia
gaatatatctataaagtaattgaagaaatgagatatcgacatagtaaggttaagtttctgaacattacatatctgacagagtttaggaaagatggtcatatttctcggtatcgagagcaaggcacttctgttgatgttcctcaagactgtagccactggtgcctacccggtgtaccagatacatggaatgagatcctctatgcgcaactcttgtcaatgaactatagaacaaagtgattccttgaggtaaatactgattttatgtttcttgatctagtcatgattctggttcatcaatgccttcttcaggctcagtttcatttgtttgcatttgcttgaccttctcgagctgtctcaacaggttcaacctttcggctccgtaggtcgaaggtatcaagcctggcacatatctctgaattgcagcaagcat

SEQ ID NO: 127534 - DNA, 251 bp, Arabidopsis thaliana columbia
ccccctggagggggaaggttttctttccctccaaagaccaatgttttctttttttgcccagttggagagttgttccttgttccccccaaacatgaactaaagccggtttttttaaccataaaaaattgcccaaaacccccctcccatgaagagaccaagccgccccctcttcaaataatggcccaagatagtccccttccaagctagccaacccctgaaacccccttttttcttccatccactttttccca

SEQ ID NO: 127535 - DNA, 204 bp, Arabidopsis thaliana columbia
aagggcgactctttggtgaattttccagggaagtcacttcctttacatcttacacagccgtttaaaatgtgtgtagaaatcagataatgggcggaataaaaaaacaatattcagggtttttattaggtaacaatcacattaacctaaagattaaaactcttgccattacaaacaaacaaaaagacttgcctagccctgcgcttt

SEQ ID NO: 127536 - DNA, 382 bp, Arabidopsis thaliana columbia
  unsure (1)..(382): unsure at all n locations
ataagnaatattaattggtattcggaataatctttagacgttgggatcatgtccaaaaaaaaacaggaaaagttcaggttgccctagaactaaccctgttcttgatcttaagccctatttttggcattgaatcactaaaaacatatcagattttgaagaaaaaatgacttttttttagatggcaaatggattagggaccttcttgctcttacctttcttatttctccccaacagctttctccagaggctcttaactccgccggtctttttctgaggaacaatggcaaagcagtttgagtcggagcctttgcttttgtctgagagaagaatctgttctagtgcctcaatggtttcattgtaaacagagctgtttcctcccttt

SEQ ID NO: 127537 - DNA, 106 bp, Arabidopsis thaliana columbia
catttcgtgcgttatacgaacttgtacatcatggctgttttctatcatcgatcggtgaattcgcggatcctcgagcttttcgatcggagactttttctctcatcgt

SEQ ID NO: 127538 - DNA, 215 bp, Arabidopsis thaliana columbia
ctcctcattctcatctttcttcttaggtgctgaatcggattatcctcagcatagtaacttgaagagactgtgaccgaatagactgttcgtgtatggagataactatgcagacaccgtttacttacggaggagctccgtcgtctctcttctaccgccgttcagatatctctccattcacaaaccaggaagaacttccggcagtcgtggggattgaa

SEQ ID NO: 127539 - DNA, 211 bp, Arabidopsis thaliana columbia
  unsure (1)..(211): unsure at all n locations
tcctttttttttttttttctgaaaacangaaacaatagacaacggccaatgtagatctttgaacatatttttcatggtcagtctcagcccaaggaattcaaatcgtacaaagccgtaaaatcaaagggaaaaacgacttaacagaaacaacaaacacgttacgaatacaagaacgcactgtaaattttaaattattttcaacgtatatatg

SEQ ID NO: 127540 - DNA, 440 bp, Arabidopsis thaliana columbia
gtatacaaaattatacgttagtatataacggggttcatacattactgttaacatgtgacaatgtactagcagtagtgactacttctccattttgcttctgtaactgatacaaatgaaaacaataaataaacttacacacatatgactaggtttcagaatctggttccttctcattgctctgttcaggtaccgacggatcagacggtggttgtggagcaacaggtgagtcggaagcccgtggattcgatgatgatgatgatgatgatgaatttgaactataacacttaagcaacctatctttgtttttggtccaccaatcttctgcttgatgctcatcaaatctttttttactaaatctaactcgtcgaaagatcttgttaccattcatgtctacctcataagtcacataaacaccaggctcaaattgttctttactttct

SEQ ID NO: 127541 - DNA, 144 bp, Arabidopsis thaliana columbia
aacaatatctgtgattctcctttgaggagcattcaacatataagttgctaaaacgaagaacaaaacaagagaaagatgcaaaacttgatatataaatataggtgcacatattatatcttatgagcaaaaaacctaactaaccct

SEQ ID NO: 127542 - DNA, 373 bp, Arabidopsis thaliana columbia
atcagaatctttattattaattacttgatactcaaaatttcatcttttcttcgttagaactacagcttattcagcttaaaaaaaacactaattcccaagaaaacaaaagatactcgtaaccctagaacaagggcaaaaagagcttcataggcatagcaaaaacaagaaaaaaaaaactttgaaaaaaaagaaaagggaagatcaacgctggagatccatcattcgtgagaactcagtgaagcacacaaaaccatcaccgtcctcatcaacatctgctatcatacgcttacaatcatctaacgtgcaccgttcatctccgatggtcgagaaaactcgtagaagctcatcagccgagatcaaaccgtcacgatcc

SEQ ID NO: 127543 - DNA, 327 bp, Arabidopsis thaliana columbia
aacatgttaaaggcctagaatggcctgaactcaaagaacatgtttttatacatatgttgggggaagaagaaacgcttgctcatactaaaagaaagagacgactgacaagatgtgtaaaaatgctaaccccaaaggataaactgaatgtagacaacttaatagatcccaaatagagacactggggatccagaaaaccagccaacgccactctcctttgaatggactgcaaggaagatgccattataagaggtgaaataaacccatttcatataccagatgcacgagacaaacccgttgcatttcaccctccaaatgtttgcacacaaa

SEQ ID NO: 127544 - DNA, 374 bp, Arabidopsis thaliana columbia
aaaccggaaccgctaatcaatttttatatgtatgcaaaaagcaagcgacgacgtattgccaaaacaagatttggctaaccgatttgtcagagttaaacaaccaaaacgtttacaaactccatcaaagagcattaagtcactgagtttttctctcaagtacatagacacacagcttcaaattgtacgttcttttccttcctattttctttctcctatggttttagttttctacaggagtcaccaacttcttcttccaaaaactttaatcgcctgttcagctgcatctagctcagtgaatcgtctctctactcgggatggaagactagaccggcacacgcttgccccggttcttgtcaaagaacgatctaatatat

SEQ ID NO: 127545 - DNA, 318 bp, Arabidopsis thaliana columbia
gggccccccaatctaataaataaaactcaagcataaaatggtgggggtccaaattttgattcaagacctaagttaaagataaaaagtaaaaaagttttgggttggtttaaaacatgccaagacaaactacttctggcaaggtctttaccaaaaaaaaaaaaaacttctactggcaagctcagttcttaactggggcaagaatatcgagctgggctccgagcttttttttagggacctttttgggcttaactttaaggttggtaaggggttttttttgctcgtaaaccacgggggctttttccttcctttttggctcca

SEQ ID NO: 127546 - DNA, 274 bp, Arabidopsis thaliana columbia
attaatcatcgtttccaaaaagaaaaagaagaacaaaaaaccgagagatggccccttgaaggaataatatgaacatggggagggagacctaagaggggagacctgacatagaagagttgagggaactcctttcggctatctctctggtttgctttctggtggtggctctccacccaaaaaatatcctttttatggtcccgagttcatgaaagtttggtgaaaagaagaagagagatcttgggggaataagagagatttttttttatgaagaatt

SEQ ID NO: 127547 - DNA, 315 bp, Arabidopsis thaliana columbia
gaccaaatcagaaccgattttcatttgttaaccgtccatgtaagaccaactactacacggcttaaccggactaatcaggaaaacaaaaaaagtaggaaatatattaaaccggtttagcccatcacaccatctcaacatcccagtccatatatatacagccaaagttagctagggagcgagcttctgggcctcttgactgctcctacatagaaatgcaatctccataacatgaccttgtccgcctgatcaaggttgacgataaccttatcgttgaaatctctgccagatgctatgcaatgatttcctactatttca

SEQ ID NO: 127548 - DNA, 350 bp, Arabidopsis thaliana columbia
aatccaaaaactgaaatccattatattaaaaccggttctcaactggtctctttgtatctcattatctaaaaagctttataaaacaataagattttggcacagcctaatcgctttctcagggcacagagccactcatattattaccctatctactaggttcctgctttcgtatacttctcaaaatgctctctttgttcccctgcaatatgttggattcttacgtcttgccatttctgattgtggtttttatggaacaacttcatcagagataacagccttgcccagataaacctgttgcatctactctttccagatcgtgtcacggaactccacccttatgtgtggcacgt

SEQ ID NO: 127549 - DNA, 316 bp, Arabidopsis thaliana columbia
caaaaaaaggagggtttgctttatttcttcaattaggagaaacagatccaatttttttaggggtggggttattcgacatgtccaactaaagaccaaagcagagccttttttgtcaatttaaactctgatgagacaaaaacaaacttgtttttccatgaacataacgaaaaaataccatcccattttcacgggctttgttttaacatttttgcatcttaggccaatcgttttgtcggcatccatggggtcttcttggatccttcgggtcccaaacccttgcagcctggaccatcagtccactcaagcatgagcttta

SEQ ID NO: 127550 - DNA, 393 bp, Arabidopsis thaliana columbia
agcacgctaatgttttgttaaccataaaccaaaaaaacaccagagcagttcttgttcttgtctgtgccaggctcaaacccaactttgaatcacagcaatatgaatggtcctaataattatcacacaaggtgtatgctttggtaagagcttaacaaagaacaaaccggacaatcgagaatccgataagcctttcaaaccagcgaggtgtagttagggaagagatacatcaatcggtctagagtttcaggattaaacttccgagcaaataggtaacatggacgttgctctcctttccatagacacggctttactgtcgtcactttctttaaatcgcttgtgacatggtaagcaagttggatggacttgattttcctgatgaggtaaggagtgatg

SEQ ID NO: 127551 - DNA, 396 bp, Arabidopsis thaliana columbia
  unsure (1)..(396): unsure at all n locations
ctataaaancaagacagttagagtattactgttgatatcgaagtgagaatttgtgataaaaactattgatgtaagttctcaatgaactcaaacttggtcataaacaaatcatttcgatattatcagccgccttagagaatctttcagctgatactgtcaaaagcttgttaagagacatgttctcacctctgctcttcaacttttcttcataccgatgcttgatcctgctatcaagcttgtatccaagaaatgcagggaatgcaagaagttcttcgacttcacgacccatgtactcgatcaaatactccagtttttcctctaaagaagtataattatactgcaggacttgaggatgttttgtgctcattgctagaatgtcttcgaatgaaagaccat

SEQ ID NO: 127552 - DNA, 303 bp, Arabidopsis thaliana columbia
  unsure (1)..(303): unsure at all n locations
ttatcttnnttanttttctgccttttttttttttttttttgtggttttttttttttttaaacaacattacaaatttatttcaacagacaggtgagaattcggtagaatttggctcgcaacaccgaaaacaaacgttaaggccggaaattaaaacccaagaaagaagaaaaaagccgaaaaacgggggataaaatcaaaggggggggataaagttctgggggccacacaaaagcaaagggaaattaaccggggaaggttgggggcttggaggcaatgaaactgatgccccggacttgacggggg

SEQ ID NO: 127553 - DNA, 261 bp, Arabidopsis thaliana columbia
ggggggggaaaaagttttttattaaaaatgggtaactatttacactcttcaaagaaaaagcctcagcttaatgcaaaaacaaatagcggtttatgtggaagaaagagggtgaccgtttgggatgttccacaaacaaacgaaatttttgggttttgttcaagccaaaaggtgttgcaggggaacctaaataaagactcttcaaaatcttaatttctcagggacttttcaaaaaaaaaattttttaacgggcttttttacatt

SEQ ID NO: 127554 - DNA, 420 bp, Arabidopsis thaliana columbia
gcaagcaatcgaaacttgttaacaacaatttacacatccagtgttaatacttatctcttctggaaaattaccaaactcaaaccaaaaaaaagaagagaaagagaatcacaatctaaacaagaaacgaagaatgcatcctcgatttcgcactttggttccgattcaatcgatcagaatcgcctcctcctcctccgtagtaaccagcgcttccaacatccaaactctcttcttctaccgctgtgtagtagtaatactgtccctgaacagatctcttgtagccactggtctcattagagacctcaactctctgtttcggcgcactttgtgaccgaactttagctttataagactcagtgttagccatgtaattcgggtgataacccgagtagtaatagttattacatgcccaagaatactcgc

SEQ ID NO: 127555 - DNA, 164 bp, Arabidopsis thaliana columbia
atgtttttttaattccaaggggtgatggtgatgatcacttgcatggagactaacgcatacatggtgcagctactatatgcatggcgatgtggagatattggctgtagatctaaggaagggggctgcttctgccgaaggtgtcgaaggtcaactctggcaggttc

SEQ ID NO: 127556 - DNA, 403 bp, Arabidopsis thaliana columbia
acgaagaatgaaattaatgggatcattagcagaattttaatcccgaattacatcaattttctactatgtgtgagtactgctaaaagttacaggttgttcttattccctccggcgaatcttcagtctgggagatttgacagctactctctcaaagctagaacagaggccaatggtaagatcggaccaaaagcatcatccccacaatgaaggttgaagaaagaatgcagagtccgaacaaacagtgaataggaagagtttgtcaaaatccgcagaggatgaactttgagaccgggaagaacaaccctgcagagcaaagaagaacaatagttttcaaatactgagagaaccaagtaacaggtttccacttgatctcaacgcttgaactcttcatcctcttcccact

SEQ ID NO: 127557 - DNA, 261 bp, Arabidopsis thaliana columbia
aaaaggtgaatcatataattggcaaaagccaagaatgattcggattctgatttaagagtgttacaaaaataaaaacaacggtcataagagttttggtacttgggaaactctgatgccgagtcttgttctaaaaagatcaagaaacatttttaactgtgtgtcaccaaaacggtagatattttgctttatcccattcatgaaatttttaaagatatgaaaatgtgcaaataaaaaaagaaaaatttgcggcaagggagaggc

SEQ ID NO: 127558 - DNA, 295 bp, Arabidopsis thaliana columbia
tttcctttctttttttttttttttttttttttttttttttttttttttttttttttttttttttgggggcaaaccaaatgttgctttgaaatctacaatatcataaaggtcccggtttaaagtcctcaacaaacgacttttttgaagaaaaagcttttcaaattaaacaaaatcgccttgtccaggaaaaaacaccctgccctatgagatgaaaaaatcccttgggcccataccaaaaaatattccggttaattaagaacgattgccaatttctctttttacatttacccttgaa

SEQ ID NO: 127559 - DNA, 374 bp, Arabidopsis thaliana columbia
cttatccttcttcttggctggtgtctccgttgtttcttcttcctcatgctttctcttcttcttattcttcttcttctcctcctttgcaacctctactacggcttcagtttctgcttcagctttcttcttcttctttttctctgatggctcttcctcttcgggtttctcttcttctaccttcttcttctttttcttatctttcttctttgatggctcctcagatttagctgaggtttccccaagaagagaatctgcagcagtgttgtaagtcttagcaggagtgataagaccgcctgatcccatctttttatccttgttatagacttcaatcttaggtttgcctttagatgaaccagacagacgacctaaatctt

SEQ ID NO: 127560 - DNA, 276 bp, Arabidopsis thaliana columbia
atcataaaactgtattttattttcataaatgggaagaatttcaaaacaaacttgaccattaccgtggctaaaaaagctaagctcacaacacctaaaaattaatcattcaattgcaaaggttattacaatctaaccagaattgatcctttgtttctgttttattacaaaaccacacaagaaactttcacatgcatttctctctagaaagcattatagattgattacttaccaacagaacatagtaagaacacaggatcatatcatcgttcatactca

SEQ ID NO: 127561 - DNA, 304 bp, Arabidopsis thaliana columbia
  unsure (1)..(304): unsure at all n locations
ttnntttttttcatttatttccttacacactttttttttttttttgggtttttttttttttttcccggaacaaccagaccaaacttttgataaaacaaccttaattgtttgaggggatttgtttctttgctgtccctatcaaaaaaaacaaaagggcgcaaaaaaaaacaaaaatttttttcacctcctatggtggcgccacaaaacaaaaaaattgttattggcttagggtttggacaaggggggtcctaaaccttttttccgatcttaacccttttggaaccaaaacaacaacattttgaac

SEQ ID NO: 127562 - DNA, 199 bp, Arabidopsis thaliana columbia
ggaaaaaaaattgacttttttttaccgctgaggttcttggattaaagggatctaacaaagaacaattttcctgccacttaaaaacatcatgccccttttctggttccttcttcttcattgcggaagcataccaatcctagaaattcatcactacaaaacgtgtcaacgggaaaacccaactttttttcattcttttttt

SEQ ID NO: 127563 - DNA, 257 bp, Arabidopsis thaliana columbia
ggacacaaaaataatgacgtcgtttggagaaccgttgaaacatcgtgggaacaccaatattgaaaagaccacaggcttaaaaaagaagcctacgcaacaattactacaacatcaatttccattttgaattggcttttgatatacaataccattccatgccaagcagactgggactttataagtatgggaagcatttcacgagagtttttagtcaaatgcaacttaacaaagaattttttagaaagctttgggaagca

SEQ ID NO: 127564 - DNA, 268 bp, Arabidopsis thaliana columbia
aggccacccgtataagggcttatcaaaagaaatcttgttcagattcagataattaggaaaagggttagacacacatgtcttaaccgaaagaaaaacattttttaacctcataactaaaattttttacctccccaaaacaaacaccattcgagtttaagataattgacattgattgatccccgggttaatggggaaaccttgaaaaccataaattttcgattgccggaaaaggggggtccacactctccatctgattgggcaggtctgg

SEQ ID NO: 127565 - DNA, 337 bp, Arabidopsis thaliana columbia
aaaaaaaactgggggaacggaaaagaaggggaaacattccagattggattaacaaagggggtggtcccaacaaaactaaactttttccaatgggtcccctccttttaaacagcaaaaaaatttaaaaccgccggaaaatccgaattataaaaggctttaaaggcttgtttttgggggacaacaaacttttttcctcctatggggaagtttggacccctttggctggttttttttaatccctttttttaaaagttggggggggggccctctccctgctttgtttaaggggttgggttttcctaacaggcccaggcttttttggggaaattttggccgg

SEQ ID NO: 127566 - DNA, 210 bp, Arabidopsis thaliana columbia
acagaggtgccaaaacgtattataggggtttgtctttgttacaaacagagtattccagaaacagcatgatcattcaggaatttctctatttatacaaaggttaaagttgctactccagcgtgaggagtaaaacaaggcacacattttgaaaagaggccaatcttgtgataactagctagggattacatcacggcaaagattggacgggtt

SEQ ID NO: 127567 - DNA, 366 bp, Arabidopsis thaliana columbia
aataaatatactttaattttgtgtctggcacaatctggttttttttctaatctaataaagatacagtttgtcaaaaccatgaaacaaatatacgtgatgaaacttgagacgcaatcttcgtcctttgatgaatattggcgaagtacaaatgtcttttccacaaaacttttgttacaggctgctcttaaattcttcatgtttacacagtaactttcacactttgtgctgttactgaagctggactatcgaccttggctgctttaaacagttcgtctacaacttcagacagtgttggatgtgcatgaacagcaagttttatgtcctgaatacgtgttcctaaagcaatcgcgtttgatgcttcatgga

SEQ ID NO: 127568 - DNA, 171 bp, Arabidopsis thaliana columbia
aaggggcttggaattatctactggaggggaaactagacaacactgaaccattaactactaatgggacgtctttctgagggttatgcagttcaaatgaatccactcacatgagcatatgaatatatctatcgttggggatatttgaagaagaaacttgttactaatgattgt

SEQ ID NO: 127569 - DNA, 439 bp, Arabidopsis thaliana columbia
caaaacgaaacaatgtctcacgtttcatgagctcaagaattctccataaaaagctggaaaaaatggtatttgaaaagaaaaaacaagtgtactcaaaacgtgataaaatcataaaaaggacagttgggccattagcggcaaaaccctgcaagtgaccaccaatttcacatgatcaaaaatgcaaaaagaaaaccatagacgtctgtctctctttttaacccaattttgcctttgccttgagagaagcaatgggaatcttagagagaaccttttcatcgaaaaccacatactgtttctgcaactccttcattgctttctctgccaatggatcaaccttgtcctcgtgtttctcatacaacattgggactgtgtgcaatatcacgaagcaaatgtacaccaaagtcaggaaattgaaccaattgcccaccaccgagatgat

SEQ ID NO: 127570 - DNA, 362 bp, Arabidopsis thaliana columbia
gtaattgtgattgtaagtataaactaatacacaacactgtaaattgtaaaactcatctgttttttttttttttttgacaatcaccactattggattatatagtatacaacaatgatttgcaatagaatcgttatggaaaaaaaaaagtatattccgaaatagttcactaattcctctgttttctaacctaaagaaactggtacataaacactgcttgcttgctactaaacaatttgtaagctttttcctcttcaatttcacttcctgttaccattttgcctttatatatatataccatctgaaaaaacaaaaaccattgaaggataagtagtctaagtgagcataacgaacacagattttag

SEQ ID NO: 127571 - DNA, 389 bp, Arabidopsis thaliana columbia
ggagagaaatagctatgtatatataatgcattaagattttaatcctatttaagtatattaaaaacaaatgagacattaatgtcaaaatgctaaaatgggcaaaaaatctctagctaagcactagcaagtagcaacactttgatcagttttctctccactttggatcttctccatctcactactcagtacttccttcactttgttctttagctcattgagaccttgttctgttttcaccgagacatgaattgattcatcaggtcctttttcccggtacttaatgatttccgcgtcatcactgcttctatcttctttggcatacatcaccggtgagcctcccagcagatcgcatttggacacagcatcaatccacaggtaatccttaaacc

SEQ ID NO: 127572 - DNA, 206 bp, Arabidopsis thaliana columbia
gggggggcccaaaaaaacaatttccatagggggattattacggacttaaaaagaaacaacaagggaaacagggattacaacacaagattttaaagatgctgacaaacaaacaaacaaaaatcttacgggaaggggaaggggaaccaattggagaggagagaaatggccataagagttgtatgagacataacaaattatattaagct

SEQ ID NO: 127573 - DNA, 181 bp, Arabidopsis thaliana columbia
ggtaacaaacacctcagtggcacagtacagaagccggtttaccaaagagttgttacacgcatgtgatctcgtctatatttacaaacagaagcaacgaaaatgtttccccgggaacaacaagtcgtgtgaagcatagactgctgtggcctggttcagcggtggagactatccgtcctcagat

SEQ ID NO: 127574 - DNA, 173 bp, Arabidopsis thaliana columbia
caacgtgaactggaggataacactgaaaggagctaccatggttaccaacggttcacaaagaatcaagactatttaaaactgtgatgagactgttatatgttaaatgaattggatgaataactcttcataactcaacttggatcagatgaaatcggctgttctctataggcatt

SEQ ID NO: 127575 - DNA, 136 bp, Arabidopsis thaliana columbia
ataggcaaatatcaaatcaactggggggggcatgttatggctacactggtatacataacttccacattggatccaggagctcatgaacagctaaagagtttcttgcacatattttttaagagacaccaacgtcttt

SEQ ID NO: 127576 - DNA, 377 bp, Arabidopsis thaliana columbia
  unsure (1)..(377): unsure at all n locations
ccatgcacctttctagacaaaggaaacagcacccattttgttacataacaaaaataaaaaccagaagaagaaacacaaatcatacaatacaatctatatattatggtttgncatttattactttttattcttcgtccacatagactaggcgctcttagtcatccacttactgaacttcgtatgctcaaacttgatgaattgctcagcttctttgtcaacatcctctgcttttgcaacctctctagtgcccatattctcgctctttgacctcctcatatctgcatactcgaagccctggattggttctttggctgcaaagacagctcggaactccttcatcgagtcccggtgatgatgattatgatgttgatggtgat

SEQ ID NO: 127577 - DNA, 130 bp, Arabidopsis thaliana columbia
gtaaacgatcaaacacaatgttgtttcaaaagtaaacacatcactgtcacaaattcaaaaagagaaaaattgatgcaatgaacataaacatcaaagtttattaagccaaacattttttcccacgcgtccg

SEQ ID NO: 127578 - DNA, 215 bp, Arabidopsis thaliana columbia
ataaagcttaaacatacaagaacagacaataatgaaattacacgagatagaactgatataatacacaagtgttgttgtttgctagagacaacaactaaggtgttgttgaagcagaaactggcttctcgaggactccttcagtggcttttttgaataggttatgtacctgtcttgaggtgaaaccgatcttttctaagtcggtaagcgattttaaa

SEQ ID NO: 127579 - DNA, 293 bp, Arabidopsis thaliana columbia
agggagcacttatgggtcctttttttggactcataataaaatcaggaaagaatggttctttcaacataagccatgcctaaattttagaattcctactaggaattattaaagtaaagactatgttacattctcaatatggagtttcattttatgatgtctgattagtttttatctttttgcaccatcaaaacttcgcagagatcgatcattagaccttgacatatcaaatgatgaccttaagcggcctctttatcatattgacctcatggtccaatatgtgacaatggtagaca

SEQ ID NO: 127580 - DNA, 297 bp, Arabidopsis thaliana columbia
cggtttgccctatgaagctcccgttacagaatctccaaaatcagggactacagaggtatgggaagtgataaatttgacggaagataaccattcgttacacattcatctaggattgttcaaagaggtagagcaaacggcattactggcggcaggattggaggagttcaaggagtgtatgacgaaacaaaacgacgcggtcaagtgtcaaattagcaaatacgctcgtgggaaaaagacagcggtgacggcacacgataggggttggaagaacgtattcaagatgatgccgggacatgt

SEQ ID NO: 127581 - DNA, 136 bp, Arabidopsis thaliana columbia
ttttcttcagtgcgacgcttcggctttactatgcgacacataagaaagatgtctcactactcgcaaccactaacgcctttggttgctccatagaaaccatctacatctctatgttccttgcctacactcccaagcc

SEQ ID NO: 127582 - DNA, 466 bp, Arabidopsis thaliana columbia
gaacaaaatagtaatttattaatcccactgtaaataaaacgtatgatgacaggaaaaacgacaattttatgccgatacctcaatatcaaaactgcagacaaagaacaaaacataattatgcaaaaactgaaccaaaacaaaactgtgtatagttttgagacggaagaattgagagatttggtcattttttcacttccaagctttccttcctctaaactggcttccgctgatgctattcttcatcttcttaattcgttttgatttaccagcctttgatcttattgcagcaagaggcatattcttcctgtgctccttctgtttattgcttgatcctccagtcttcttctgtttgacggcagccttggatttgtatttccctctgtcctccctacccgctttaactaattccagtctttgttcctttgttagtttatgccttatgtgagcttcaagtttggctggatcg

SEQ ID NO: 127583 - DNA, 382 bp, Arabidopsis thaliana columbia
ggtgaaaacgtgaatctaaaattaacacatttgagccaagatagaatgttgaaatatagtggtaataagactccaactggctctctttcattaagactcttgttctcaaaagaaaatataagaaaatccgaaggtttcataaagactacaggcaaaattccatagaaatcacaagctctaataagaaaccacttcacttggcagcagcgtgcttggccttgttgtgagactcaagtgcattccctgagttgaaagccttcttgcatgaaccacatgagacttgactggccgactttgggctctggtttgcagcctttccccctttcttcttctcatctgttttctgaggagtaactgctactttcgccttctttgctgacac

SEQ ID NO: 127584 - DNA, 236 bp, Arabidopsis thaliana columbia
tttttttttttttttttttttttttttttttttttttttttttttttttttttaagagacaacaaccggtttcatttcattcgtcaaggaaagtgttcttgcagtgacttttggtgattacagaaaacacaagtaaaagatggaaaggaagattcacattttattgaataagaccctgcaattatacatataagcttcaatgcttgaacaaggtttctaaaagcaaaagttgatac

SEQ ID NO: 127585 - DNA, 315 bp, Arabidopsis thaliana columbia
gggaaaaaacatttggggacaaatagagatccggggatacatgcagatactaaaccattgggacaaagggagacttgcttgacacatttaagaaaatggccgggaaatcaaacttaatgaaaacaaactcaaccccctgtttttttttggcgtttttttttttagtttatttaagggctttttataaaaaaaaactaaaatttctttttttcgttgatgagcttttcaatgagttcagcagcttgctcaactgggggaattttttgggctttttttttggccatttggatgttaaaattttcctttaaacccatt

SEQ ID NO: 127586 - DNA, 234 bp, Arabidopsis thaliana columbia
atcagaccaattttttgttttttttggtgtttttgggaactaaagagggcaagaatccttgatctgatgttttcctactaagcggctttgttttatgaaatatgttttagatttctgaatcatctcgatggatataataaactcaaatctttatttcaggagatttctcaatgggattagataatgcaggtccttcccacagctccgcaagatcctttctccgccatgacatga

SEQ ID NO: 127587 - DNA, 229 bp, Arabidopsis thaliana columbia
tttatttttttttctcctttttaataacaaggttttttttttttttgggaacacgttaattacaagacctggatcacaaattttatatacacccaggtttaggcataacattcgaagacatatttaagagggcaatattcagactgaagttgtatggggagagaaaaaatggggggatcgaataagtagaaatacaaagggttgacaatttgttggttaaccaaaagag

SEQ ID NO: 127588 - DNA, 198 bp, Arabidopsis thaliana columbia
  unsure (1)..(198): unsure at all n locations
tttattttttttttttttntttctttacaaacacaaaaaatttttctttttgggggaaccaataattttgaaacaaccacttccggttttggttacacggaaagagactatgcaagggttaagaaagaagacaacgttgggggtaattttacaacttttttctgctaccgggggggggaccacacaatcccaaacatg

SEQ ID NO: 127589 - DNA, 167 bp, Arabidopsis thaliana columbia
tagcaaaccctaaaattgagaaggagatagagagagaaagatgggtagaggaaagatcgagagaaagaggatagagaacgcatacaacagagtggtgacgttctcaaagaggaggaatggattggtgaataaggctaaagagatcacagcactttgtgatgcaaaag

SEQ ID NO: 127590 - DNA, 242 bp, Arabidopsis thaliana columbia
cactgataataaaactcactccctagaaaagctcgaaagtggtctttgcagataagaaaccagtggtgaagaaaccggcagagaaaactccggcagccgaaccagcagcagcggctgagaagaaaccaaaagccggaaagaaactcccgaaggaaccagccggcgccggagacaagaagaagaagagatcaaagaagaacgttgagacatacaagatctacatctttaaggcgttgaagcaa

SEQ ID NO: 127591 - DNA, 203 bp, Arabidopsis thaliana columbia
ctattgtactctgaagctcccataaccagaattggatgtttttatacaagatccaaaatgttcacacaaggccaccatttttattgagctatatacgactaatacttaaaccctgaaaaatctcactaattcctcaagagaaactgtgcctcttattacattgactttactcctttgcagcatcattatcatcagttgcaaca

SEQ ID NO: 127592 - DNA, 277 bp, Arabidopsis thaliana columbia
ttaatacaaacacagagaagcttcttcttaaacgatgccgtactataccagagatgacaacgacgtcgacgatttcgatgagtttgatccaacgccgtacagtggtggttacgacatcacggtgatctacggccgtccgattccaccttccgatgagacttgttatcctctctcatctggtgtcgatgatgatttcgaatacgagagacctgaatttactcagatccatgagccttctgcttacggtgatgaagctcttaacacagagtacagtagc

SEQ ID NO: 127593 - DNA, 270 bp, Arabidopsis thaliana columbia
ctattggatagagcaaaatacgaaacaaaacgtaatggagttgtgacaaaaaagaaacggaaatgaaggcttcgaaattaaacaaggaagaacatcgggcattaacttggcattacatgggtggcccattctcacatcagtcacatttagttgtattatatgcggtatgcaccctaaaatggatcccatgctgggagtggcccgaccaaaatctacatgaacaaactctgggagggatggtccagcctgggtgcacagatgcaataaaaa

SEQ ID NO: 127594 - DNA, 328 bp, Arabidopsis thaliana columbia
ggggggaaagccaaattcagagagaaaagattccagagctgttacatccccaaattaatgagggattgatagaggaaaacaaaaaaaaagggttttggagttacatctccaaatgtttgggtttgaacaatgtcatattgtttacaccaaagagttgttaaagagcaatattaatttaggaagggtcttaagagccactgtgaagaggccaccaagaataaacattaaaacaaatgcaaaaaatatcctcccaatggatttcagactttgctttccgatttctggggttgaattatttgcaaaacccgtcgaaaatacagaagaaaac

SEQ ID NO: 127595 - DNA, 372 bp, Arabidopsis thaliana columbia
aatctttcatatttgggatgtttagctagtggaagaagtatacattgaacagaaaagtaaaacaaaacccaagaaagagagcaacaagaagaaactgttgttgcattgtctagctattgtctttgtctgtgttatgtatataaaagctcgcacaaccaaacgagagaagaagaaacaataaaaaccaatggatgaaaaataaacaaatcaaaaccaataagaagccatgtgagtgtgtatgtatgtatccgtgtgagtgagtggccttcaatgtctggcgttagtagctttccgcttcatatcagcaggaccgaactgtttcatgccacgaggaccattccctaccttctgtgaagccaaaggacgtgaaac

SEQ ID NO: 127596 - DNA, 359 bp, Arabidopsis thaliana columbia
tacgtcgtcagatctgctcgtgttttcgctccatttttgggtggccattactcagcttccgttttaaatatcacattagatggacgaaagcggaggtgatcggggttcagtggccacacctgttcaacagcgagcacatgaggcatggaggatttaccaacactatcttgacaagactacacctcatgcaaattacagatggattggaactcttgacgtcgctcttatctactgtttgagggtttactatattcagggtttctacatcatcgcctatggtcttggaatctaccttctcaatctgcttatcgggttcttgtcccctcttgttgatcctgaagctggtggggtctctgatg

SEQ ID NO: 127597 - DNA, 181 bp, Arabidopsis thaliana columbia
aaaaccagcaaggaactttaatataaccccagcataaattctttggtagggggttatgggaaaacaaaacccggacatgttctatttttggaaagggttttacttttttttaaaaaaaaaaaaagggggaaaaacattcagggggtcaaaccccaaaaggggcaaaaccccctggggtttt

SEQ ID NO: 127598 - DNA, 322 bp, Arabidopsis thaliana columbia
gtctggttctcgcaaaaaaaaaaaacacacatgataaacaaaacactctcactcaaagccgtgaataaggatttgatattcttttgtacattctttctttcctcaagcactcttgtttttacaaggcttgagaacaccaacaacgatcactgcaaccacaatgaggaggatgataattgcaatacacatccattttcttgagttcttctgcaagctctttgctctttgaagtgccgtgtttcccgattgcacgtgatctactgcacttgacacctgagattctatattgtcaagcatttctccttgtgcatcaaccaaaact

SEQ ID NO: 127599 - DNA, 461 bp, Arabidopsis thaliana columbia
agcagcttataacagaatcttattattccacttaaatatcggcatttggtataacaatgtcgaaatcagttacagtccattcagcaatttgattcttactcatatatatttcagttcctaaatctatcgacgaccaatgtctctccaccggtttcgtccctggatcctggtaaaagaagagtgactgagagagttttccgacatcaagttcccaagttcttggatctccaatccaaccttgtcctttctttgtcggatacccaaactgttcccacactggatgaggcaagatctgcagaatctcctgcggttgtggattactgtacggatcacaaacctcgtacggagattccgcaaaacgcgcgtttcccggaacgcagtaatagtgatacgcttcgaaagggaacttctccttgtccgtcctgtgaactttagtcccgtttggaaaagtatgctctggc

SEQ ID NO: 127600 - DNA, 368 bp, Arabidopsis thaliana columbia
gtgggggaaaaaattaccatcttactataacaataataatattcctttcttcaagttttttaacgccatttcaagaatcttaagcaaaggacttcaaaaaagatttgaaaaagaaacaaaaggctctactagagagagagaacaattgctttgtatcttcctcagtcgatatagatttatagatatagatagttctctattgcatatagaagaatcaagaaacgacttcaaggacttgacaggtttttcagatccttttcctttgcataccaacttggtgctatctttgacagatgtggatacaagtctttgtatgaattccttattggcccttctgctactcctgtcgcatgcgatatatctttgag

SEQ ID NO: 127601 - DNA, 286 bp, Arabidopsis thaliana columbia
catatgaaatgataataatcttcttgtaataaaattagacttatgatgtcatttttgtgacaacagagtaaatttcggttacagacatgtggtactaaaactatacatgaaacctgtgtcgggttactacaaacaaaaccgacttcttttgtttagagtgaaaacttttaaattttctttttaacactctcttcgctatataatgaaaaaactgccgcagcctaacgtgtttacaagatcaagaaaggaccaaaagaagcataccggtgttgccttatcctcagat

SEQ ID NO: 127602 - DNA, 355 bp, Arabidopsis thaliana columbia
acgcgtccgcccacgcgtacgatggtggattctgaacctgtgatagagggcgctcgagattcttctgcacataactttgagtttggagaagctacagctgatgtgaacgtttgaaagatccataagaagcgaatctggtacaagaaatagcgcattacgcataaggttgagctctgcatctgtagacaaaacaaagaaacatgggattccttccacaagcgtgtatgatgatgcatcactagaagaatggccttctacctcaaaagctgagtccaggactagatctgcaagcgtgaggaaaccaattcttaatactgggataaggcagaatagtgtctaacgaaagccctcatgg

SEQ ID NO: 127603 - DNA, 422 bp, Arabidopsis thaliana columbia
  unsure (1)..(422): unsure at all n locations
aaatangttaaagaagagctttcatctccatcatgggttgtttttacgaatttagtgaaatccacttatcacgacacgaagttgaagttgttggggtaagttcctttctctatatcccgcgatatatcatcttgttcatggagttccttatgctgaggaactgaaggaaagaagtggctaattcggcgttgttagggcgatcacttaaaatcctatggtgaccggattcaaacggtggagacaagacgaaacgttccacttttgcatcacagaccacacacttatgatggtcttcctcaaggatcttctctcctgaagtagattgagtaatctgttgtttacaagagctgcaccaaagtttgtgtctgcaagggaagtttgcccatcgaatcatgttcttgttgcaccagaaacacatgcct

SEQ ID NO: 127604 - DNA, 414 bp, Arabidopsis thaliana columbia
tcgaattaaatttttgtttgtaaatataagaaaagtttcaaaatcagtctaatgtattaccaactcttttttatctaagctgtaaactcggacaaattaccaaattcgaccacaaacaaaactttgttcctaagaatagtgcacaagggagaacaaaggtaagaagtagatcaaaacttcatacatatactacataaaccatctctcgaagatcttatgatttggccttaacctcacccttgccgtgaaacttccttccggcatctacagcttctctgaaagcatcaatgagctctttgctttcagggctaagcaatactccctcgtagaaagcattggctgcctcgtcaaaccgctgtagcaaacgcagagcagcgccttctctgaagcaacctttaggccaatctgggttta

SEQ ID NO: 127605 - DNA, 349 bp, Arabidopsis thaliana columbia
cataagggtttacattctgtccttgtccaatgaagacacttacataaatgtataagttttaaaacaaaagcaaatcattgagacataaatggagatagtctatatgaagaacaaaaagaaaagagagggaaaaactgttagtgtaggccttcttcgcatttgacaataatttgatcgacattaggtgaaatgacgttcttgcccaccaagtcatgagccttcaaggactctttgttccaatctgggttataaacaacggtcaaaatggagattgcacaagctagctgtgccccaagcaagccatagcataggcccatgaagcctaaaccccacacaaacgctaaaacaa

SEQ ID NO: 127606 - DNA, 386 bp, Arabidopsis thaliana columbia
  unsure (1)..(386): unsure at all n locations
aattnttcttttgggcctatctatctattaaccaaggcatcttcaagtgctttcccatatttacaacaacattctcctaaagagcacagacacacactacatgtaacactaacagacttggcacttgaaacctaaagatacacacagtaactctaaaccaccattgttcttcttatggttttgttcctttgtgcatctctctatatctcatcttataatcagcatagtaagaaacttgaagaccaaagttgggaattgttgcagagaactttacttgtgcgactttgtcagttttacctttttcttgtgtgttgttggtttgaaggaaagaagaaaacccaagaggaaactttgttgtggtcatctttaagctgagagaaacctat

SEQ ID NO: 127607 - DNA, 331 bp, Arabidopsis thaliana columbia
attaatgtagaattcgtgtatctttcttaaagggttcatatcattccataccaaagagagcaaaacattcaccatcaataaaatcaaaatataaaatctctctttaggtcagtctgaaaggtctctgcactataacagttctctacactaaccaacatttgcataaaccaatgttagatcgcttggggaatttgcttgacgctgatttcttccaagtctatcctggaatattttttaactggtacaagtgaaaacccctgagtcttggactgttggttaacgcttagcggctagcgggttacatgctagtgagtgaaggcactccttggct

SEQ ID NO: 127608 - DNA, 271 bp, Arabidopsis thaliana columbia
gcatcacctcataccataattgtggtaaatatatataagacaaaatgtccattaggtacttttcatcgcatgataaagaaaagaaagacactctgtgaacatatacgtatgaactcgtctctctcatgtgcccgaaactccttacaacctttatttgacagttaaaaaacacggtcacagaagtttcagcattttcagtcttccttcgtgctctgcatccagcttcgggggagtgtaacttccgtgaagatcctccacaatgtactccttt

SEQ ID NO: 127609 - DNA, 332 bp, Arabidopsis thaliana columbia
aactaatataaacataaaagatatgtgaccatcattattaagcataccacaaaaaggaacaaaaggactagagaacaatgcaagctctattactgattctgctttggtatcaaaaagagacttaacaagacattatgggttaagacagataacgctttataggagaatgataagacataacataagactccacgaaattggaaccgggagagcatgtgggacgaacagaaacgggcattcagatactaacatctaacattaggacaacctttttgggaccatcttatggttgtggctttggagaaaaaacaattaaaacatcaacatcccct

SEQ ID NO: 127610 - DNA, 360 bp, Arabidopsis thaliana columbia
ataaaaacaattaaggggggcctttaaaaactgggtggggggttccaacacaaacatattcatttctaaacaaatttgagcaaatacacattaacattgaaaggaagagataagttagtgggtaataatgaaaaatgaagatcatttcttatttacagctttttctttctttctccgaactatttcatcggaatacttgactcctttccccttgtatggctttggtgggcttcaatttctaaccggtgcaacaaactggccgatttcgctcttgtcgcattcactcacagtgattcttgggttctattgcactttcactttcagactattcggaatctgcatctttaccgggtgtgaaaa

SEQ ID NO: 127611 - DNA, 437 bp, Arabidopsis thaliana columbia
ctagtttctagatcgcgagcggccgctcgcgatctagacccaggcgttcgcccacgcgtccgcccacgcgtccgaaaaaataatggcagctttggcatcaaacccccaaatgctaactagacaagctcacggtaacaagaaggaacaattgtggaggaaagagagtttaaatttggagaagaagtgtgggttttgtgtgagcgtttacagtaatgaaaagcttgggaggtcacatatggagaaagagtggagactaaaagccttttggtcaaacatagctcagcctacgactttggagatggaacccattaacaacgttgaagaactcgatgctgttctctctcacgcacgccaactctttgagcctatcatcatcgaatggatggcttcttggtgtcgaaaatgtatttacttgaagcctaagttggagaaattag

SEQ ID NO: 127612 - DNA, 237 bp, Arabidopsis thaliana columbia
cataaacttaatccccttttcccaggctccaatggaattcaataaaccaaaacattttttcaatgggcacttatttgatttttgaaattcaaatgatctacagcttggtgggtgggagaccaacagggttggccctagacctttttttcaccgcacgagagaggtgctttaccgcttttttaggcaaggggcgaggtttgttaaaccacaatccttcatttaccaccattggttggc

SEQ ID NO: 127613 - DNA, 256 bp, Arabidopsis thaliana columbia
aaccaaaaaaaacgccccgaacaaagaaaatgacagattggtccaacgttcatgaaacgcgatattaactttttatttacaagagttcaacatgaaactccggcgaaccatgaggaacgatttttagagagaatcccaaagggaactttaaacaacaaatccaaaatttttttattttttgcaaaagatcttcattagctatatatttctggattttgattttttctttaacactcccatcgaccaaatttttttt

SEQ ID NO: 127614 - DNA, 147 bp, Arabidopsis thaliana columbia
acaaggagcgtaaaacccatttctcaggccccaatgggattcaataaaccaaaacattttttcaatgggcacttatttggtatctgaaattcaaaagacctacagcttggtgggggggagaccaacagggttgggcctagacctttt

SEQ ID NO: 127615 - DNA, 392 bp, Arabidopsis thaliana columbia
tattgaaagataagctgttacgatgatggaatgattcgcataaacaaattcgttccctaaaatcaaaatctcatagcaagttgtaacccatcaaaactagcgaaaacagatacataggttcaaaagaagaagagctttgagttgcaatgcagacaatgaaatggtccttcttgaaggacatgatcaactctattcttctcaagccacaagagtgcttgcagttgtagactcgtacttccagacgggtgggagcttcttggtcttcttgtagtaacgagcaagacgatggattctgctctctacaagaatcagcctgaatttggaatccttatctttcctgttcctctcaagatgcttgcggatagcaacagctttcttgatcaagtgataca

SEQ ID NO: 127616 - DNA, 238 bp, Arabidopsis thaliana columbia
acgggggggaagggtacagggtttatatcatatatacgatcggatataccggattttaaaacactagttttacataggaccaaagtggtggggactcaaatatacagaaataaaccatttcttagaatatttaaacacatgtttttagcttggaatagaatttacaaaagttttcaaaatcaaccagacttatgtggaatttttccaacaaagggacgtgctttgcacatgggtacca

SEQ ID NO: 127617 - DNA, 257 bp, Arabidopsis thaliana columbia
ggggcaaacttttttattattattattaaaaaaaaaacgggaaccgtttcctttgaaggggggaataaatttaaaaagatcccaatttcacaaaagggttttataatttgggtttttttacttaaaaccttaaacaacgatgggtcatgggtctcatcatgttcttatttaataacttttttttaaagaaatcgtccaaaggccatttttccattatttaatggaacaacaaaccccccgacgacccccttttttta

SEQ ID NO: 127618 - DNA, 203 bp, Arabidopsis thaliana columbia
aaaaaaaaaccttttaatccagggaaaatcaactaaaccgaaattaaccaaaaattatttattttttccaacaaactccttaaaaggaactttaatattttaaaactgggcacaatcaccatacaaaaactcaccaggttttttaaactcaacattttccaaataataagaaaacgggttaatcggaaacgcattttccgggg

SEQ ID NO: 127619 - DNA, 239 bp, Arabidopsis thaliana columbia
ccttcgcttccactttaaatataactttccaaaggaacttgggggagattttttttacacataaatttgtggcccccagacaggagaacgaacaggccggttcccccaacaaaagtaaaaaagtggaccattataaacaatgaaaaataatttaaattttgggttttttttaaccctcaaaacagggaaatttttggtcgctttttaacaggtgttttcacatttcaaaatgtccgggc

SEQ ID NO: 127620 - DNA, 387 bp, Arabidopsis thaliana columbia
  unsure (1)..(387): unsure at all n locations
nnnnnatantntatatttaccgnnncaaaaacaaaggggggccttggaaatcagaactcttcaacatgttcaagacattgactaacaacattcagaagaacaacaacatattttgaaacagaaacaaacatttgacatgagagactaaacgtcaatattgatctctgtttggtaaagctcacaccatcttcttgttgtgtctcttatgcggagtggacaagttagatcctaaagccacaactgttgttatcaaagtaccaattttaggccaactaaactcatcatccatgaaatcaaatgccaacacaacaaacaaagccacaagtggcgaagtacacatatgaacaacatcgccaaacacacccgaaacataaagcaccaaaccca

SEQ ID NO: 127621 - DNA, 369 bp, Arabidopsis thaliana columbia
  unsure (1)..(369): unsure at all n locations
tttnntnnnnnttttatatattatttncnnnnnnnnnnnnnnggggnnntttgaaatttcctttcgttttcccttggaaggccctcggcctaaaaaacccatttttcctataatattatattcaaaaacatattgcattttcactcgaaagacaaacaaagatactctaattcatttaacaggggggctaagggaagacccctaacttacgtctcctcataaaccctagaaaaattaccgattggaaaaaaaaactctgcctcactatttaccttggacacacaaaactttctttcgcccaaaagaaatggtcctaggtaacttggtactaaactactccacaaactggtaaaccatggggaactgatt

SEQ ID NO: 127622 - DNA, 172 bp, Arabidopsis thaliana columbia
  unsure (1)..(172): unsure at all n locations
accaaacaacaggggcccattgtaagacagcgcacaaggggacccccaaacaccgcacaaggcacaaaacgccctcccaggcaaaaaaaaaaaccagggncnangaggcgaacangcaaacccaaaaggctcactattatccaaaagaagctttgcaatatcagcaacccag

SEQ ID NO: 127623 - DNA, 250 bp, Arabidopsis thaliana columbia
ttccaataaaatggagacacgattttacagcattttaagaagaagaaacaacttcaaagaagaagggatcattatcgtgatcctaaaggggggtgagctccaaatcatcttaggaaccttttttttttgagtgtgtggggaatttcaagaaagacgaccttaaaacatcaaaagaaccattgcttttagatgggtaagcactgtgactttatttttagcagcaagcaaatccatctttgtgactgtcaag

SEQ ID NO: 127624 - DNA, 250 bp, Arabidopsis thaliana columbia
cccgttaagaaccggcaaagaccaattcattttttggcaattagcccaatttgggaagaaaaaaaaattggggggcttttaggcccaagggtaaatggtttcaaaaacaatcctagcaaaaaccccacgtgtttcatgaaagtctccaagggcaagagacctggagtttatcctaccctctaaacttgggacaacaacttttttttgggttcctttttttttcacatttccaaacatttttttttctttt

SEQ ID NO: 127625 - DNA, 149 bp, Arabidopsis thaliana columbia
atttaatcaaaaagctgtctacactcaacctatggcgaatgaacaagaagacatcatcttacctcactatgggtctgaagacggagacgagtggtatgtggatgacggatgattgcatgaaatcgtgcatggagatgaaatggaagaaa

SEQ ID NO: 127626 - DNA, 305 bp, Arabidopsis thaliana columbia
ttcctttttttttttatatttttaacccccaaaacaatgggacgatatttactaaaaatcaggggtacaaatcctgggccacactcgatggccacatgtacagactattcttaaaaactgggtctgaccctctctctctctctgataagaattacatgaatagagaggcacaccaactacatacggataacctctgcagctcgcatcgcatgacatgacgatttctactggaactccatataaagaaggcctctctcacccaatgagagagcctatcaaaggccgctttagctgctattctttat

SEQ ID NO: 127627 - DNA, 344 bp, Arabidopsis thaliana columbia
ttttttttttgggggtcaagattttatttttattctttttattcaaagggggccaaactcaaaggtttacaacagccattaacattaaaattcaaaaacattaacccggaaacattaaagaggaacaacccaaagcttccattgggtccttaagaacattattattattattaacaattttagacagatctaagaaatttggccacaattaggaatgacaacagggttagaagttttttcagaggcagatccaacctttttaatatttttaacaacatttaattccttaacaacttggccaaacacaacatgttttccattgagccacgaagtttttttagtac

SEQ ID NO: 127628 - DNA, 256 bp, Arabidopsis thaliana columbia
gaatcaaccgatttttatccccgaaaacatatttttgaagaagcttgttttcaatacaaatgaaatttgaaacaattcagtacttaaggccttaaacaggtccaatcatatgatcataaccatgtttttatgttccaaatttgttttacatttcttttagggctaacaagagcttctgggaaagctttttctttggaaaactggtgggaactcttgaaaaaaattttctgggggcaaaaattacccgaaggggggt

SEQ ID NO: 127629 - DNA, 239 bp, Arabidopsis thaliana columbia
aaaccctttttggttatgggaaaatgttccccctaaacattaagaaaacttttcttggggtgaaataaagcaaaagaaccgcccgaaacaagaagaccctttggggcccctaaacaacccgaatttgaaaaataatcgtttcctttaatcagaagccacttggctcccagggtttttggagaccagttcgatcttcgggttttttttttttggggaaaaccccgggggcgacaacccca

SEQ ID NO: 127630 - DNA, 128 bp, Arabidopsis thaliana columbia
gggaaatgaagaaaagcatctatggaacccctcatttgattcacaaagtctccacttttgttttctgaacatttggcgaccgaagaaacgggtttacatgctgtgcgattaattctagtttatttttt

SEQ ID NO: 127631 - DNA, 172 bp, Arabidopsis thaliana columbia
cttatgtacaaggatccaccgacggtggcggtgcaacccacaacgactgggaatccactgttgcagcgacatcaatctgaacagagactaagagaagtaccggagattgtcgaaacagagactacaaggatggacattacgagcggtcaatcgaagcaccctaaattcttga

SEQ ID NO: 127632 - DNA, 178 bp, Arabidopsis thaliana columbia
ttttattacattttttggtgaaagcaacccctaaagcaaaaatgtcttttctctaacctttttttttgtcaacattatacgctcttcaactttccatacattttatggggaaaagccagccaaaaaatgccgaagcattccacaagaagcatttgtcgggtatcaatggggaagaaca

SEQ ID NO: 127633 - DNA, 138 bp, Arabidopsis thaliana columbia
ctttttcacgttttcgcgttgattcactgggcagctttatgtgaaactatctctgtgtcgtctcgatcgacctccctaatctaaaaatctgaattgatttcttttgatcataaacaatgcatacaaaacacatagttt

SEQ ID NO: 127634 - DNA, 302 bp, Arabidopsis thaliana columbia
gatgacatatatatttaaatcaattgtattgaatatatttatacaacaccacccccatatttcttctcaaatcaaacaacctcattttcaagtgacacaaaagttctatgcatatttttactattttatcaataaataatgaaagatcaattgtacattggtacaagagcaaacacttctaagattaacattctactcatcctactccaagatggaggatggccaaagacgcttccacatttcaatatcttttttacaatttatttttcgaattcctccatagaacccgtttttctcgttac

SEQ ID NO: 127635 - DNA, 342 bp, Arabidopsis thaliana columbia
gttgaggttcggactttactacatcgatttccagaacaacttgacccgtcaccaaaaagtttcgggcaaatggtattccgaattcctcaaaccacagtttccaacctccaagctgagggaagaactctagatgatcaagaatcctatcgggacaaaataattgagtacaagagtcttgaagatgttgttgaggataatatcagtttgtgtgttctatggatcgttttcatctaccggtccttcctatgttagaaggacttgtgagttgttcgagttttaataatatcaataaatgtcttcttttttaatatatgttgagttaataattaaatctgcttatcg

SEQ ID NO: 127636 - DNA, 157 bp, Arabidopsis thaliana columbia
cctttgcgtccgtttcaacttattgctttcttccttctggttgttccccaaaactcaaagaactcttgatctgtgtaaacaaaagaaaaatcaacggttcaatctcggctccattcattgtgtgtcatgggattagagatcaatgctccaatggtgg

SEQ ID NO: 127637 - DNA, 135 bp, Arabidopsis thaliana columbia
tttttctttttttttttttttttataagaacaacactgatactcaaaaccgtatttccccatcggttacataatttgtcatctgcattatatcgcagaagagagtcgaaaatgcatcaaaatttataaaccggaa

SEQ ID NO: 127638 - DNA, 301 bp, Arabidopsis thaliana columbia
aatacaaacaagccattgtcaaattaatatatagagactacaactttcaaggacggttaaaaaaaaagcttataacgacaagtcactgaggttcgatatgccacaaacgaacggaagcgtcttctccggaacttgctacggtgcaatcatcaatgaaggcgactgcgttcactccaccgagatgagcgtttcttgcggttatgcgacttgaagctggcttgtccacttcatatacaatgacgcaagtgtctatggaccctgtggctaccatcttgttgtttggtgaccatgccaagctgtt

SEQ ID NO: 127639 - DNA, 229 bp, Arabidopsis thaliana columbia
ccaactgttcttatcggatccgtaacgctacaaaaattctgatactgtaagttgtatgtacagagatgagatagagaaagcgagaacaaaaagctaaagacaactagagggactgataagtggtaagtagaggtcctttatttatcagccagattctcgtttgcagttcccaggtaataagtacttgtagctatcagcattctgaatcaagtatccagggagatgaaca

SEQ ID NO: 127640 - DNA, 471 bp, Arabidopsis thaliana columbia
  unsure (1)..(471): unsure at all n locations
ctttagagcagatattattgaaaccggaagcaggcattactcttcttgctgcagttcgcctcggacatctgatgggccttcaaaagagctgatggaggagcagtctgtgaatgggagcgatgaagatgatgaagaaggcgacgatgattttcatgagcctgattctgatgaagatctcagcgataacaatgacgagcgcaaccgcgacgagattggatcggtggatgaggaatcgacaaagtcagatgaagagtacgatgatctggcaatggaagacaagagttactggacagacaacgaagaagaagagtctcgagacacaatctccatggtatcgcaaaacaaccacaacgaggcttcaaagaccaacaaagatgacaaatactcccaaaacctcgatcttttcctcaagacaacgaaccagccattgactgaatccctngagctcacgagtgaatacagaaacagaat

SEQ ID NO: 127641 - DNA, 477 bp, Arabidopsis thaliana columbia
agggaccaaaatctccggaagagatgcttgccatactccagagaattgtagaagatagctcacctactttggtaactgctagggttgaggcggaggaaagaagaaccaatctgcgtctgagagaggaacaagatgctgcttaccgtgctgctcttgaagccgatcaagcaagggagcaacagagacaggaggagaaagagcgtttagagagagaagctgctgaggcagagaggaaactcaaagaagaagaagaggctcgggagagagcagcgcgtgaagctgaagagagacaagctgctagagtgcgaatgagacaagagaaagctcttgctcttggagaagaacctgagaaaggccctgatgttacacaagtgttagttcggttcccgaatggagaaagaaaagggaggatgtttaagagcgaaaccaagatccagacattgtatgactacgtggattcacttggactcttagata

SEQ ID NO: 127642 - DNA, 331 bp, Arabidopsis thaliana columbia
aaaacttacgcaactctccttgtgctcaaatctgacattataatgacaaaacttttataaagatgtactcactagtcaaagtttcaaaccaactaaaccggttaaggtaagagacaacttgctgccttagctgtatccagaaaataatgtaaagactaaagactgagagcatcatttgcaagaggcaggggattttattaactctctcttggccctgggtatagccttctaagagaactacatcgacgcttctgctttctacctgttgagagtcttccagatgcatgcaaagcctcttctgccatagccctccagtgttgagcgcaggagt

SEQ ID NO: 127643 - DNA, 374 bp, Arabidopsis thaliana columbia
gcatactccactctgacgccatacataaacaattcttaactttatcctctcatccttatcactcttcctcaaaacttcgaaaatgcatgcgatcgatttcaaagagattcaggagaagctctctgatggattccggccttggcaacgatcgtttcagttctgggctcgtgccactgatatctacaccggatacaaggtttctctttgattgatgggtatttcaacttcgtatgaacttcgtcaaggatgttaataagcacgaggagatgtgggagagacaacatgaacttgctgctcataaagtttattctatgtgctctgaccttggtggtttcttccttaagattgcacaaattctagggaaacctgacttg

SEQ ID NO: 127644 - DNA, 220 bp, Arabidopsis thaliana columbia
ggattaacttctatgtattccaccaatcaggtagccaattcagagggtgagggagaacaatttgacttcaaaaaaaccttttttttttgtttcttaacaaaaaaaaaacaggttaatttatttatgggcacattgtttgtgaaaaaggggaagaaaacttagaacgaggcgttcaagctgaagcagtgagttacgaaagatttttccattcaagcttaag

SEQ ID NO: 127645 - DNA, 187 bp, Arabidopsis thaliana columbia
aatccaactgatataaaactttatggccaagggatataacaaataaaaggtttgaaaatccaaatgggagattaaatggtcctaaaattgaatttggggacaacccccaaaacgctgagttttcaaaaaaagattttccagtttttttttttctccaagaaatatccaaacccttacccaacggtaa

SEQ ID NO: 127646 - DNA, 228 bp, Arabidopsis thaliana columbia
tcggatttttcagaaaacagaaaatggcgaaggcacggggctattttaatactgctccgaccttatgcttccaatcttcaagcaaaaaccctaaaccttctcactcgttttcaactaacgattacaccttttccttgggacagaagagagaactgcttcatacttcaagatcccaaagttttgaagttaaggcctgaaaccataatcctcagggcactaaaccaaaca

SEQ ID NO: 127647 - DNA, 185 bp, Arabidopsis thaliana columbia
gctgccgtaccaaaaaattgggtttttttaaccgggttttccaaccataattttttaaacatttggtttttacaatgagccaatctttcttggctttgcaaatttgaaagaaacaatctttggttttcagtttttttatccgaatcacagggttcagtatactgggctgccccagttttgggtaa

SEQ ID NO: 127648 - DNA, 387 bp, Arabidopsis thaliana columbia
tgatgaaactctggaggcatttttcatcttgtcaaggtttacacaaaggtttaatattggctacaaataatctgcgttatatgattagagaagcaagctctggtcattatcaccttctctcttcaagaactggtactgctctttctcctcctgacaactttcttcacagtaaccgtgttgtcgctcttctctttgttgtctgtactattcacagcttttacagaatccggttggctcctcatgcgcagtatctcgccctttgcagagcccaagtcctcctcgagcttcttcactttcttctctagcacttccctttcttttcctagactcatcacgaggatatgtgcatcttccacattttccttagcttcttttgatgcattcttt

SEQ ID NO: 127649 - DNA, 314 bp, Arabidopsis thaliana columbia
taaattacattgactcgtgaatcttatttcttacgttcattgtattgcatcattacatgatttccttattaccttgattacattagaaacatgggacgtacaaaagagttcttaaggtagacttgtctcaaggctcatggaagttccacttgcttaatattccatatgtctttggcgtattcgtggatcgtccggtcactgctaaacttgaatgaacctgctgtgttcattattgacattctcgtccatcttttctggtctcggtatgcctcgtcgactttttcttggcattcgatgtaactaggaaagtcttt

SEQ ID NO: 127650 - DNA, 210 bp, Arabidopsis thaliana columbia
tttttttggggggcaagggaacttggacaagatcacattctggaaagaggggggttttacattacttttacttttaaaaaaaaacactttttttttggggggggggaggaaaaaaagagacccttttatgggttaaaaggaatggttttacaaatcaaataattcggtgggtccttgggttgggcttttgggtcatctggggatgctttc

SEQ ID NO: 127651 - DNA, 351 bp, Arabidopsis thaliana columbia
caaacaatttcgggggtgctcataaaataatcgggagtccccacgaacactaaataacttacttttaactattactcttcaacgatcttcaaacaaagaaatgtcgtcattacatccaaatcatcactaatttgggagaaaataataataagcctactatcgaatttacatcttttgaaaaaaaggaataagaagattccctcatctgggagcgaaagagacggtgatatccgttggccgtttcatattcgccgaccatttttccgattctaaatacagttgtgatatttttccggcgactcttcccatctccggcctattcactggatcatcctgaacacaatccaacgc

SEQ ID NO: 127652 - DNA, 278 bp, Arabidopsis thaliana columbia
cttacccatagaacttctcttttctggcttttatatcttctactcttggcttatctctaaaagaacacaaatgggaggtagtaagaagcatgttgtcactagaacctcttctccttctcttgcaattgtccaggcgaatcctcatgacaacagagaagttgttcccatcgaagcaccgattatatcttcatataacgataggattaggccgttgcttgacacggttgaccgtctaaggaacctcaatgtgatgagagaaggcattcagcttcccacca

SEQ ID NO: 127653 - DNA, 244 bp, Arabidopsis thaliana columbia
tttttttttttttgtttttttgatagttttggttgctgttttttctggggaaaaaaaataaataaaggccaaccttttcctggggatgggggggtcaaattttttcccattttccattacaaagggctcaaatttttaacttaaggtcattccccataatagcatacaaacttttttttcctcccaaatcccgatcaaaacccagacctttaaaagaaactggacaatggttttttttgtgggg

SEQ ID NO: 127654 - DNA, 263 bp, Arabidopsis thaliana columbia
aaagctgaaagttaaatcctaagcatataaagaaagaatttgcatactagcaacaagacatgctaaacattgagggatcacaatacgtagttccttccttggaccggtatcgggatgtaacatctagtcatcataagctgttgctgatgctgctgctgctctagttgatattgctgatcatcagctcttcttccagtactctcctttctactattgaccaaatcgaaaatcaacttagtgaagacacgagccgtcaattcgct

SEQ ID NO: 127655 - DNA, 282 bp, Arabidopsis thaliana columbia
  unsure (1)..(282): unsure at all n locations
tttntttttttttttttttttttnatantttttttttttttggtttgtttttttttctttaaaagaatatgggccactacccctggccataaaaagtaataacctctaaaagggaacataaagaggatcatagcactccaaaacgcttgggagaaactaaaagagaaacttaaatggaaacacaccacatttaacatttacaccaaccaaagaacttgatagaaaatgggggaagccaataagggaggaaaggaactctttctggaccacctttgggggctt

SEQ ID NO: 127656 - DNA, 311 bp, Arabidopsis thaliana columbia
aaacttatgattacaaattaacacacaaaaacaaaaagaggcctttcacaaaaagaaacaacagagggaaaaaaaacaaacagaaaatataataaaaagagactggtttgatggatattctctctcagttctgtctccatgttctttaacttcaaccccaccattgatgcacagcaacaccttcatctcttagtttgccataaagagccaaacactcccaataagccctaccacttttactctgcatctttcttccccttagccctaaaccctttggcttgcactccaagaaaagctcatccaccattttt

SEQ ID NO: 127657 - DNA, 267 bp, Arabidopsis thaliana columbia
atcaacttacccttctttttttcaaaatcttcaggaaacagagaacaatttgggaagcccaatttggttccaccattttttaagctttcataactgaacttcaaaaggggaagaattcttttttccatacctggaaacttggggcccggcgaattcaaaacattaatcgcatggccccatttttggacaggctttttacataccatgggtttgccaatgacattgagggcaaggggcaagccatggtattttgcagcaacttttttt

SEQ ID NO: 127658 - DNA, 338 bp, Arabidopsis thaliana columbia
  unsure (1)..(338): unsure at all n locations
ttttntttttttttttgtgtataatcttgttttatatagatgcatgccagttcttgtatttcttgcaatttgtgcagtcaaattttctgacttggttgttctgaataaattagctaggaaaaaaatgatcccaaggcagcctgggatttaaaactattttggtcatttgccaaagaaaaaaaaagcaagagaagatctccccactcttgctaccaaacctaactcgaggatggcttggtaggcaaggtaggtatactttgttcatctctgaaaaagttttctggatccacggctgttttgactttgaccaaccgatcaaaattctctccgaaatactt

SEQ ID NO: 127659 - DNA, 289 bp, Arabidopsis thaliana columbia
aattcaactatttccaggtacatatagaaaactttgtgtgaacttttagatatcgcgaccatattttaaggttgtattcaatttttcttgctagcaacatcaaccaataatatttaagaataataggtgcttgagatccttataacatcttacaacaacaaagattctgcagaagaaggagagaggctctcaagtctcaaccacgacttccccgcttgccctttagctcagggtccctttggatgtgatcaagtatcagtagccttggtccaggcgggatgctcacgtc

SEQ ID NO: 127660 - DNA, 407 bp, Arabidopsis thaliana columbia
aatgtcacaatcggacgtttctttatttcaaacatgaattaaacataatgaacattaaaataaacaaaaaacataatgaacatacaaatgtctactgataacaacaactcatgaacgtaacaaataacaatataataaaaatgaaaccgatcgcaagagaaaatcttgatcttattagattatttacacctcttcataacttcaccactgatgtggagttggaatcagctcaagagggactttcttggcgacgacgaaagctccagcttcttccatgtctatgtcttcaattttcattccatcaggcaaactccaatcaaagaagtaaagaacattaagtaaaccgagctcgacgatagttatccccgtagccattcctggacaaatcctgcgaccagcaccaaaag

SEQ ID NO: 127661 - DNA, 187 bp, Arabidopsis thaliana columbia
aaaacattgtcagtcttttaaaatggaactttgttttattcattcaagcggtgcgagatcacaacagatggagcgtcagcacaaatttattatcaaacatcgcctaactgagtgggacagaatgattacaggaattaggaacgaccagaagaagtgaataacgatgtgattacttggtgtacaagac

SEQ ID NO: 127662 - DNA, 362 bp, Arabidopsis thaliana columbia
agaaaagtaatatgttactcgtagttaattttctaacgaatgttatatacaatcacataccgatacttttttctttcttttcttaaaccgttattgtactaaatgtaaaacttgaagaaacattcaccgaagcagagaagataaaggtaacaacaaaaacaaacttatcaattctttgccccttaagtattgataattaaccatccaaatgaaaaagattccaatctttgtattatttctttgttttctccatcctccgatcaataatcacgtcttctccttcttcaccggaaccctaccgtcagtaccagcaagcattgcgtacttatcctttcttgtgaaattggtgcactcaaaaccta

SEQ ID NO: 127663 - DNA, 372 bp, Arabidopsis thaliana columbia
  unsure (1)..(372): unsure at all n locations
ttttnttttttttttttttttttttttttttttttaataaaagattggttacaaaagaaatattatagagtttgtattatcatgttgaacggtaacaatttttattccagcaaaagctttagcggtatgttggagtctaatcgtacttaataaaggttcaaagctagaatttgttgacagggactacggctccatttttcgcaccagactcgagcattgcttcaagaactgcaacgtcacgagcaccttccacatatgatagacgaggctcttgctcctttgaagtttctgaaatatcattgaagaacgcttttaactcttcagtcactccgctgaatgggtaaaagatggtccttgatgtccctccttccc

SEQ ID NO: 127664 - DNA, 310 bp, Arabidopsis thaliana columbia
cgatcaaaaccaaaataagctccatttcaagccgaaaattggacaacaaaaacaagggcccataatgaactttttccacttaaaattcaaaagctaaaaacaagaagttaacctttattgataccaaaaacattttttgataccaaaatcaataacaattccgattgaaatatggagcctttgagaaagacttgaaatcataacttgacgaacacgagaagataatttttgcgcactcataaattcataattcccataaagaaaaagacaagacttggaagggtctccacattaacaaacttttggaagc

SEQ ID NO: 127665 - DNA, 142 bp, Arabidopsis thaliana columbia
gaatagagaaaaattcacgtgggggtcaattactggattggttttagacagatgtttcgaagtttttgagcgaataaaaaattaactgtgttgcttgctgcactaaaacaaccatgtcgtttttgaatctaaaacatgtgag

SEQ ID NO: 127666 - DNA, 462 bp, Arabidopsis thaliana columbia
ctattaacgattaacgaaaaatgatatcacaaaatcgtcaaaccatgctacatagtaaaagggactgctctatagtgtcccgactccaaacaaaaaaaaaaaagtggataatgatattagtgagaagcggaagcaactttctcgcagttttctgattcagaatcatcttcagagaaacttggcggtttaggaatgaggcctaatgtcttgaacatgagctggtcagcgtcaaaatcattgtttggtgtggttaaaagcttctctccggtgaagatagagtttgcaccagcaaggaaacagagagcttgttcggacattgagaaccggactctaccagcagacagtctcaccatcgcttttggcattacaatacgtgcggttccaatcatcctgatcatctcccatatctcaactggctgcaaaaacacaaacggttctcaaagccatttcctactaagtagc

SEQ ID NO: 127667 - DNA, 188 bp, Arabidopsis thaliana columbia
tttcttttttttttttgtaacaacaccttataactccgatccaaagcggatcaatcattggatgagcatattctatgaacatgagctgaacatggccaacgttagagatctcgaactggaaaagacacagaatgatatcaccaactattataacagaacggggactgagaccgtggagaaaccataat

SEQ ID NO: 127668 - DNA, 190 bp, Arabidopsis thaliana columbia
atacttccaacgggctccaaaccaaactgctcagaggtacagaggacacaatccaaggtgtggttacaaagtggaccaaaaattaacgaacttgacgtgtctcaaaattaagcagatagagatagggaaccaaaaaataagatcggggaacacaaaaaacttgaaacaatctagttttgcttttgggctt

SEQ ID NO: 127669 - DNA, 296 bp, Arabidopsis thaliana columbia
gagattgaacaataattcaaatttatgaaacaaaaactaaggttcaattcaatacttattcattcatctccaatattattacaaatgtaacaaataaatacacagcgagcaaaacagagttcgattttcgaacaccattttcgctcaccatcttcaatttcgattccacaaatggaattccaaaaaaaatcaaatcaattaaacaagaatattaacataatttaataaactcaataaaaatgagagcttgatgaaccttttttgtcagaagactagttattattggcatgctttac

SEQ ID NO: 127670 - DNA, 180 bp, Arabidopsis thaliana columbia
aaccgggactcatgaaccgaaaataaaaggcggggtggttccaaacaatttaattcccccgcccaaaatttgggttacaaaaaagttttcacacccatttgaactcggtttttttttcaaacaaaagcaaccaaaatgtttccccgggaaaaacaagttgaatgaaacaaaaactgttgt

SEQ ID NO: 127671 - DNA, 397 bp, Arabidopsis thaliana columbia
caacttacataaaataaggttcaaattggaaatgttccggccaatcacaaattcacaacattatatgttctcatcaaaaaaaacatcccaaaataaaaaatgcaaagtcaacattataatttataaaaaaaaaaaaatcctacaaatccaaaaacatcctctgtactcatttcttttcttattttcttctttaaaaaaaaaaaacaaagagcaaattcatcaccaaagatccacgtcatgactgcattttctcgacacaatcctcgacggcgccgtcaatttatccaccgttacatcacagtcaacattaacaatcatagtccacgtcttaacagaaccaaacttaatcttcaccggagctttaatcttcaacttaaacggcaaccgtttcttactc

SEQ ID NO: 127672 - DNA, 424 bp, Arabidopsis thaliana columbia
actgctagcaatcattgaaaacaagaattataaaatacgtgtggttaaaaaccaaatctactacagtaaaaccataataatgacacgtctgagatcttgttctgatgctcacaaattgatctcgggggtgttaacctaacaatgaattacacaaagcaaagtatcagtcatcttcatgaagcttacacacacgacagcaaccaaatacacacatgtagcttgagaagtaaacagagtaaggcaacataaagacttgattcacctcacgatcctcttctctcgaggataaactgttttaagaaagcatcttgagaaagcttttgtccaatctcccatcatgcaacatattagtgaccaagccaatggttgaagcatctccaacaaacctgcaactcctcatttctctgatgagttcagctgatgc

SEQ ID NO: 127673 - DNA, 309 bp, Arabidopsis thaliana columbia
ctatcagggggaatctttattcccagggaaaaaaaaaggaccaatgaccacaaccggggaccctttgggaaagtaaaatctgaatggggaacaaaacagatctcagaattttttaaaaaacaaacatttgcctttttttttcgggaacaaaaacttatgtttatcaatccctacaaaataggtttctccatagatcttataagactccaaaaagttttcttttaacttttgggggcagtcttttttttcgccttctgaagcttaaaaacctttttcacaatctttttgttcttaaaccaagaaggccct

SEQ ID NO: 127674 - DNA, 138 bp, Arabidopsis thaliana columbia
attcaaacttcttccatactttttgtaataataagatgagaagttactaaaaacgactgatccacagctactttattcttttttcgttcctatgtaccttgattttgtagttataacatttgcttaagttgtaagatc

SEQ ID NO: 127675 - DNA, 299 bp, Arabidopsis thaliana columbia
gtccaaaaatcacaacataatcattgactttcttgttttttctcatatagatagacgaatcaacgtttataatttgggttcttctccagccaatcttttatgattatacgaagagtgtgatttggaacgagattgtgattctcaagcggcttgtttgtctttggagaggttcgacctcctgaccttagccactttctgaattcctctgcctcgtaggtgaaaccatcagcagccacatgaggatctcgcattatctccattgaaatgggacacttgaaatcttcgagacgtgggtcttc

SEQ ID NO: 127676 - DNA, 215 bp, Arabidopsis thaliana columbia
cggtgcgagaagacacaaggggcttgggatctgatggaggggtgaagctatactgggcatactgtgaggatcatgtagtccagctgctaaggaggtctcaggtttggtgagcgggtgtgaaggagaagaagagaagattgtggtggggaagaagagagaatggagttggagagaagagataaagctttaaaggaagagctagaggatatttggat

SEQ ID NO: 127677 - DNA, 180 bp, Arabidopsis thaliana columbia
atgaaagggtttttattttatgggtaatccatttattcaaatttcgttctcttcggaatctttttctatttccaattttgttggaaacctcctgccccgagagaagtaaagtccaaacagatttcaagtccaaaaaggatttcattctgtctgaataactgaaaaacaaacataagtgtt

SEQ ID NO: 127678 - DNA, 300 bp, Arabidopsis thaliana columbia
agactgacgatatttattgttcatagtggaagatcacgcaaatcaatttttcagccatttacttaacattgatcaacattatttcagattaagaaatggctcccacagtaattaattcggaggatgacttaaagcgaaaaaaacgtttacgggaataaaaaccgaagaggttgaaggcggatatggaagagaggaggaccatgagagctgccgcaatgtagtttaagatgatggcacttcccatctgaaaacagaaccttgtgaacttgtagcaccatttcatccactgaagctcccttg

SEQ ID NO: 127679 - DNA, 277 bp, Arabidopsis thaliana columbia
aagttggatatcttctgatgaacatgtttatctggtcgggtttacatatcagaagtaaattggtttacaaaggaaagtatcgatgatcatttatgtttcttcttcctcagtcgaactcatacgtatatccctaaaaccacctccttcggctcggtctcaaccatccaggggggcttgctcagtatgaaattgaatgttccttgggatgcacgtttgagaagaacttcccttgctttcactgcgaacccttgaggcttttttggaaaccaaacccctg

SEQ ID NO: 127680 - DNA, 348 bp, Arabidopsis thaliana columbia
  unsure (1)..(348): unsure at all n locations
tccttttttttttttttttatcnaacggagacaagcctttactatcgatcactgttaaattcatggcttttacaaactactggaaaatataccttccataagcttaatcagagcttgttcttctatatatagctgcactgtatgaatccccgttcccgttccctctcaatcttctagcggtcctctgaatcgcaactagacgctgcttctgattacggttattagattgcctgatcaagaacattcctgctataagaaacgacattcccaaagaaattttctgaatcgttgtcatttcgcgaacccattggagaagatctttaaaacatgacaaaatctcagttttta

SEQ ID NO: 127681 - DNA, 318 bp, Arabidopsis thaliana columbia
aagcataaactggatcccactctatttctctttgatatttgtatatcttcttacatacacgtgaaactatatatgtctgtataataatcacacaacacatagcaaatgctcttctaatacatacatatatacactcgtctcgttacacgattcgaaccactcgaactctgcgtcgtgatgataacaactcgttcaatctcccaatttcaaccataagttcctttattctctgatctttctctctgaggagaagaagcagaaatctcagtttctcttcatgtagccgtcttcaccatctcacgagcttcacataaacaa

SEQ ID NO: 127682 - DNA, 160 bp, Arabidopsis thaliana columbia
ttctttgctacaagaccacagaagggtacgggtgggggaagacgactgaagggtgcggttgccataagacgacataagggtacgcggtgcagaagacgacagaagggtacggctgcaagaagactacagaaggatacggctgcgagaagatgacagaagg

SEQ ID NO: 127683 - DNA, 312 bp, Arabidopsis thaliana columbia
aaacggacaccttatttttcattcctttagaataacgaaaccaatgtacatatatttttttgagggtaatgcaattctgccagaagtaaataaagtttatgtaggaataacaatgccaaaccttcaatattcatcactgtctgcaacaacgctactcttttcaaaattctcaccttaattcgacatttagcttcttctgcacctcatcacgcactttactctgcagatcattgacctcctcgtccgtaagagaccgctccatggaacggaacacgattctgtaacaatgactcgtcagccatttcttcttat

SEQ ID NO: 127684 - DNA, 338 bp, Arabidopsis thaliana columbia
aaataaacaaacttcattcctgacaacacaaaaatgtgcagaaccaacttttggcagaaattaaaaagagaaaaatggtcacaatctcagatttaaaagacaagaagactaaaaagcttaggctttatctatgactaactgaatgaaattcaaatacaaaacaattagctttgtacaaagaatccagctttgaatctcaatcattcattatttatcatcagagattgataaggaaccttcttgatctccacaaatgttgagtactcagtgctcattggttgacacaaggcgtgcaaaaccaaccctgactgcaaccaaaacttgaatatataatctta

SEQ ID NO: 127685 - DNA, 351 bp, Arabidopsis thaliana columbia
atacaaaacgaggagggcttcttgctataaacatacaaaaatcaacaagctttctttgcaaaccagaaaaatttaatcagtattttgggacaattgtagtgtttttcaagtgtcccatatcataacaatggcaatgacaacaactccaaacaacacagccaaaaacttataacgaggctcatcaacatgaactttcttgtttgggcgatacccttttgccaacaaatggttcacagatacatacacaaataccccacacgccaagctcattgacaatgcgaatatccaatccgcgatggacccttgagtcgttgcatcgatgactatcccgatggcaacaccaattgggct

SEQ ID NO: 127686 - DNA, 380 bp, Arabidopsis thaliana columbia
aagaagctccacaacgttcattttaagtcagaaaatgtcagccaaaacattctcttattcacagagagatgatgtcgtttggtagaatactgtaatacacaaaaataaagttttaagttcatttacaagaagaaaggcttatatcccattgtttatcgatcgatcccttcgatcttgtcttccacctgcgagtacaactccttgagcttctctatgttttcagcggaagtgtcccagtagccacgaccattggcctccaagaaagtctgaagcattttcctgaaggagttgggattggtgttcatgagacggttcagcatctcctcgtcttggatgaaagttgagttggccttctcgtagacccaattgtctacttgacc

SEQ ID NO: 127687 - DNA, 417 bp, Arabidopsis thaliana columbia
ggcgagcacacaaatacaggcggtggttttcacatcggccaccaattgacggtcgtctcactttccagtggactttccaggcctccctgcggtgggcggcccctctagctaaagatacgggcataggcactatgccacaaatgaggggacaggcaggggggacacttcgcatagcagatccgaagaagttatgtacacagcagcagacagatgagacagtggcgagtggtatgtggtgcatatccaccaatcccaaagcaccagttcccagaaaacctcctcagatctttgaaattagggcgcgacagaccaatccagaaaagttcgctggggattggctgtcggctgtccctgggccgatcactcagacccagggaggcagagatgaaggaatgaaaataatcggttgggttcact

SEQ ID NO: 127688 - DNA, 481 bp, Arabidopsis thaliana columbia
catatgaagtataaaatttattcatattgggcaatacatttagctacatacatgcatgaacaataataatacgctagaacaaataaaacataatggcaaacacaaacgacatatagtaaaatagaaataaaaacgacaaattaactaaagtgtggacgttacgttgcatcattgtccatctgtaacaataatacaactgccttcacttaacttaaaacttttataggccctcaaaacaggagtataaatgtgggcaggtggcctcatatttaactcaatctgaaagtgagaccagatccagctaacttgtcatccactaaggctgacaatctttccacttgtgatggcgacaaatagttaaccaaatcactcacttctcctttcctaaacaagaaccggttctcatagttctggatcaatttgcttgacttgttcacctccaacttcttcagattctcaaagctacacagatcagcgatag

SEQ ID NO: 127689 - DNA, 222 bp, Arabidopsis thaliana columbia
gtatagattctgggaataataaatgaacttttagcttcaaaatttcagtctttttccatgaatcttttaaggttttttaccaaatttttgaacaaaatttatacaaattcccaatgtcccccttccttttttccaacggagaaaatcctttcctttccccctttttcctgctccctccaccggagaaacacaaccagttaaaacaaccggaacaacaacaac

SEQ ID NO: 127690 - DNA, 377 bp, Arabidopsis thaliana columbia
gaataaaaacttaattaaatcacataatgttgcattattttgatacaagcacataacgaaatgacctttttggataacaacaaaataaaaacacaaatgacttcaaccaattactgttacaaatggacgacccatacaatagaccatgcataatgactcggccgtgcttgcttacttgttctcaatggcgatcgcatttttttgagccacaacggttgactcatgacacgatgaatctaactttataggcaaacgacgctgctttatcaagtcaacgatgtgatttttcatgactactgttttcagccaagctggcctcattttcattttctcgacccatgccgttacattgggacgtgaatagatcaagtttttca

SEQ ID NO: 127691 - DNA, 335 bp, Arabidopsis thaliana columbia
cagttagcagtagaaaacagtgagagctgcgtattccggaaaacaacaagacatgttcaagcttctttaattaagcatgtgcctcgtgtgtgaagtttataaatgttggaaactagaaactatgatctcttaatcatagatataggtctcttcttccagtattgtacaccataagctgcagttgaagccatagtcgtcgaagcaactaaccagcttagataagtgatccatgtctgggtgtctggattcccaaactcttgttgaagtattgcaccagcgactagagtcaactggaaaactgtattcaccttgcttataaacaatggttctacttt

SEQ ID NO: 127692 - DNA, 273 bp, Arabidopsis thaliana columbia
ggatccagtgagcaaccgaggattatctaatccaaacaaaaaaccagaatacttgagcaaggaaccagtgaagaagaactctttcatcttgatgaaagtacgcaacgttaacaagctatctgatccagcctggtgagaaatcccaactcgtttaacaccaagtaactccgctattttctccagacctccatagaggttagtacagaatcccatcaagtatttgatatcatacactaccgggaaaaacttctccatctgatcaaagaagtccga

SEQ ID NO: 127693 - DNA, 418 bp, Arabidopsis thaliana columbia
ggggatggaaacctgatttagtttctcaactgttgaatacaagtgccaaggaaaatgaaaagataaccaacattgtaaatacagaggactcatttcgcatcatgggtgggaaatgtctttaatagaccatgagaaggttttgatcatctacctctcttgggagtgtcttcttggcatctctgtcaccataactatgactacttcctcctgggtttgtcttatgacctttttccacattctaactgttgacgtgtcgtctatttccttctgctaactgattttcacaaggactttccatttttctcttccggctaggcattgttgaagaaacatcatctatcatttgaccttcctgggtattgaccaccaagttgtttccatcaagaatctcgacatgttactgacccatggagctttt

SEQ ID NO: 127694 - DNA, 340 bp, Arabidopsis thaliana columbia
agacaaaatgtttgtgacacaacacaatcgaagtttgcaattatatgaacagcataaacttactgcacatgcttcgatatctacagagtcatcaatctcatggctttttgtctctaatatttaaaagaattgagtcttgaaagaaagtatcagcaaaaagctaaataaaagatagtcaaagcaaggacttgaatcatcagtcttttttcttatttgcttagaccagagctctcgccagatttccaaaccacatcgttaagtgagggttgagagcttcttgtagaacttatggaattctagtgtatcccctttcgttttccggacttcgatcatatgaaga

SEQ ID NO: 127695 - DNA, 202 bp, Arabidopsis thaliana columbia
aattcaaaagcatacgatttggggtcccatttgttggaaatattacagttaacatgtattcgtcgatacatcttccctcaaaacatccattgcaaggactctcttagctaataatactactcctaaggcattttaccattgttccaaaaacaaaacttgaaaagaaatgagcttatggagtaaacactcacggctttggaga

SEQ ID NO: 127696 - DNA, 162 bp, Arabidopsis thaliana columbia
aaaagggaacctaacacaaaacttttttgaaccaagtttacaaggttttaataagtaacaacttgggacattacaaaagttaggagcagggcattattaactaaaaaaagaactttttttaagccccaagcaaattaaacccagaaacccaagaaccctttt

SEQ ID NO: 127697 - DNA, 394 bp, Arabidopsis thaliana columbia
agagtaaacagttttttttttcagaaaaagtttcaataaaaaccagagaatcataaagctagggacataaaccgaactatgtattcagaaatgagaaactaaacaaaagtaacaagcttttaaaaactggtgaagatgcaaaaactggtttttcttttttggcagagagactggacgatacgagcatcagttaaactttgcatttgagaagtccatctccggatgctcagacatgaatttcttaaggatctcttgcttctgtagctcctcgcttgttggaagacccatctgcttttgcctttgatcaaacatcattttctcaacagtcgagcgagtttctggatcaaggtcacctaatttactagtctctggttcaactttctgagtatcgatt

SEQ ID NO: 127698 - DNA, 491 bp, Arabidopsis thaliana columbia
agccaaatccttctctccatatgatcaaggaaaagattttgacaacgtagggtttacaaattgagagaagaaacaggaagagagataagcgacaagatctagcaaacttttctgaacagggcagaaaatgtaagagatctataaaactgaaacgacttggtatacatttaaacttctaaccaagagtccgaaccaatctatgaggtaagttttcttccttgaagacacaacactgtgcagtcagcttcttatataaggaaccacgcaccataaactggacatcacaagtataaaactcgtcgtagagtgtaaaaagttgcgtaatttgttcaaacatcccaggagcttcgaggtttgtaggaccatcctcgtcagcatatatgtccatctcctttaaactaggaaaatagtccaagaaatgttttatcatttgcatctctttctttgtccctcgaaacccatggatctctaacatatttactggacaagat

SEQ ID NO: 127699 - DNA, 318 bp, Arabidopsis thaliana columbia
aggtacactcccaaagtattaattttacaaaacatataaacattacaatgccatattgctctaaatctccctcttacatagaagtcaattcagagcctctgttgccaaacaagaaaaagaagatgataaaaagaaacagatgattttctttagatctctattgtcgtgatccaaaggcatgatgtcttaacatggcagcttgaaacccatgtccttgcctgccacgtaatcagtccagacatcaagagctccaaaacttgtcataaggactgggctcagagacatcacgggtccaaccgagaaaactataatggaagc

SEQ ID NO: 127700 - DNA, 211 bp, Arabidopsis thaliana columbia
cataaatacattttcatggtttacaaaacgctccgagttaagacttatgaggttcgctagtgttcatatgttgcagatgggcgctgagaaataaaacatgacttttactttcaaggttagtttacaactgctagctcagttcttgatcttattcgaacatgaaggtttcatacataatgattcacaaataaacatgaacctttccttctta

SEQ ID NO: 127701 - DNA, 248 bp, Arabidopsis thaliana columbia
gaaggaccaataaaagtatataacagaggaagataacacaatgtaagtagattacaagtagtggaccacatagctagatgtatatttaaattatactgattttttctcccagttcaatctttcttggaggattagatttgctaatacatatatcacaagtgttaacaaatctagtgatcagtcatgagacttaaggtccatttctacttgatgaatggtccactgcatattttccagtttcttaacaa

SEQ ID NO: 127702 - DNA, 218 bp, Arabidopsis thaliana columbia
ggggccccaaagggcccatttttatttaggaaaaccaacggggggccttttcttaagggaaaacaatttattcaacgggggaaaattccaaccccacccgttattgattaaatctctaaaaacccaaaaagaattcggaaaataacttccccaaaaaaacactttttttggatgtacccaacaaaaaaaggggtggcctttttgaaaagggccccaag

SEQ ID NO: 127703 - DNA, 371 bp, Arabidopsis thaliana columbia
ccacaaatttccaaatcaattgtacatatgaaaaactgattttcaatggctacaaattggatatactttcagacaaagctctctgtgaagaaatgcaaatgataacagcaaaggacatgttttttgtttctccaggttaaagacagggagagacattcgcagcttgcttatgatcatcatccttgaggtttctgtatctgtatagccaagaacacacaagaaaatagccaagattcaagactcctcctatgactaaaatccagtaaacattgtcaactcttccatggtttatgtcatctggtaaccacgccgtggtcctttgaatcagatctatcaaagcagtgcttgtgtagaaacatatcccaatcacc

SEQ ID NO: 127704 - DNA, 157 bp, Arabidopsis thaliana columbia
gggaaccaatggcctgtataactgatagatttgggcaacaaccgctgggaagaaacaatacattcccaagggctttaaaaagcaaaagaaaagggttgattgagaatacaaaaaaccttgggcctgaatagggggaaactgggagaacattttttaa

SEQ ID NO: 127705 - DNA, 287 bp, Arabidopsis thaliana columbia
ggatggaagattgaaatttttaagttttcgtaatatttttggaaaatacaaatatgtttctgatcagcttttattcgatccgaaatacatgggcgaaagcaggggtcctaattgggatgctttcgcccagggaaagactccgacaaatctacaagagttcctccaaggcccttatagcttaagtcactgatttctctttcaagggtcatttggaaagcctttgcttattgaatgttttttttttgccctcggaaacctttgggtctgaccttgaatgatgagacttt

SEQ ID NO: 127706 - DNA, 356 bp, Arabidopsis thaliana columbia
catatgagtgaacacaagccactcgttacatatagatttaccatcaccttttacttcactgttcgatatttttacacacaatacaagaacagttcaaacaaatgcctaaaacctatataaactacaaaacaaataagctcttactgatactaaaaatacaacttaggtaagagccgaacttcaagggctgggacccgtatctgatatgtcttctggaccagcaagtgtcacattacaatgacaagcaaatgttcgggcaagcatgatcgaagtgtttctttctctctcagactcaaaagctattacaaatgacactccttgattcggctgccaatacaatgcctgagctgcagcat

SEQ ID NO: 127707 - DNA, 393 bp, Arabidopsis thaliana columbia
tctaagattcttccggcagattcagaacattctgccatatttcagtgtattcaaggtttgcctgaaggcgctctgcgcaagataatcttgactgcatctggtggagcttttagggattggcctgtcgaaaagctaaaggaagttaaagtagcggatgcgttgaagcatccaaactggaacatgggaaagaaaatcactgtggactctgctacgcttttcaacaagggtcttgaggtcattgaagcgcattatttgtttggagctgagtatgacgatatagagattgtcattcatccgcaaagtatcatacattccatgaatgaaacacaggattcatctgtgcttgctcaattgggttggcctgatatgcgtttaccgattctctacaccatg

SEQ ID NO: 127708 - DNA, 291 bp, Arabidopsis thaliana columbia
cccctattaaaaggggtttctaaaaaaaaaaattcccaaattccaccccctctaaggcccccaaaaaaccaaaaaccaattgggcccaaaaaagggccggccggggcaacccctaaacttttagggccgggagaagaaatctccccccgccccggggatgggttatgccgggcccccccttggttggccccaaaaggcctcgggggaccatcaaaggcccggcccccgggttcccccgcgggcccccctctgaaggccccgccctggaaccccccccgggggggggggggg

SEQ ID NO: 127709 - DNA, 289 bp, Arabidopsis thaliana columbia
aagtgtgcagattttacgattcattcagatgactgaaacaaaacccagaatatgggaccggatatgatgaacactggaaacagaacaacagggggagcggggcacccatatgacaagtaccataaataaaaccaagcataagtcgcaaaaccaaaagaagagtcctaatgcggaaccatcatgaaaaaaccaactaacaaagatagagatgcatcataataggcaaaaagtggataatagagagatagaaggcggcgggagaaagaaccgatcacttgtgagataacca

SEQ ID NO: 127710 - DNA, 314 bp, Arabidopsis thaliana columbia
ggctaaaggactcattaccactcgatgattatcactttttatattgaaagttactaatattccgttgtctttttttttaaaagattcagcaacatattacactaatatcgagaaatgacttattgttaatgggttgggggtatctgcttaaaaatattcatatccccaagggcttaaacgtgattatggaaatttttcttttcaccatttttccggcgacagcttaacaagggggggaaggaacaattttccctgggcatggcccaaacccaacattgggaccatctcccttgcatacacctgaaaaggggact

SEQ ID NO: 127711 - DNA, 121 bp, Arabidopsis thaliana columbia
aaaaaaaactgacaaaattttaccattattgaaaccaatttcaagaatacactgatgaggaatttaaactatatggggtttactagaaaacaacatttccaacaaattaaaaatggggccc

SEQ ID NO: 127712 - DNA, 230 bp, Arabidopsis thaliana columbia
aatcaatgaccaaaatattattaagataaaacaacaaccaacatcatatacatgtcacagtacgggtgaaccatgcttgtattaataaagtaattccaaagactatatttcttattacattattagaacctggcttggaaattcctgaccgcattaacatccatttggaatgctcttgcaagaacattggggtctacatctggtttagacccaaatattgcgttagcaat

SEQ ID NO: 127713 - DNA, 273 bp, Arabidopsis thaliana columbia
gggaaaaaaaacttttaagcaccaaagcaagtttttaataacttcagggggaagagtttaaataactaaaaaacagagcccattttcaaaagcctctctcaggggtttactcttctgctttggggaacctaccaaacggaggaacccaaatcgaaaaaactttccctaagagatttacccaaaagcaaaagggaacagaagcattatcaagcttttagcattacatacgggaaaacagaagaaccagaaggtttagacaaacattttttacat

SEQ ID NO: 127714 - DNA, 178 bp, Arabidopsis thaliana columbia
aaaagcgagcatttccactttacaggtaaaaccaacaacatacatgcgtgggttacaactgaatatacatcaacccgcctttggagttaaactttggtctgaaaaatataactcccggcccgggctgggcaaaagattcctccccccccaaaatcgagccttataaacccccttaagc

SEQ ID NO: 127715 - DNA, 193 bp, Arabidopsis thaliana columbia
ctaaaaaaaatccaacggggctgaatttaaataatatcagggaacatttgacatcatcaaatttgatggggaaaaatgctaaaaaagaacaggttcaaacaatgaaagggggcatgcctaatttgctgcacatttacaaacaatggcatggattttaccggttttttgaaataaaatggggatttccgaaatc

SEQ ID NO: 127716 - DNA, 270 bp, Arabidopsis thaliana columbia
gaaatgaaatgtgtggaaagtttcacaggaaacaaacaaccataagaagtatacttaatccaatacacaaggtctattgctggattacacatgatggacacaatttttctagttgaaaacaacacgagagatacagaagtttatgtaccttatttacattagatgagactattttcatcccgattccaaaagcagtaaagtttatgttttctcatgatttgaggctgggactgcatcatgtagtattagcattgttgaacttttggagga

SEQ ID NO: 127717 - DNA, 421 bp, Arabidopsis thaliana columbia
ggactcgtcaactttgtaacaatattattgagagaagaaaccaaacaaagagttttattacaataatacaatcccacaaacgagaagagtcgatcccatgcaggggaagatacacacctacgaacttagctaacttatttcatgaaaaggaacgacgacatgatagttactttcaaacacagtttaacgtaaaatacaaaactatgatttcatattttgtatttggctacgttacttaaaagccaagatattttctagatttaccattgtaatcagaattgggtgttacaacatctagtataaaagcccccaatgcccaatctagtggtatgtgtttttctcctgctttacttgcatacgtgatactttcatcatcaagagcaataccaagactatcatgaagcattgatatagtatatgc

SEQ ID NO: 127718 - DNA, 425 bp, Arabidopsis thaliana columbia
gtaaaagtgtccaactacttttttgtattcggaactttttatcttacaacaacaacataaccaaagcagcaaccaagaccatgaagctgatatgagcagtagaggctccattgaggtccttatcagcgcaaagtccatcctcaactccgagatcgaaggagatcttagttccgttaatagattcgacttggatgtattttcttccttcagtggtagtgaggtcaacacaagcaccatgttctccccaatcattgacagcttcttcagtactatcagtgttgtccaaagtgcagctcagggatttccagagtctaacccagccacttccgtcagtcttcttgacgtaaactctcttgttgctcaaaccagtctcggtgtaggcttcagtccagtaaaacttgcttcctccatcaggcagactgtct

SEQ ID NO: 127719 - DNA, 359 bp, Arabidopsis thaliana columbia
ggtacaaaagcaataattgcttacaagcctacaaggaattggattttttttgtcccgaccattctagaatacatccccacccaaatagaaaaaagagaaccccattgcttattggtaccaaaagaatgtctccttctactgactattactgtatcaatcagctattaactcttttttttcctcctccttcccatcttctactttgacagcttgaaggcgctctgataattgctccacggaggtcctcttattccccaactttttcccttgttccattttctcccaccttttgcccctttaaatcatcatagtagccgaaatcatcaaggattgatgtgtgggcctcgaattctttgaaa

SEQ ID NO: 127720 - DNA, 231 bp, Arabidopsis thaliana columbia
cccacaaacaaggattccgattcgacgaacaaaatacaaaaatttaggtttaaatccaaataaaagccccccccttgacccgacgttttcatcctccaccaccgttgcatataccggttaaggatcccggaaatttacaaggggacggggttcccggggttctttttccggaacccacttaagctgaagccgggggaagaacccttccgtaaggaaacaaggcccgttccc

SEQ ID NO: 127721 - DNA, 153 bp, Arabidopsis thaliana columbia
aaaccgggcttagagcccttggtattgagatttccaataaaaggggtaacgggttttatttttcccttcctttggaaacacagttaggggtgaaaattttagagaagcttttataaaaatgacatttttgtgtgaaagataaataaaacccct

SEQ ID NO: 127722 - DNA, 242 bp, Arabidopsis thaliana columbia
cctcattccattgcttatccattcccacttttccttgcataataaggcacttctctgatcaaaccctaactgaatcaacttcgctgcgatttcctcccatagaaactcatccgagcaccctcctaatatctcttgaaaggtcgagtccatgctcgttcttatctccataagctttaaaatctcttgctcaccccagcagctactacttcctttaacacaaacattgttagtcatcgtttgat

SEQ ID NO: 127723 - DNA, 218 bp, Arabidopsis thaliana columbia
aaagaagataatttcatatgatttttgaaggaaaagatcaaacttgtaaacccaatattaacaaaatttttacaacaatttacattcttttcttaacgaaatccaaaaggtggtttgaagccaattttttaacttatttaacatcattaagctgttcaatgggaaaaaagatgaaggtttggcttttttcttttttttaaactagaacgatagcattt

SEQ ID NO: 127724 - DNA, 213 bp, Arabidopsis thaliana columbia
gcgggggggcaaaaacaattggaattttaaaaagaaactttaaaaagcccaaccggttcttaaaacaaaactctttcccacccttttttgaaacccaaaaaatgagggggcaacttttccctttataatgggggggccccaaaaatttgcccaaattccgaccaaaccaattttcgggggaaatcaaaattttttccagcccccaaacattgg

SEQ ID NO: 127725 - DNA, 209 bp, Arabidopsis thaliana columbia
ggaggggatgacttaaatgtagggacatattgataaaatatgccctcaagacttaaaagtagatccaagtccctaacatggcatctttttcaactggtttctttttttacaatgacaaaaaaagtgatccacgttacaatacaacattacacaacaacacaacagagctgagctaactggctaaaaggatacacaatacatgttacaaa

SEQ ID NO: 127726 - DNA, 396 bp, Arabidopsis thaliana columbia
agtagaaaagattagtgatcattgagagtttacatagttacatggatttattcaaagcatgtgttcgcaatacaaagtttgcagattccgagttacacactgagacgattcttttcattgttctcttaccaagaggggattaccagaacaaccttaggttgtttgtatactagataagaccatactcatccttgaatcaaccgtttctgggattgccgctggaccacacgctatttcaggtgttgtggtgttgtaggtacaggatccaagtgatgtgcaccttcttttgtgacgagagcaacaatggtatcagataagttcttgagaacactgccaccactccaaggatctaacagaccatttgagaaaatgatgttacttccaaatgacttcaag

SEQ ID NO: 127727 - DNA, 213 bp, Arabidopsis thaliana columbia
ttctttttttttttttatttttttcaccatgaccccaaaaaagggcgaatggggctttataattatacgaaagtggcgaatatactaacaagattcacaaaatccatacaatacactcaaaataatattatttaaatatattcaataatatatcataagcttttgcaaacagataacaaaaaatcccaatcacgtgtgtgggaaaacaactta

SEQ ID NO: 127728 - DNA, 260 bp, Arabidopsis thaliana columbia
ggaaaagcaaaagggttttcactatttgggggatcaaaaggagatttaaaggggggtttagacagagccacacaggggtcataataaagaatgcccaacttcatagaggggtttgccttactcaaaatcccttgaaatctttgggccatctttataacaaattgggaaaaggtttcgtttaaacagttgatgccatagcctgatcaaaaaaaaagatcggaccaaaaaaaaaaaccctttttgtaaccaaatgatggggg

SEQ ID NO: 127729 - DNA, 247 bp, Arabidopsis thaliana columbia
attaaaccattaatacaattgaaatcgcggattggattaagcaaacatcccaaccttacaaattttcttgaataatactcaaaatgattcatcttactcccccaatttttatatttaagaaagatcacagatggttaataaaaatttgagtaaaaaagaaaaagtaggtctttttttcaagaagttcaagctgatgaagaacctgtatctcttggggaactccccgtggatagaggaagaaggggtg

SEQ ID NO: 127730 - DNA, 286 bp, Arabidopsis thaliana columbia
caaaaaccacgaggctttacattgtatttgagaaaccctaattatattatttaacaactttcgaatgattttaacaaaagatccggttttactttaaaccctaaattaacacctaaaaccctaatttttctcatcatttgtgtcctaattccaaactttttttgattcttcttcttggtgcaattttgatcaaaattcacattctttgtgtagtattaatgggcaagaacttcccaaatcagtttctggaatcgaacgatggcaatcctcgctaataaaaacccat

SEQ ID NO: 127731 - DNA, 116 bp, Arabidopsis thaliana columbia
ctaataagcaaagagagaccccattaacggggtgatcatgtaaaagcttgagaggtacataacacagtggtccacatcgacaatggcaagacattaagcggagagttcacactacg

SEQ ID NO: 127732 - DNA, 473 bp, Arabidopsis thaliana columbia
cagacaaaatagaataatccttaacaaacgtcttcaaatcaacccaccagagatttccatatcaaagaaaaaaaatcttatgaacaaaaaaatagagtaatcttcaaaaaaaacaaacaatatatggacaaacgttatcgacccaccatgagatttccaccacacaaaaacaaaacccacgtacaccagtgaatctgtcatgtgtcttcacataatcttcagcaattgagccatcaaaactgaaaaagacttccatccttcgatcatgacagaagcagagagaataaacatcttcacgccatgagagaatgaaagccggtagatagtcacaatgagctacacagagtagacaacaataacaacaacaacaaagaatcttgatgtcaccacattttctggtttcttttaatttccccactataaatttgcttctttgcgcgaacctcacacgtaagaaacaatcaaaggctctt

SEQ ID NO: 127733 - DNA, 131 bp, Arabidopsis thaliana columbia
gaaagagagagtttaagaactttggtgcatcaatggcgatctccaagctccatctactcttccttctctcagtctttctctcccttcatcctcttgttctttccgacaccgccggtaattaactctctcat

SEQ ID NO: 127734 - DNA, 398 bp, Arabidopsis thaliana columbia
aagcaggtaagtaacaaaaagatcccaaacgaaaatattctccaagtattttgatcacatttcatctcatgtacacatacacacaagtttctccccacttttatttttaaaggctttaattaataacctgatttggaggagaagaacctgcttattcctctagaggctttctctggggtcgcgttagtagatgaacctgaccttgagagcctggaacccactcgtgatggcgatgtcgtcgtatcgctagtctctgaatcagaggggcattttggagactccataaatctaggaacctcgttaaccgaatctcctttgtctactacggcatagttctttgggactgaggtagtggtggtgcctagttccttttcttcagaataggactcatttcgagt

SEQ ID NO: 127735 - DNA, 282 bp, Arabidopsis thaliana columbia
agcagtattaatcttcattctttaactagggggtttttactagccccaacggagagttacattgtcgaaaatttagcgattagtctttcccaaatagtgttctatctgaagacaagcttgagaggacgagccacttggtttagttccaagcttgagtctcttaccacttactgagcttgcattggttctagaaatatggggtttagatctcaaaactttgattctaccacctttaccatcaggtccaatagagatgagaacatcttttcttggaacagaacc

SEQ ID NO: 127736 - DNA, 350 bp, Arabidopsis thaliana columbia
ggaagtcaaaactttatacatttcctttttcataagaataaagagttcctaagataatttgtctaaaaataataatccgtataactaccaaattatgcccccctaaagagtaaagactgcccttttgggtcaactttttcaaacataaaccaaaccggtttttacatcgaacgaagaagcatcaaaccggttgcaatcagataaaaagaccaaggctctgctttcaccttcaaatcctttgcatctttcaagggtagcaacagagaacactgcaccatttgtttcacagctacattgccggatcttaccatggatatgcttgtaagtttcctaaagatatggtctttccg

SEQ ID NO: 127737 - DNA, 169 bp, Arabidopsis thaliana columbia
caatcagagtcaaatcaattaaaataaggggatgcttttaaactaaaaaaggggtaaaaagagagccgtagacgatgtccaaaagctgataaatactggattgctggactggcaacaagacaaccactcttgccttataccatctaacatcacataatctggatgagtt

SEQ ID NO: 127738 - DNA, 164 bp, Arabidopsis thaliana columbia
attggggggattaaacaagatctatgggcgttttaaaataaaaccacttagctcccaactcccaacaaagaaaattagaagccaagctcaatcccctgatctaccacaaaaccaggttaaagggtccaacaacgttctaaggacctattcccaattggcatccc

SEQ ID NO: 127739 - DNA, 319 bp, Arabidopsis thaliana columbia
ctctacaacctcattgctttcgccgagcctactctttcgtaaaccattggttctgtagcatctttcgacttgttctctctgaggtaacgctcgaaagcaccgtctcctttaagaatttttgctgcgcatccacgagacgcttctgagcttgttgattcctcatctactataaccgcatggattcttttcatctccctttttatcatctggaatctcaaacatggcttcggtaagaatgctttcaagtaaggctcttagtcccctcgcacctgtattttccaccattgcttgcttggatattatctccagcgctttctca

SEQ ID NO: 127740 - DNA, 343 bp, Arabidopsis thaliana columbia
ggtccgattaactccggttaagtagatatccaatttattcacaaagataattagagaaccccaaaccaaaacctcacattgctcccaataattaaaatgaagagggacactttggtcaatacagcctcataaccctcctcgctatagagtggccgtgactattcgccttagccgccgtcttctcccacccaccaccaccaccaccgccttcgcctccaccactaccaccgctggtcttccagcttctccttatcggagtcaaataaaacctcaacattccgttcttttcatctttggacgaatacctcgaactcttattcctcgccgatccttcaccggagct

SEQ ID NO: 127741 - DNA, 235 bp, Arabidopsis thaliana columbia
ccaaccatataatggcccatagattacaaacgatcacatcagcaatgacccaaaaggccaaaacacttgtaataaccacatcagaaaactaaaaaaaaaaaaaaaactttaactaacttgataaattaattaagcagaagggagattaagagacttgaaacaggtaaatccaccatcaacaacagggttttgccccgtcacaaacttagcataatccgatgccaaatacaaagcc

SEQ ID NO: 127742 - DNA, 416 bp, Arabidopsis thaliana columbia
aaatagagaaaccatgaattataatctcaagtgtatataatacaacaacgtggagctaataaactgaacaaaatttccttttttgactatttctctccctcgaaacagcctgagaccaaatctaatagtttctattgcacaacgggatgtttcataatggtgggaaatcgatttatccaccgagagtatcctgctcttatgatttcaagaagatccgcggtatcagacatatcctggccacttgaggacaagcttcttgtaacgagccgggccaaactatccagggagcttctgctaagttgtaaagcatcttctgatgtgaaatcaaagatcagagagcatatgcttgcagccatcattactaccgaatggtcattactcccatctgcccaatatgccaaagctttcaatagact

SEQ ID NO: 127743 - DNA, 246 bp, Arabidopsis thaliana columbia
ccaaactcaaaacatcgtatgcactttatttctgtttaacattcaaactggttgggactgtgaagcccgtatcgaggacaaaagacacaacaaacccacaaaagggtcaaataaagctacaaagaaagaaagaaacttacatcaaagcctttcaaagaccaaacgatttccaccatattgagtattgagtagaacagtataattagtagtcaaggagcatgactgagagaatattaactttagcta

SEQ ID NO: 127744 - DNA, 295 bp, Arabidopsis thaliana columbia
ggataggaaaaagatcaactattactaaatgattaaaagttaaagttaacaaaacgtataaagatcaaatttatcatacagtaacataaatttttctgaataagctcatatgagaaatgtatattacagtagctaaaaaattacactcttccatcaaaactaacttaacacattatttgaaataagttatcacataatcacacaatttgattcgtccgttacaaatctagagttcccatatggttgatagtaagaatttgcataggcaggattgtattggtaagggttgttcatc

SEQ ID NO: 127745 - DNA, 106 bp, Arabidopsis thaliana columbia
acacgaatcttgtcaaataaactaaaaaccagtcaaaagtgttgtgtgggaaacagccagacaagttattatactttgtttaaatctatcctcctggtgtatttta

SEQ ID NO: 127746 - DNA, 295 bp, Arabidopsis thaliana columbia
  unsure (1)..(295): unsure at all n locations
gtcagctccaaggctcaccaagtttctcatctgtaatttaaaaactttaacccgagtctcagtacaataaaatgataatccagaaatgtaaaacgaaaaaaggaaattttaatccaacgaatacaatttttctttagactcagcaaaatgtatgaatttgtttcaatgtgttcttccgtgtggagagtaatgaggattaaangcgttcttccacctgtaaccaaagaattgacaaaaaaatggttgttttcttttgttgctaagcaagcttcttgggtctaccaacagaaggtgt

SEQ ID NO: 127747 - DNA, 371 bp, Arabidopsis thaliana columbia
tcctttttttttttttttgccatcataacatattttctgaatgaaggatctcgctatcattgattttaagcttgcactcgttatgaaacattgcactggcacctattctgaaacttttgctccatgaatcacaacatagaaaagcttcgttctgggtatgtctctcaacttattctatccaatttcctctcggaagatcttcttccttccaccttttgggtcatgatgttgcgcaaaagctgagtatccagaaccagcacttgtcgcaaatacaagagctggattagaccggattgaggatatagaatcctgagctccatgtgatagaggtggatctctttacgaccccattaaccttatcccatttggat

SEQ ID NO: 127748 - DNA, 134 bp, Arabidopsis thaliana columbia
actttttgttgagaagagatatcatctgttttcgatccaaagaataaaaagcttggattccgaaatctcccttctgttcaaacagaaataattcttgcacatgaacactaaaccagaacgataacaggaaacaa

SEQ ID NO: 127749 - DNA, 340 bp, Arabidopsis thaliana columbia
  unsure (1)..(340): unsure at all n locations
ctggaaactaatcatgtcatcttcatatcttattcggacctcatacaaaatccccacaaactaagtaataaaaaaaactcactcaaggaacaagcttgaatattcactaaatcctttacacatcttctttcttacacctaaaaacaaagtgcactatgacagcaaaggtgctttcgagttacctatgagccgttggtgtacgcggcatggtgtacggcatttgaccaatgttcattgctgcaccaggaaccactgagccagggactggagccgcatgaactccataagccatgtgaggtggactngngaggttcactggtgttccaactgctggctgacc

SEQ ID NO: 127750 - DNA, 334 bp, Arabidopsis thaliana columbia
gaaagggcaaaagggactattttttttttggtgaaaattcccagagaataagacctaaccccaaacaattaaggcaaaatccacaaactggaaatgggaaccttttgggggattcttccaaaatctggatcctttttttggtagggaacttaaaggcaaaaaaagtaattccgttttgcaagaactttaaatttaaggaaaacccaagtcaatgtctaaagcctatgggggctttttttttcctcaagggaagggggtcaatttgtaaaaaaatttgggagggaaaatccaagaggaagatcccataagtaagtaaggaaagaattttggtttt

SEQ ID NO: 127751 - DNA, 419 bp, Arabidopsis thaliana columbia
gggaccaataatcgatacatatagtgtaaatacactcaacaagagcaacaatacagcagttcaccacatattcctccaatggagagtatactagtaaacaaaagcaacttatgctataaccagcaaaaggatcagaagaatcagacattcatagctcgaaaacaagacaaaagaagatcacattcatgattttgaagaaagaaagccagttcctttaaacttctcttccatcaaaccatcaatacgagccaccatctccggagtcagataattctgccaatccccaactttccctttcctgaaatacgcactgttggcataaacagcaggacgatcttctctatctttctcacctttgttagcttcaagattcttcaaagtctcaaagctacaaagcttcactactttctcaacaacat

SEQ ID NO: 127752 - DNA, 246 bp, Arabidopsis thaliana columbia
ggggggaatgcaatgattgagcttgtaattgataacccctaatgaacaaatccatgatatggggaagacttacagacccgtacaatggcgaacagggaagactttaaacagcattaacccaaaaaagaaacaagaaattcccaacccccaggccgagtgggaaaaggaaagggtgaaaaaaaatgaaatgttaaaatttgtgtaggaaaaaaaaaaacaggtaaagcccatttttgaaaacacccc

SEQ ID NO: 127753 - DNA, 460 bp, Arabidopsis thaliana columbia
ataaaagagcaatgagctcttttgaatggggggtttgttttagacaacagacggggtaatcaagtgcttttctttatgcaactaatagaagcgttggggtctatatggctaacattcccagcttacaacaatcgtatatgattagctcgagtctcaatagattgaaaagatgagcctccttgttcgaccgatttctcgacctcatctttcagaactttcattctctcacgaatcttatttcctttactttgctccattaacaccctcacagctttctgaatctcctttttttcaatccgaccttccaagcgaattccaatcttccaaatatcgctaacaaatcttgaatgtcagcattcgatcccaacctcctggtaggcagatcataggaaccccttagcatatgctctatagcgttgagttccaaccattgggtgtcaaaaaccctcctgtggcacga

SEQ ID NO: 127754 - DNA, 411 bp, Arabidopsis thaliana columbia
ggtgagaaattatttggggtattattatattttgctaaattattaaacaagcacaatacacagatagcatccttgaaaacattacatagtagggctctaagacagtaagtaaccctgatcaagcttaatcaaccttgaatttgacattgtgcagacggagaactactacaaggatgcggtttcgcgggttctgaatttcttgaagaagccatagatatggtcagtgacctcgtcaggcttctcttgatggaggaagtgacctacaccttccattaccaccacttcttgtagaaaaggtacgtgcttcttcaaaccaccttcatgtatgtattcctttgttccggggatattgtatgttatgtctagatcacccactatgaatttcacagggactttgatttgtagaccggt

SEQ ID NO: 127755 - DNA, 170 bp, Arabidopsis thaliana columbia
ggggaagcatagctaaattaaaacataacaaagccccccaaattttcgcgggtcaaaattcagcatttacagaagacaaccatgggatcttttaaccctttaggagacataagggaaaatggcatgccgattagccggataattttaaaacttccggggatcccaacggg

SEQ ID NO: 127756 - DNA, 120 bp, Arabidopsis thaliana columbia
ttttagcgccccccttattttcttcttgggcaattccccctccttgctatatatacctgaaattggacttttataaaacaaacttccatttttcgcatggccgcttccttactaacaatg

SEQ ID NO: 127757 - DNA, 170 bp, Arabidopsis thaliana columbia
gttcttatccaatacttattttaacattgcaaagagtttcagggtttttcttctgggttttgaaagaaattttagggaacaaatggaataaagaggcatcaattcgatcactcagagctccaaaacaatgggactaaaacgcaaaacgaaagcggtttttttttttgaaa

SEQ ID NO: 127758 - DNA, 424 bp, Arabidopsis thaliana columbia
aattcagttcttttgtttgtttaattatcaataatcatctagagattcagacgtaacatattctataattattttatttttcagaaccttatctctttgttgaagatacaaatataaacgtacgacaaaatcgacctatatctactacacaataaacatatgagaaccgaaatgaatgatgttgtcatgtgtcgctatcgctccatgtatcgctttcgccttctccatcgtcgcttgctacagcctgtcggatagagtttgccttctctagaatcacgctaatattggtgttcattgtagtttctgatgatgatgtctttgtcctgaccacacgtctcaagttgaattgtttagttcgaatttgatgcaagaagtctccagcttttgtctaatttgtgttgacatgactttgtttataattcct

SEQ ID NO: 127759 - DNA, 390 bp, Arabidopsis thaliana columbia
tcctcctttttaatattttttttttttttttaattttttggggggtatgtaaaaaagtacaatggcttttcttgattatacgaatatgtttccgttagggtagttgacggaagttaactcggaggtacgattataccaacttttggattggttaccaaaattaattaaggtattttttttccaaattaaatccttgaggtcttaaaccgtcaaattaaaaataaatggcggcttttcactctaccatatatcaatcccttccccatcccctttttgttactcttcttgatctccctctctttctatatatggatgatcaatatatctctgtctatatctacagctcaaattataacagaggaacagctccaatccaacaatggggatttt

SEQ ID NO: 127760 - DNA, 208 bp, Arabidopsis thaliana columbia
gtgtcagatgattagggattatggggtggcacataggaatggagagattgtaatattctaaccaagcaaatggaagagaagacctctggaacccttgacagatctactagtatgcccaatgacctaagacaagctcggatacgaactttctgaactggaagagaaatcaaggaaagaaaattcattggatatgtaccttgtcttgggt

SEQ ID NO: 127761 - DNA, 175 bp, Arabidopsis thaliana columbia
cttaacaaacacagatttttttattacaaaagaggggacattggtttggcacaagaaacacccctgggattttatacaagaaaagccttttttacgggggttttattctcaccccttgaattacaaaacattttttccaggggggggggactaccgaccttgaaaacccatttta

SEQ ID NO: 127762 - DNA, 436 bp, Arabidopsis thaliana columbia
gtaagaatcatattcttattcaaatattgttttgctcacaagcagatgcgaacagttacttactagtcacacaaacagatacaaacaagttttacattatttttaggacaagtaaaaaatcatatcttgagtttaggagatcttgattctctgagcttcctttcttctgacagaacttttgcaaaccttttgagagcttcttcattagtcacattttcggaaataggttgataatggccgctttcgagattgacacgagagactcttttctttaataaagcttcaccaacttcaacaagaccttccatgttcttttctgttgatatgtccactgaacctaagtcacccttcaacgaatcatcatcgatacgtaaataattcttctcggaacgaagagcttgaaagacgacagagctttggtaatcaaccatgtcat

SEQ ID NO: 127763 - DNA, 402 bp, Arabidopsis thaliana columbia
gacaaatcgtttatgttggagatagtccttattcattattcattatttcattattagagagaatgacaagaaaatcattgtgacgaatgataattgtgccgttttcaataggctattttcacacaaagtgatcagatctccccgtcccacatctcggcgacaagatttgatgggacctttcttagaggtataaacctctccgtggacgtttctgaactgaggaatctcagttgaaattctctgtgtctcatcctctgtcaaagaccaatcaaatatctttagattctcttctaatctctctttggtaaagctcttcactaccatgctcactccttgttcataagcccatctcatactcacctgggccactgttttttcctttgcttctgctatttctttgag

SEQ ID NO: 127764 - DNA, 491 bp, Arabidopsis thaliana columbia
  unsure (1)..(491): unsure at all n locations
aacacatgaatcattaacttatacttaacaaaataatgaaattgttaattatgataacaaaggcatttgctaaatatatgccttggcttggctttaacaactgcaccaaaactaatcagaaatgttcttcttctataggtgaaaacctattctgctactatctctcttttctcctacataaaaatatatatatatatcttcaacaagaatgtaatcttccctcttcacaagctactagatctcaacttcatgaatcgctgctgctgtaaccttctgattctctgtcgtaattgtttgctgcattattagcaggtacatcatcatcttcagagctctcactcatttctgcgtcatcttctccttcgacccgcccaacccccacaacttcttcttcctcgncttcctctattgccaatttaggttactattccaatctaacccccacttgtttctctgactataatccacaaactgaccaccaccatcttcat

SEQ ID NO: 127765 - DNA, 141 bp, Arabidopsis thaliana columbia
gggattgacacaaaacaatttttattatttgaacaactgaacaagaggggtttttaagctcagaatttggcgggtgacccagcagatttattattagtttatacaacattacagtttatgaatttgaaaacttaaaattta

SEQ ID NO: 127766 - DNA, 470 bp, Arabidopsis thaliana columbia
ataaagattctttcatctaaaagagtaactaatctaatagaactcttatgtttgctttaagttacattgtacgtaaaaaaagagagacctacaagtgtgtgtattgtgtaatgaatatactttagaaatccttaaatcaactaatccgtggtatgaataaatgatcttgtacgtatatataaatatatcttttgctcctagatcaagatgatggtgaactttgtctgccttcaaaatctctcctaataatctccagaaccatctcgttccatgtgtccactggccctggcatgcaccaatgcaaacagtcttgtggaggaggctgaccgtctggtccacgttttgtgatctttttcgggtcaggactcctgtatggaccaggatgaccgtcgtggcgatacccgaaagcctcagtgatatccattagcttcagcttcttcgatctattcccgagcttatcatccgcgaca

SEQ ID NO: 127767 - DNA, 449 bp, Arabidopsis thaliana columbia
ggataactaaatcgtatcaaatgggaacatatgtttacaaccttttagaaagaaaaatgaagatatgttgatacaaaagatgtttctcttttccaaataatctaacaaacgaatcagaagaaaaaaaaacaatattgtgacaacaatcatcaaacctctgcaactgcattcttcacacaatcaacattacacaaccgaactgatctcaccatttcacccaacctgtcgaagctattcctagcccgatcagagctacccacgctgtttctcggcttcccaaaccgatgatcgatacttatctttcttgatttgtctctaggaggaacacattctatgctatgtctagatccaatccagctactcttcgttgatttgtcgttcttgtggtcattagccaatgattggcgtcgaaattttggaactggaagcttctcaatggctgaaatgaa

SEQ ID NO: 127768 - DNA, 309 bp, Arabidopsis thaliana columbia
ataatattgtttatttttctcctaatttaacccccttaaacttacaaatttatgttcaaaccctttatttttttttattgggacccctataaaacttatttctatatggaaacatcaaaaaacaaaaacagaacatgctagatatttcaacgaggattaacttgggtgattggtgcttcatctacagaactagtaaaagacttgctgctcgattgaccaggcaccattccctggcttgatgggttcgatcctggtccgttcctgaagaaaaatccaggtggctgaggcacaggtagagtaattgagctg

SEQ ID NO: 127769 - DNA, 309 bp, Arabidopsis thaliana columbia
agcaccaaaattgcttctcatttgtttggtttttgcactaatggcacaagagttttgctaacaagaacaaagaatttaaggggtaatacaaggtcacattccgcgaaaatttgaactgtctaaaccaaaatcccaagacatacacagtttttgcatcagtaagagtttcccattttgcctttgccgccacgcccatcgtcttgtttttttttgtcaaagtgactgtcacgggggtaatttttgtgcagcgggggaccgcctcctttcaatgacggggggggaccatttttcaatggcggggggggaaca

SEQ ID NO: 127770 - DNA, 427 bp, Arabidopsis thaliana columbia
attcataagaaaaacctagatatgaaattcaggggggttcatcataagatccacgacatccaaaaacaacttccaaattccaaaaaaaaagcagtattcaattcaaaatgatagagatcgagatgaaaatgattcctgagctccttctttctggtaaacgtaggtgagaccacacttaccacagtagtgacgatcgaaatgactcgccatgaaagtcccagcaccacaggttgcgttagggcactccttcctcaaacgctgaaccttacctgaaccatcaaccttgtagaactgaagaacagcgagcttgaccttcttgtgcttgtgcttgatcttcttaggcttggtgtaggtcttcttcttcctcttcttagcacctccacggagacgaaggacaaggtgaagcgttgattcctttggatgttgt

SEQ ID NO: 127771 - DNA, 302 bp, Arabidopsis thaliana columbia
gggggtcaaaacaataaccacgttgatgaatcatataatggggcatgtactgttcttaaagctttgaacaacaaacaactggatttttaacttttcaacatttaaccatcactctaaaacttttttttaccaaaccagatggaaaatctggggtcaaaaatactaaatgaaagaatggttgggaattacagctccacaacaaagaggaatttacactttttcccatcttctttccttttgggtcaggaaggcccctactttttcacctcaaaactaaaacaatcacagaggaagagagcttt

SEQ ID NO: 127772 - DNA, 391 bp, Arabidopsis thaliana columbia
ggggaaaactcttgggagaataatgtaacaacttttggttccaactacaactttgcttttgtatatatcccacgctgagtttttggggctcatgtgactttattcaaatttacatgatagaaaatgggacttgaatgaggaaatttgtaattagcttaataacgaaatcaaactgcagctggctttccattttttcggggatcactaactgcagtaaggaagccctttaatggtttcgatttttttccgattttccttccaatttcaaaaaacatttctttttctttctcttcctagaaactctgaacaataagttgaactatagctccacctgatagctcctttagctaatggcctctttttggtaaaacattttggttttttttgaaac

SEQ ID NO: 127773 - DNA, 309 bp, Arabidopsis thaliana columbia
tttttttttttttttttttttttttttttttttttgtttgtttttttttttttttttgtgttttttttttttttaaaaaaaaaagctgcaaggtggttttggggggaaaataacaggccaaaaaagctccccaaaattttttaggcccattttttttaaagcccttgaaatccgtcccccataagattaagatttcccaacatttccaaggcttataaggggggtcctttaaagaacatttgaacccaggcataaatttttggcttttaaacattacaaaggggccccaggggcaagagaatggccaag

SEQ ID NO: 127774 - DNA, 292 bp, Arabidopsis thaliana columbia
gagctctgcaaatttcttcattatctaacttgggggcaaacaaagagctatcggcgcgattcgggatacataggaaagtccaaacaagcctttttttatgaaggtatgtttcaacatgctggggcccatgggtacccaatacagcagggtgtattctccaagagaggccttaccaggaaagcgaatttgcaaacataataccttgtcgcaagctctcgcttgcagctgcaaacttggtttttaaactggtttcaccaactggctttgctgcagcttgaaactggttcaaaaa

SEQ ID NO: 127775 - DNA, 432 bp, Arabidopsis thaliana columbia
tttttattttttttttttttttttttttttttttttgggggatggaacaaacccattcttgcaaaacatttattctcttcaaaattcttcacctcttaatcttaggttctaccacataatatcatttttcacatttacaggtactaaacaagttttagtcatttacaaacgaccttttagaagctttccatggagtagtaaatcaagatttttccctctcaccccgatttttcaacatgcaaacctaagcgcaaacaccgcgattaccggtgcagctttgtagaaaacctccttcatacttttttccacactgtttatgattgcgtgatctttcaaacttgaacatggcttgttcgctttcctattgacatgaacaatcacctccctgagtttattcacagcccatgacagttttaccaaactcaaaccaag

SEQ ID NO: 127776 - DNA, 535 bp, Arabidopsis thaliana columbia
  unsure (1)..(535): unsure at all n locations
gtaaagaagaatggatggatgaattattccaaaactctgtacatgcatgccaaaaagaccacttgttaagttgaaaagaagcaaatcgatcatagatgagtaaaaaccaccagcttgtaggtggaaagcaatactagacgaaataattgttatgagaagacacaataacgattagaaaacatcgatcgaggaaggccatgtaactgaaaatctctcgaaaagtgactgtaacatccactgccgagaagatgtgcacacttgcgcatatatgtccactgccactaaaattgcacttaaatgttggtattcgagagaatcaaatccaatgaagcatttccacaaagcaatatggaataggcaggagggttacaataaaaactcatttttgtcagtttaggaggatctcgaaacttttgattgacctcagggaactctggcttttcttatcatgctttaattcatccacttnctttgtcttccctgcantcttgtactgcaaatctacactcaccgcagcttattatctaagaacata

SEQ ID NO: 127777 - DNA, 341 bp, Arabidopsis thaliana columbia
atgaagattggaatgaaattttattagtagggcaaacgaaacaatgtggttgtgaatatacaaagttttgcttctccaactgaaatgtgatatcaatttacccactagatgctttaaccttcaagaaacttaatattgactgtccatgaaactaaccagaagctcattcaccatgcctcggtctggcatcttccctgctgctccatatattggagccaagcctcccgtgatcggtcctgggtttgcttttacagtttccacagcttcacgcagatcccgaaggaagtcatcgactacagggacgtgttgaagagtaatacatatatgaatgctgttgggtc

SEQ ID NO: 127778 - DNA, 187 bp, Arabidopsis thaliana columbia
tttggccgacctttttttttttttttggggttaggatgctatgaatggcaaccgagagaagattcaaatctaacagagcctaaaaaggctgttcaaacagtcatgattgttgcacatgaacactagacctgaacgattacagggaacaaagatacaggcagtactcagatgattgagggcacctacg

SEQ ID NO: 127779 - DNA, 461 bp, Arabidopsis thaliana columbia
  unsure (1)..(461): unsure at all n locations
aacttaatcacctgaattccttaatcttaatcagtttttgtacataagtgctcaataatcctacagaataaatagataaaaaatggctataacacttatgaacattttaacaacataaagaagaagtccttcatcttctctttttgccttccttttatttcatccaatatcagagagatgtaataatgtcatcaaataatttggccttgggagggttgttatctcaaaaccccatctttgttgctataatatatacattgtgccctcctcaagaccgctaaaaaaccttcatcagttagccttctagcattgtctgtaaccgggctcgagcttcatcggaaacacagaaccgtatccttcttctctgaggagctgnggatgatgagaagcagatgaccaccactgtaacgttatctgatgagtctagccttaacgcttcccttccaagttccatagcgcac

SEQ ID NO: 127780 - DNA, 441 bp, Arabidopsis thaliana columbia
agcaagactacaatcgtatcacattccatttaacagttttacaaacagtttggattacaagaaaacaaacacaaagcacatagagaaacagtgatacaacagcttaagaacagtaacaacaaagaagcagatacattcatacaatcaaatacagaaaatcagtaaataatcataaacagagagatacagattccttccttctatggaataataatgcgcaacgaacacaaacggacctttttttctgttgtcatggcatcaatgtaagcttagcatcaaacacaaaacctcgacacaatccatctgcataaccagggacgccctcaatccatctccaaccttgccaacaatcccacattgcaagcttccccatccttttagcagagaagtaaaccctatctccacctccaaaaactttaaacttactcgattcttgaaaac

SEQ ID NO: 127781 - DNA, 440 bp, Arabidopsis thaliana columbia
gatgagtggacatcactttcttggagaacaaggtcacccagtgaacaattgcgtctctacttcagaacttgggctactctcttcatcacctcttccagtactttcttgattcttatttgaccaaacttcgctttcatgagatccccacttttcagagagcttctcgttttctgcagctagagctttctcctgcaaaagttttagattccaatttgtaaaaagcaagcacaagaggcttacttacttggaatattacacaatttgcatacatacttatatctgtttatatacactcataaaaactactttaccttttgcttgagctgctcaatttgttccttaaacacttgagtctttcttgctcgaatacatttgacacttttctcaagctgttgctcaatctgttgcagctcctcgatgagcatgttcctatgccttct

SEQ ID NO: 127782 - DNA, 337 bp, Arabidopsis thaliana columbia
gggttaactaaagcttaaccttttttttttttgcctttcaagcaccccacttttccaagattttttttttaattaattaaactcaccccttttccaattttccccaccatacctgcacactttgggttctccccttgcaatgttgacacatccccttttgaatccccctgagaatggacatgggttcatacactccctgttcaagcgtttccatgctctacatatcttctgggcaacatgtgttcttgcttcatcaacagatgatcccttgtactcgttcaggtaacactctacatatgacccatcaagttccatcttggttctcatccttggcact

SEQ ID NO: 127783 - DNA, 309 bp, Arabidopsis thaliana columbia
ggaaagggggtcaaataaataaatgaatgaattggggagagagaaatcacagaggttttgcaagaaagaaacacccccccaagaaggaaaaatttacccttttggaatcttctttccttttggttcaagaaggcccccctccccccctcagactaaaaagaaaccggggaagagcttttttagaatccgagcttttcactagtgcaagaataccaattctgggttttccagtagctttttggccggtttgacactcgcaaagtctttttcgggcatcgaattcgaaatctcgtttattgaaaagggaat

SEQ ID NO: 127784 - DNA, 455 bp, Arabidopsis thaliana columbia
caaatgtcattttttaacttttttttttcttttttcttttttccatattaaaaattcacttaccaaaagcttctggactctgtcgtctgtccaacgcaacaatttgagttgaaatcccccgttttcttcacgtcaatagcctagaggacgttcacacagtggactttaagcttaaccttatctgtgacttctggaaagattctgacctagctctgtcttccgacttctccatcccgctcaccaaagagtttgactgaaggtcttccgacatgccgctttgagagtacaagtttttctttcccataggatctgaatttgcagcaggaaacccgaaaccctcataatcacggttctgccacaggatctgctcgaagaagggggagtcagtaccactgatggatacagacctcaaattacaactaagttttcttctgcccacttacacatgctaccac

SEQ ID NO: 127785 - DNA, 490 bp, Arabidopsis thaliana columbia
  unsure (1)..(490): unsure at all n locations
gttggcaaaagaattattctcgttaactttaatatcttatgtagtctttagtgactcggtttcgttcaattcttcttatggaacaaaatcagaaagtcaaaacaaaacccccttaatgggttatatagtacgctgtgatataatctggttgcgtcattgatagtagtgtacaaatttactttgctagtatgtttatgtctctcgttctgtctatctgagctccggtttagcgggacgccaaaatcccttccgaccaaccaaaaaccggtcctcgtatattttggttgaccaatgaagcgaaccaagtatggattcaagcttcattattgtttccatgttgncttgtaccacaagatatccacctggtctcactatccgatctatctcagctaccancttgtacaatctcacaccttttggtgagatcacctaggaggaaactggaatgtaacagatcgtatgttctagggtaagtgttgacggactcaca

SEQ ID NO: 127786 - DNA, 319 bp, Arabidopsis thaliana columbia
ggattcagataaacgaatacattcatatgaagtaacaaattgagtacataaaggtttattggtacacataaaaagataataatcaaatcaaaacaataactttacaattcatgccactagacggcaacccaaatcgggtgtatcctcacaaattagctgcaacaaacgtaaatacgctaaatcttaaaagaaaacccaaaacacaacagcaaaaaatgaacaagcacaaactttatgaacaaacaacataaaaatttactagtaatacaaaaaaaaaaatgatcaaagagagggtcatatcacattattgagcaattgc

SEQ ID NO: 127787 - DNA, 398 bp, Arabidopsis thaliana columbia
cccacgcttccgtccacgcgtccgagattctagagatcttgaattcatttctgctttgcaatgcttcaaacggcgtattgcttacgcgaatacaagtttcgaccaccttgttgggtggagtacatcgtctatccggcgtcacaatgagcttcctaagcttcaacgtggtccagtcaatgagaagtatcctcacattgtgaatgttgaagcaccggatactgcaagtaactatgaggaagatcattcaaggaccaaagcagacaggttcaagaacttagatatggaagaggagatgataagagaattaacaaaactgagctgggaacgagttgatgttagtttcagaggaacgctgcaaagatttctcgctcacaataccattcaggtgaaaacaaaga

SEQ ID NO: 127788 - DNA, 249 bp, Arabidopsis thaliana columbia
cttgagtgtttctaattaaaaagcttttaacctcagccgataaatctttctgcgatcatgcccaccagaaacatcggcattggtggagtgcaagaagaggtctatcaccccaacgcacttagggcggggctcgctgagtttatctggactttgatcttggtcttcgacggatcaggcttcgggatggcttgcaacaagatcactgacaatggagcaaccactccttccggtcttgaagccgttggctta

SEQ ID NO: 127789 - DNA, 119 bp, Arabidopsis thaliana columbia
ggggtggaaaaccggtattcataaagagaaaaataccaagtcagcacgtatgggaaggatatgcacacagacttaactggttattattcatataagcttagtaagtggtttaaggtgaa

SEQ ID NO: 127790 - DNA, 297 bp, Arabidopsis thaliana columbia
acctcggaagagagaaaccaaaaactagcaaaatggcttcccttctcagtttcctcctctgtttgcacatatcatatcgctatacaaacatctttaattctttctcataaacatatgagatgaaaatggttaaaggtagcaatgaagtattcttcgtgtagagagctgtcactgaataagccagcagtcaagaattgatgtaatgatctcaatggaagacttgaggggaggcgtagtattcactctcattgaagaccggtcttagatcttctttgcacatgaaatctaaagggaaag

SEQ ID NO: 127791 - DNA, 153 bp, Arabidopsis thaliana columbia
tctttttatccctaagtctcaacaaaacccttatttcaaggtagacgaagaaagaatgagttacagcgtcggtaaagcatcgaagcattttgcgatcaccggtggtgggatcacagacatcaagcttgcccagaagttttgggtgttttcatg

SEQ ID NO: 127792 - DNA, 146 bp, Arabidopsis thaliana columbia
tcttttttccggccctaataatggctggcatagcaaaagaacttgagtcgataatccagtttaagatctgtgactccaaaaggtctgattccaaaattgaggcacacgtggaagaagctgaggatttggaagcagaagcggaactc

SEQ ID NO: 127793 - DNA, 454 bp, Arabidopsis thaliana columbia
aaccaaaaatttaattgaaccggtaatggttaaagattatattggtttatcgagagtttgttacaactataatagagaaagatcatctctaagctgtgttcattctattatctttggagtgagaacacttagtcgtgaacctctggtagaactcttgatgatcttgtaaacttgagatagtggattgctagtctctgttctcgccgagacataggatcaatcactgaatcacgtgggtgtcattcttctccgtcttcgttccaagtgtttgattgtatggttttctcgagtgtgagtctcttgatcgttagtagagagagtccagcttcgattccggctgaagatttatagaagattcacaacatagactaagggttttgttcaccgtgagggtcttataaactctttgaacagttcaaccttatggttttttgctggattttcaacggaattg

SEQ ID NO: 127794 - DNA, 270 bp, Arabidopsis thaliana columbia
gggggcaggggtcaaaattatattaccccaaccacttgcccgttaaaaaaaaccaaccccaaaatcagataagggctggttccaaaattaaaaacccctcaacccaaaaaaaacaaaaaagggtttttttgggggggggaacaattaaaaattttttttatcaaacccccctttgctagaagcctaaaaaatttacccctccaaaccttgaaaccattatatgaacgggggggactataaaaaataaaacaggggggccctgcttttccc

SEQ ID NO: 127795 - DNA, 108 bp, Arabidopsis thaliana columbia
ggttaagttattttctagggcttattctcatgattggaccgagggggcttttgttcatccgggggagagtgccaggaggtgagatccgaggaagtatccttacacttg

SEQ ID NO: 127796 - DNA, 270 bp, Arabidopsis thaliana columbia
aatacgtatgtttttttttgtttaaggttttggctggcccaaaaaacaacttatcataactgacgtaaaaggggatcaacccccgaaaagaataaaacaacctcaaattccaatgttagttcttcatttattaaacaacaaagcctccattggctttaataacttgaccgttaatccattcaccaccattaccgggcaaaaaccctacaatctgggttatatcctttgactcaccgatcctccccataggacaagcccctgcaagcattt

SEQ ID NO: 127797 - DNA, 211 bp, Arabidopsis thaliana columbia
gtagaactatctccatatcaaattaccaggtattcattacagttacagaagggaaataaaatccattattacatgaatttaaaaaaatcatgattctgtctttattttgattaaaacgagtctaattccagactacattataacaaatggacgaaaggagagtgaaagatttgacgaacatgattaatctggccaactgtcatgaatcacg

SEQ ID NO: 127798 - DNA, 222 bp, Arabidopsis thaliana columbia
catactaaaggggctgattttgaatataacaggattgttcacaaataccccataacatcttatgcatttttttttactatggggggggggatatataacatgagttaaaaaaatagagttgccaaaatatatgaaaagaatttaaaaatggaaaaaaaaaggagttcctttctttttgcgatcacaaacttaatgatcatcataatggggaaatttctgtgc

SEQ ID NO: 127799 - DNA, 267 bp, Arabidopsis thaliana columbia
cctaaaattacattagatactcaacaacagggaagcgaatatggaatcatggtttcctacagagatgcaaacacatggaattgctaacgctcacacttctgataagaagacttagtcttcttttctcaaaatcaaatggtaattgcgattgaaaaaaaaagagacagaggaaaaaggaatctgaacagaatcatggtcgacacatgcccaattacatgaaaacgacgcatatctacttacttatagaaacgccgactatcaagtcac

SEQ ID NO: 127800 - DNA, 304 bp, Arabidopsis thaliana columbia
tttttttttttttttttttttttttttttttttttttttttgtttttttggttttttttttttttttttttaaaactggccctcttacaataaaaataaataaaaccggtccaatattaaggactcctacagatcaaaactcaaggggcatttacatatataatcacacaaatccctggaaaaaaaaaaaaaaaactctcccttttttaaataaataaccaaaacggaggaggggtcctttaaaaccggcatccaggactttggaaaatggttaaaaaaaaaattttgggattttcatttttgg

SEQ ID NO: 127801 - DNA, 206 bp, Arabidopsis thaliana columbia
cacaaaaaatcggtgaactgacctaaaacatggggccggggggggattaaacagagaattccaagggggccttccacccataaaacaccacaggtcacatttttactttatttgaggggttggagattagcacaaacaaaatggggttactacacattttttccacagcgtgaagaaacttaccaaaaaaaaggggattcagaagg

SEQ ID NO: 127802 - DNA, 172 bp, Arabidopsis thaliana columbia
gggggtaattctctttgaagaggggagagagcgacatattttagagaccaatgatttttttatagagagaaaactttttgaaaccatataaaaagttgtggtttatgcctacattgatacacattcgccggacaagtgacagtttgaaagttgaaaacaaagactaaagttt

SEQ ID NO: 127803 - DNA, 193 bp, Arabidopsis thaliana columbia
aaagcaaggggtaagtttgccattggaatttcaggattcaaagatgtatttttgatctatttaaactactctaccttccaaaacttttcaatttttttttgttgaaaagaaatatacccccttggagcggggttaaagagagatcctaatggccttttaactcctgaatataatggcctagttgctgggcccc

SEQ ID NO: 127804 - DNA, 222 bp, Arabidopsis thaliana columbia
  unsure (1)..(222): unsure at all n locations
aaaaagggaanatttctttcttggattgttgatataacaatggtactgcacaagaactatgaacaattttccctatcttctgctgggtcaatcgggtaatgattcccagattctgttaattaacacaatacattgggaagcaagggagacttcttgggggttactaaccttctttttttgaggtcaactttcattggcatcggttcgggtttgggccaaaac

SEQ ID NO: 127805 - DNA, 250 bp, Arabidopsis thaliana columbia
agttacaatctgtatacaagctctatgcacgtatacaaaagggcatggaaacgatttatagagttatagtatggaaataacaaccttctaaatttcacaattttcttttgtttccttgggatgcttcaacaaccctctcaccaacagtactactagatccagagttgggtgcattccccaaagcaagtgaatctgcaggtccttcttccttttgagctttctgcttagttaagtgagtctctcgtatgct

SEQ ID NO: 127806 - DNA, 474 bp, Arabidopsis thaliana columbia
caaaagaatctatcgttctttacttatacgtgtcttctcttctctaccaaaatcatacaaacaacatcacttataagaatgtaagaaagatacaataattaaaaaaattaaaaacaacgttaataaataatgttgctactacaataatgaaatttgttggttgtatgatcattggtcgtaatttttgtgtatcgtgtggcttactcatcactccatatctctaaggctttcactagtcaaccacagcttcttctggacaatgaatacaacattgtctgaatcttgatctgaatctgagtctgtcttggtacctacttcttcccaatgcaatgcctttagatacttcttcacaaaatccaccactctttgtttatcccttatgattataaacccgctcgggcgcagtattcgatccatctccagtaacaaatccacttcactacatccttttttcttgatatccgatataatatc

SEQ ID NO: 127807 - DNA, 246 bp, Arabidopsis thaliana columbia
agaagaaaaattatacaggagaaaactaaaatcatatacatttctttactcataactcctttatacattgttaactgcttaagtttaatgaaaaacacaccaaaacgagcggctcaaacttaatttcccgtcaattttccaaagatatgacaaggaaaaaataacacgttatcaaaggggaaagtgattcacacagagcccttgggctggtgcacaaccataagaagcctaaaatcaccaacactg

SEQ ID NO: 127808 - DNA, 321 bp, Arabidopsis thaliana columbia
aagaattaattagggggattaaattacaataatataggcttacaaagtccaaccataattggtggagtgaatgctaaaagctactacaagaaacgagcaaaatggtggacaaggaagacttcttattgtaacaagtaataacttttattaaaactctccgaaccgctttttctccattgtcctgggtttataacgtttttgcttcgtccttcttttgatgctgaaacattcacctccagagaacagtcgtattctgcccatccaatacgttggcgaactagatcgtagaccaccactttgtttttaagaaccaaatcacca

SEQ ID NO: 127809 - DNA, 239 bp, Arabidopsis thaliana columbia
agggggaaccatattaatcttatttctccttaaccggattcggtttaccatagaccaaacccaaaaccgggttcaactaattacactcaattcctcgggagattgttaattaaacagtaaacaaccctctgactcactagacttctgaatctttcacaaaagaatacgtttttgtaggcttttgctttttaccggtgcttacaagcttcctctccaccggattctccttcaattctcca

SEQ ID NO: 127810 - DNA, 460 bp, Arabidopsis thaliana columbia
atgtaaaacaatcttcattgcaaaaactgaaaaagttatgaacatcatgaaatacatttaacacaataaactacttaaccaagaaatcgtaactaagtggtcgcgacgtaaaaaaaattgtcgtctcatttggtttggatgtccgagtttgaggtcttgtttaaactgtgcaactacaatcactggcaaatgtgacactttaccactaaaccaatcgactcctaatacatgttgttcaacgctttttggcttctgcgtttggcctaagaagaccactaattttgccacaaaagtttatagttagagactcttaacaccgaatattaaaaaatgactgtaatggctcagttcttagtcatttctgcagtagctttcttcagcgcctggtcgtggttgagcattgcgtttacactcttctccacaaacataaactgaaagcacgcatagcccatagcatttc

SEQ ID NO: 127811 - DNA, 329 bp, Arabidopsis thaliana columbia
agctaaactattttttggttccgggaaaaaaacccatttaatggcctcctggggacttttaatcccggaacaagtttttcaaaaaaaccccccaaaaaataaaagaaaaggtttcgtcagattttggggggattggcccgtttaaacagaagaacatcaattgggtcttttaagaaggggggacctaagaaacgacgggagggatgtcatcaagctttcctccgtaatacctgtagccagcctcctgagccgcaattgcgaaagggctttgccgttttttggcgactggtttttgacgggccaactttggaatcttttgagctgggcct

SEQ ID NO: 127812 - DNA, 223 bp, Arabidopsis thaliana columbia
ggcaaaaaaaggggtttttttcccttttttattattcaacttttacaactaagtccctaaacaacaaacatttgcatacctcatggcaggggtgcccaagtttttttttcatttttttgataaggggaatcccccccccttggtgggaaacccaatggggttatcatatccttttaaacccgggcaattcatgttacattttttattccgggggtttgccttt

SEQ ID NO: 127813 - DNA, 455 bp, Arabidopsis thaliana columbia
cttcgaaaccaataacacacgattgtaaaattgtaactgtacgaagtaacttctggatgtgtgatatgtttaaagctcttttctttttaagagataaataaaaactctctacgaggttttttttacccaaaagattctcaggtaaaggaagaagaaagaagcatcatcagatcccagagttacatttcgaaaacaagagatgagagatgcagacaaacatctttacatgtctgtgtaatgctgtttttaagacgacacagcgatatatatattgcggagacatgagatatgtgaaaacctgtaaagctaagatcaatgcattggatgcctcggtgatctcggacgaacaggcgtctttgaaggactcacccttataggtaaagaaccaagaacaactccactgcagttgagagcagctattgcgctttccgccattactaactctacaaaagcaa

SEQ ID NO: 127814 - DNA, 317 bp, Arabidopsis thaliana columbia
cgttcgcccacgcgtccgcccacgcgtccgcccacgcgtccgcccacgcgtgcgcggacgcgtgggttaaaattttcgattttgattattgggtttctctctgatcatggcggttgttgagactggagcagcagctactgctgctgatgcaggaggagtcgtgatccagccgccgccgtcttcaccaccatcttcaatgactagtcaagattccggcgtttcttccgatgatcagaaccatgactcttggatcgatcacgttctccggcacgatcaaggtctttacagcaagatcgggtcacacgtggcgagatccg

SEQ ID NO: 127815 - DNA, 254 bp, Arabidopsis thaliana columbia
agcaacaactctttatctgggagaaacattattctctccacattagcctcacaaacaaagctttgcaatttattggtgtgggggcaaaagcaaaactgttcttgattcatacttttgagagctttcctatctggttacaacctcatgctctcatctaagctaaggtagaggtaaagggtcgggtatggatatagcaggtaaactgtcgtgcatatacgccatgacaaagaaggacaacatgccgatggaaagga

SEQ ID NO: 127816 - DNA, 267 bp, Arabidopsis thaliana columbia
aataataagggtaacggatttaatgtgggggatttttttttaaaaaacgttacagagatttctatgcacataaattaagttttgactggtatatcgcgtatatgtaaaaatcaaattttctggtaagaagagaaacgccgagacagaggtggctaatgtactccttcccctggagctacggctagagcattcaacaaaggttgaagagctttgacaacgatactcatattcgggctaaaatctgcttcatattgcacacacaacgca

SEQ ID NO: 127817 - DNA, 290 bp, Arabidopsis thaliana columbia
aattaatatgcgtcattaattcttcttctttgggagagaatgtcagggtacattcaaatattcattacactttctttttgaattattgattataataaacaatagcttaactaatttagctacctgatcaaaccgggcgctctctcaatccaattgaaccggagaaagcaaaggccggttcgagaaaaacgccttcaagttagctaaagcaatctgtgcaacattgtccaaagaccctggtgtagccacagcaaaatgaggagacaacactacattatccaaaccaaaca

SEQ ID NO: 127818 - DNA, 259 bp, Arabidopsis thaliana columbia
  unsure (1)..(259): unsure at all n locations
aacaagagcaaaatttcctggtgtcattggagccgntgctgagtaaatttcgtttcttcgatatcaatcaaaaaccaaaaaaaaaaacatctttcatctttggctccttctttccttttgaagacctgcaaatatttctcgtctcgatcaaagctttgcgacagatcacagatgtgctttcgatctctcgtgacaacatcttctatcaatcgagttcaagttatgtctcccttatttcacacgatccaagatcttgcca

SEQ ID NO: 127819 - DNA, 392 bp, Arabidopsis thaliana columbia
ataatgctaaccctttttttcctcctcaatttcaatataaactcatatcaccaccaaaccatcattacaaattctaaaaacaaaactctatgaaacacataaaacagaaaaatatatatttagtctcttatatatataacatcactgcatttagaaagtattaggctgtttagcctgagagatcatctggacaacctctctcatggtcggtctctcaacactatgttcttgcacacatagcattgccacaaagaacagttccatggcctctgctaatggaatattgctcaatctctggtcaatgatcttcaccacaccttgtctgttacagtttgtttggatctttgaccattgcacaatgtctatcccttcttccacaaaattatctactg

SEQ ID NO: 127820 - DNA, 279 bp, Arabidopsis thaliana columbia
tcctttttttttttcctttaatagaacaatttcttcatatattcacagggagtgttacaaaggtaaccttaacaactagtacaaccacacagcttccattgctgcagaggaaaagcaaatgaaaaaaaaaacaatcctaagcattatctgatatcaaccagtttccagctttccctatcttcgtaatgaacctaatcttcttcagtaggcttagatgaaccagccttcttggggagaaggagattgtggatgttaggcatcactcctccattagcaatt

SEQ ID NO: 127821 - DNA, 236 bp, Arabidopsis thaliana columbia
atgagataatcttcttttcatttcttaaatctcataatgacaggcaaatggaataacttggctatataggattggttggttagaacaaatatgaatagagagagagactacactatactgtttactaaacagactttcctaaattagaaagtctctgttctcctcctccaccacccgtggcggatcgtggactgaacggagctcttccagcggacgatcgtggactaatctctcca

SEQ ID NO: 127822 - DNA, 259 bp, Arabidopsis thaliana columbia
aaaggaacctgtctagcattttatggacaataaaagaatgaatgaggcgtcaaaatacaaaagaatgaataaacttagaggacaaaagttgactttcatggaacaatcaaaacttttccacacctctcaatagacagagagaagctatgaccaactgtatcccttaggaagcttcagctccatgtagaggttatctaagtcaaaagctctgtttcaccaactctaaataaacatcgtatttttcttctgagggctacta

SEQ ID NO: 127823 - DNA, 261 bp, Arabidopsis thaliana columbia
agtataaataatatcatttatttgtggtcattgtcatacaaaactggaatcattctcctaaaagttaatctttccatcaaaagtctgtccaaatccccaattgtttggcatcacattattaaaatcttttgtaaccccatcactcgtcgtaaccctgaatgaaataccctgaccagtcaaattaacaccagtggtccagttttgtccccagttcttttgcattgttatccacccggtcttgtctcctttaacttgcatcaa

SEQ ID NO: 127824 - DNA, 287 bp, Arabidopsis thaliana columbia
ccttaaattactgcacaagctctgcctccactggcttctgtttaaatccagcccttatcatcctcacttgccattgcttgtacgtctcaggtctctccactctatctactccttcacatgctatcacattcatcacttctctcccgtaaaactccccttcgaaatgtatcctctccgggttttctttggacagagtcgcaccaaacaagtcaaagagtgccgagtagtgaaacaaagcttctttgaaccgtgtggtgaagaacggtgcgttgaaagatccattgact

SEQ ID NO: 127825 - DNA, 270 bp, Arabidopsis thaliana columbia
aacttaaagattcgaatgcttttaaataaaaaggttcaacgataagtgaaagaaattagtctccaatctccatacgcatacgagcatcctaattattttacatcaattctcagttacttatatcacataaagcttaaccatttattcttcctcttcttcctgcttctccaatccagcaaccaaaagtagaagaccattggattcttcagttcaaatcaaaatggcacaagaacaaagccagaccagatcataattcaagttctttaactg

SEQ ID NO: 127826 - DNA, 262 bp, Arabidopsis thaliana columbia
gctcttcttctaaatctttcattctgcgccaaagtaccttttgtgtggggttacagataacacttgagagattttccttcaataatctcttcaggtttgtgaattcatcagcatctgcttagatatgagtccttcccaatagctccaagcatactacatgctacttccagcaacttccctcttctcggctgaacaactttcttaaccggaccggtcggtttcttaaccggctcttcttccttctcctctgggaacaaaacac

SEQ ID NO: 127827 - DNA, 161 bp, Arabidopsis thaliana columbia
aaccccgaagagatattttgaaggtttagagttgatctgattgaattttcacatagtttaaaaagcaggaaaaaatatttaaaggtagaaaaacgtattattttacacaaactccttccgcgattgacggtgtcaatgaccaccgtcgtgtcggttggttt

SEQ ID NO: 127828 - DNA, 273 bp, Arabidopsis thaliana columbia
aaataatgctttttttgttctttatttatttacatgaaacatatattaaccaaacataaaataagattcgcaaggcaacaaacaacacgcacaagcttacaaacaaagacccaaactcaacatacacatacacacacattcacacgtaaagattacttctgctttcagttagttccttggcttattaaaccaagatttctcttgatcacatgccattttgcaagcctctctactcgtaatctcatccacccacttacgcactttagatctttt

SEQ ID NO: 127829 - DNA, 275 bp, Arabidopsis thaliana columbia
gaaatcaacataggcagctttttcctctactagaggctctatagattggagtagtcaaatactcggattcttcacaacaatgcaagaacatcaacgcaacatacaaatttagatctatggacaccaatagaaactacgtttaaaagaagaaagaagatactcagaccatgtatgtcataccgacctgcatcagatgcgactgaggcacactcaaatttgcgatccctctcctgcagtttttcctcaggaatgtgtagaagtagtttatgactaac

SEQ ID NO: 127830 - DNA, 143 bp, Arabidopsis thaliana columbia
tctttatttgctcctgagaacttttgatcggatgcgaaaggctagttgtacgattcttctggtgtgatcgaccctgcgaaactttcggaggttactttagctatgattgcaatctaagagttctgaaaatggcggaggaaagc

SEQ ID NO: 127831 - DNA, 355 bp, Arabidopsis thaliana columbia
gcgggaatcatgatttattcatatgatgattaattcaaaatttcagtttcacattacacattctcttgttcaaaatcattacactcgcaagctaaagtaatccgcttcaatattagcctatctcctcttagtatccatatcctgaggtggccattggcttcaacctccttagacattttcttgagctcggtaaccaaagcctttgctgtcttctcaatacctctggtgatcgaaacagggtttgcaccagcaggtaccaccttgacaccctcagcgataaaaccttgtgcaagaacaacagatgttgttgtaccgtcaccagccaagtcattggttttggcagccgcttgcctca

SEQ ID NO: 127832 - DNA, 268 bp, Arabidopsis thaliana columbia
atcggaacatttggggatataaaaattagaagagatgaaacaaacttccttaattaaaatggaacacaaccacatcaaagaaaaaccggcaacacaagatacaacacttaaaagttaaaacacttatcagaggtcaccagaggcatgaagagacctcaaatgaccaatttataagataaagataaagatctccatggaatcaaagataaagatcttcatggtcagttggaaacgggacggacatgaactccaattttgtggagcaaag

SEQ ID NO: 127833 - DNA, 110 bp, Arabidopsis thaliana columbia
aaaaagcaatttgaaactttcattgctatttagctaacattacaatcttattcgttaacttatttaagacaagtttaagcccaaaaaatgcttggggttgaaacgaactt

SEQ ID NO: 127834 - DNA, 259 bp, Arabidopsis thaliana columbia
gaaaagtaaatatctattgtcactgatcgagaaaagagagacatgtaaacatccagacactaaatttgagtagatagaagcaaatggttatcaattacactacaaaaacgaccagcagcagtaataggctcagtagtacgtgttgtagtacgcttgaggagcaacagcagcagccggttgctgcaccggtgcagccgctggtgctgctgctgcaactggaggtgcataactctgcgttgggtatgtctgagcaggatac

SEQ ID NO: 127835 - DNA, 177 bp, Arabidopsis thaliana columbia
agaaaattcttcaaatcaaagagtataaactaagaccaaacataattcggtttacatatcacataagggaaacaagatttaacaccactcaacaagtccacataacacactacaggcatatatcatcacctagcggaaatgacatttttattgaacaaacaaagaaagaagaaaaca

SEQ ID NO: 127836 - DNA, 313 bp, Arabidopsis thaliana columbia
gaggcaatactttcatattcatttaatttccagttccgagagtacatactcaaaagtaaagatctaaatgtacaaaactcatggaggaatagaagactcctttgagttgggaaaagaaaagagtgggatttgtttcatctaaccatcttagatgactttctttttctcgaaaaacgtcttcaaatgcacaaactgcattcccgcgactcctaagcatacgaaaagagagaggaaactcaaccacgccattttcgagttagtagcccgggtcagattctgcatctcttcttccctttctctgagataaaacatc

SEQ ID NO: 127837 - DNA, 288 bp, Arabidopsis thaliana columbia
aagcaaagtgggttacaaaccattattattgctttatcaaattggaatattaaaaatgtgcataaatcaaacaaaagaccaattcacaagaactataaaatggactctcaagtgtttaaagtcacacagatgaaaagagaggttattctataaggccaagataataataaaaacactactaagcaccactctgtacaaaacaaagtattgactgtgtaacaaacaaataaacaaactgggaatgagcacaaaagataagccatagtaagattttttggttttagaaag

SEQ ID NO: 127838 - DNA, 450 bp, Arabidopsis thaliana columbia
aaacaacaagctaaacgagctgccaaagcagagatctattcaagaaaacctcatttgatgccgtcatcgccagaacacgtggatggaaaacgacacatttcaaatcagatggtgagtaacagaggattgacccggcaacgcaaagagatgatattggagaacggcgtagaaagtttgagctcagagttttggctggagctggtgtgaagtcatcagagggagatggcaggaataaaaatggggcatttgcatcagatgatgaggatgataacgatggtgataacaatgacatggttgataatgatggtgaatcagaagatgaattttacaaacaagtgaaacagaaacaacaagctaaacgagctgccaaagcagagatctattcaagaaaaccttatttgatgccgtcatcgccagaacacgtggatggaaaacgacacattttaaatc

SEQ ID NO: 127839 - DNA, 298 bp, Arabidopsis thaliana columbia
  unsure (1)..(298): unsure at all n locations
gcttgancggatcatttagattcaacttcaatctataaatatatttacatacatacatacaacactcaaatctctctgtttgcaactgaagactgacttgaacaagagcgaggcagagaccgccttttctgcagtcagctatggattcagcaactaacagaaaacctctgtttgaaaccatggacgagaaaaaaagaagagagactgcagaaacatcaaactcttttttcttatttacatctcaaaaacagaaaaacaaaaagcaaaaattttaaaaaggttttttctttctttctat

SEQ ID NO: 127840 - DNA, 123 bp, Arabidopsis thaliana columbia
acaatgtaaagatatacaaatgtagagagatccgtgaggccactgatgattgcagtgctgaaaataaaattggagaaggagggttaggatctgtgtacaagggctgtcttaaagatggaaaac

SEQ ID NO: 127841 - DNA, 279 bp, Arabidopsis thaliana columbia
ttttttttttttttttttttttttttttgatttgtgtatgttgtggggggcgtgaaacatgtgcattaatggaaagagattatatgcttattccaaagattaaaacagcaaaaccggaatcacactcaaatttacaaaatggccgaccacaaaaaaagagagggcctaattctattgggatcaaagttgggagaaatgaaggagaaacaaacaaaccaaaaaaaaacttccccatttagggagatagtaaaattaccagaaagatctaaactttttatt

SEQ ID NO: 127842 - DNA, 278 bp, Arabidopsis thaliana columbia
gcttaattaacttaattattgactgagtttcattatctttaactaccaaaaaaacaacaacaaatgggaattttaccttcaaataatcccactccgccccctaatttttcttttattttcactaatttttcctcggcaaaggtaaataaattcaatataaccttctaataaggaaaaaggggaagaaaaaacatccaaatttattttcttaaattttttaaaaaaatgattagggaaggaactcagaatccttcccataccttatatatgcacacgca

SEQ ID NO: 127843 - DNA, 418 bp, Arabidopsis thaliana columbia
agtattaaacatgaccatactaaaagaaatgttttagcataagtaatgataacagagttataatatgttttattaactttaaatcccaatcagaattgcatttcagattgcactcctgaaacgggacttaaagaagttttgatggtttgaggaatttcctcatgcgcagctcagaaatgaatatgatcaaaccgtaacatagaacttttaaacttacagtaaacggagctggagactctagttttatgtccttgaccttcttttccactgagtgcaccagttcgagtccatgcttccgcacccatcacgcacaagtttctcagatccagagtagcaacactttgctttaacgttttaagatgtttgataatacgttggtggttgcatctgctgtctgagggtaataagactgatgcac

SEQ ID NO: 127844 - DNA, 233 bp, Arabidopsis thaliana columbia
agctgcagtgaactttgtctccagctgtttggtctgtgatttggcttcttctgctgcttgactagaggaccgaacaacatcctctagctcaaggttcttctgggtagcagctgctgctgcagatccagcttcagaatgaagctcctccagcgatttcagtttctgttcaagctcagagttgtttgacaaagcttgagaaagaagagcatctgttttggagaaattctcatctg

SEQ ID NO: 127845 - DNA, 434 bp, Arabidopsis thaliana columbia
gtagatattatttaaatttaatttctccaaatgaaattatagaacagaatctttgtgtgaaacaaaaatagtttattttccctctattaatttgccattctttttttttttgacacaaattaaagttgatcattgactatttgactcttttggccattcataagttaaggagcttaatctttcttcggcctcatcaaatgacggagtctaggaattaaacggcccgatcgagatcctgacaccaactcttgataacacatacaaagatcgagataaacacatgacgcgggagaaacgtttgatagctgtagcatgacgtggggggcaaggatactggtcgcccaatagaagaagaacgccgatattaaggaaatgatgactacaaaccatttcacatgcccaaccgcagtaaccacaccacaaaggaatgccaa

SEQ ID NO: 127846 - DNA, 395 bp, Arabidopsis thaliana columbia
gacgccgtcactaacttcaaatctcaagttgatggaaacgacgccgaatcggcttttcttgacgctcattctaaagctgagatcgtggatatgttgaggaaacacacttacgccgatgagtttgagcagagtagacggaagtttgttaacggcgacggaaaacgctctgggttggagacggcgacgtacggaaacgacgctgttttgagagcgcgtgaggttttgttcgagaagactgttacgccgagcgacgtcgggaagctgaaccgtttagtgataccgaaacaacacgcggagaagcattttccgttaccggcgatgacgacggcgatggggatgaatccgtctccgacgaaaggcgttttgattaacttggaagatagaacagggaaagt

SEQ ID NO: 127847 - DNA, 331 bp, Arabidopsis thaliana columbia
gattaaaatatggtttatacaaacaaacaaaaaggacaaaagtgtaacggtggatcatttgtaagaagaactagtataatgttcttccttttctttgtgtctatacctaatttaaaatctatagtatagtaacaactgccaattcattggagttgtcttttgtagtctcacatggaaaagcataggttatatatattaagccccattcgttatctgttccttcctcctttacagattatatcctttggacttttctcgaacatgaaaggagaccaaaacccagtagatgttgcatagatacgtatatttatatacatgtagcttgtactgt

SEQ ID NO: 127848 - DNA, 128 bp, Arabidopsis thaliana columbia
gacgatcaaagaatcacactttgaagggaaaatgttaaaacatgtgatagatatatatatataagagagatatgagcacattactcatgtttttgggctgagaaatagtgggttatgttgattttccg

SEQ ID NO: 127849 - DNA, 179 bp, Arabidopsis thaliana columbia
atatacaataatccatggcaaaatagaaacaagaataaatgttgagaatactctgaagaaatacgagattctaaggatgaaacagagaatgttgatagggaagtttcgacacattaaaaagattttgactaataaaaatcataattcaaagacaagaaacaaaggggcttggtcctcct

SEQ ID NO: 127850 - DNA, 470 bp, Arabidopsis thaliana columbia
  unsure (1)..(470): unsure at all n locations
aaaacattcttcctcatccaatgtttggcttcttttaccaatacaaagcattaaaacagatctcatggtgtttaaacgcaacaatcccatgcaaatgcataaagagataaaccaatgcaaaagcagccaaaccctacaaaaaccccagaaaaaaatttgttcaacactcagcgtcttgcatcagtaccttacagataagagagggaatccctaatacagagagatatggggagaactctccaccaaatcatacaatcagtaacgtcttctcggacttcttgaacgttgcgacctcccatacctcgagttctttctcctgtaagattcaccaccactgggaccgctgctgaaggcccagtcaacgctaacattctgtgttagaagctcagcaccattcattgctgaaatagcgctctgngcttcttccttcttctcatattctatcaaagcatatcccttgacataaccac

SEQ ID NO: 127851 - DNA, 124 bp, Arabidopsis thaliana columbia
cttaaaccgattcatttatttggatccgaagcaacccgttaaaaaagtttcactgatttaaaacatacagagtctagacgtaatgaacctacaacagtttaaactaaccaacacgagaaaccgg

SEQ ID NO: 127852 - DNA, 275 bp, Arabidopsis thaliana columbia
aaagagaagggggtatttttcacatacatgatcttaactcgaaccgtttttatcaaacatttcaaatctacgggggcgattttttctatgaacatcaaactgaagggaaaaaagcttatgcgaaaccgttgaccaaatcattttcacagaatctccaacttgggaaggaaagggattcttaaaacacccagcaacctttttaaatttcccccacttttttttccactgatcctttgttatccctctgggaatattcaccaagaacttttttttta

SEQ ID NO: 127853 - DNA, 182 bp, Arabidopsis thaliana columbia
tgattactgatgatgattatagagatctggcggacagggttcctccaggctgcacaatgacaatgatttcagactctcgtaacagtggtggcctactcgacgagaccaaggagcagattggagagagccctaacaaagatgccgaggacgaagatgaactctgaagaatcttcctcaagatt

SEQ ID NO: 127854 - DNA, 373 bp, Arabidopsis thaliana columbia
aaaacaaacccccttaattttccattggatttaagatacaaacccttaaacagacccttagggcatacaaattacataattaaatccaaaccaaacccaacccaaaccaaataaaaaatttttcccaggggacattatttctccattttaaaaacacgtaaaaacaacaaattggggggatttttttggttccaacataatcaaaagcaaattaatcacccctttccgttttcccagtttaacccacaaaaaaacgaagttaaaccgggtcgccccccccctaagaaaaccaacccccttaaaaccgaaccgggcttggaaaaaaaaggagcgttttgtgtttaaaaacgaacagaaccccttagtttttttt

SEQ ID NO: 127855 - DNA, 147 bp, Arabidopsis thaliana columbia
gaaccacaccgaatcaggtgtgatcagatccccgggtcgggtgttttgaaacaaaacactatccataagggaaaactttagataaaccagtgattaacccccaacaccataaaggatatcttggagagaaatgaaggtggggcctct

SEQ ID NO: 127856 - DNA, 252 bp, Arabidopsis thaliana columbia
aaaaaaacgcaaggaaaattttttatgagaaagaaaccgaggtttcttatgcggtaagccgtttaaattacaagaaaaataaacttatgggactattaagaattgaaactcttttctctagatgattgtggcaaccaaaattgttagtaaggaagatctttaccataaaaaaaatttgagggaaggcaacaaaagcttggggtgattttgggagaaactaacagactatgagggttagggcaaatacccaaa

SEQ ID NO: 127857 - DNA, 165 bp, Arabidopsis thaliana columbia
cttaaaccgattcatttatatggatccaaagcaaaccgttactaaagtttcactgatttttaacactgagagtctagacgtcataaacctacaacagtttaaactaaccaacacaagaaaccgggacgttctttatgtttacagtcccatctaatgcggcaacca

SEQ ID NO: 127858 - DNA, 266 bp, Arabidopsis thaliana columbia
ggcccaggaaccaattctaaaacggataacagggtttcacattcacccttttaaacatttaaacttaaaagcaaatcaaaaatttgtttctttttaaggggaacaaaattggggccctgaagcagttaaaggaaccccgggggtatccatatcagggcctgggttttttttttttgaagggccctccccttttattacggccgaagcttttggggttttcaccatccttatccaaaaacttgatttcatcgaaaaagttttcggtt

SEQ ID NO: 127859 - DNA, 155 bp, Arabidopsis thaliana columbia
ggaagtctctgtcttgttccttcactgccaagttcaagtgtctttatggcaaagatgtcttgaaaaacaggcataagacattgaggaacttgattaaatctgtgaattatcttttgatagaagatgggtttagttgggatgatactaaacagatg

SEQ ID NO: 127860 - DNA, 109 bp, Arabidopsis thaliana columbia
cccactcttacgcgaacatgtattcgatatagccatgagtgatgtccatatgcctgacatggacagttccaagcttggtgagcatgttggtatagagatggacttacct

SEQ ID NO: 127861 - DNA, 276 bp, Arabidopsis thaliana columbia
tttgttttttttttttccttaatcaatacggcctacaccggctctagctatttgatgttcctcatcttcgcaatcctcaaagttgagaaagcctgttctcttcctcaaagacacaacctttgggttcttgtcgacaactgggattgaagagacggattctactcggggaccaacactcttgctggccgatgcatcacctctactgtggacgtctacatcaccattatcatcatgcaatgcctggaccttgtgcttcttctttatcaaatctctttg

SEQ ID NO: 127862 - DNA, 323 bp, Arabidopsis thaliana columbia
aaaaaaaaaaaaactggggacaaaaaacccggggggggaaaaaacccttgaaatcgtaaaacagagaagtcaataaaacctttttgggaaaaacttgggtttgataagcaaagccccccaggggggggggtggcccttttttagtttcccaaaagaaagtttaggggggtttttcaaaaaactgaaaaaatggggccctaacccctggaaatgggtgcccaaagttttttttgggaattttataaagggggttggggaaaaacaaggggataaaaactaaacctccttaaagggttttttatgagttgggccttgggggggcc

SEQ ID NO: 127863 - DNA, 127 bp, Arabidopsis thaliana columbia
cgaatacttaactctgttgtatattgccaaagagcaatcacgttttggtttctgtaaaagaacttgcctttgaatatgcacataaaataaactaatcaaacttgaatcttttcattatgaagtagtg

SEQ ID NO: 127864 - DNA, 233 bp, Arabidopsis thaliana columbia
atggggggtaatcccaaaacccacccggggtttttttccaaaagggtaataacttgaaacattcagaggacttttgttttggcttacaaacttatacaaaaaggcgagagaaaccaaaacagatcaaagaaacccaaaatgaaaaagatttaaaccaccaaagggggttttaataagtaaggaacatttaccccgttggctggggataaaaccaccaccgggaaccaaaacca

SEQ ID NO: 127865 - DNA, 215 bp, Arabidopsis thaliana columbia
acgctctatcggctcttcccttggaggcttcttagcacaactctgggggcatcaccgaccaaggcgggtttgatcattagttctatcacatacatactagcatacttcaactgctggttctattgtgccagggactattatagaataatgataccattaaaatttgcttatacgctacgttttaacaggaattcgtgacggacctcatgaaccct

SEQ ID NO: 127866 - DNA, 323 bp, Arabidopsis thaliana columbia
aattgccaagtgaatgaatgatcattagaattaagacgcaaaacaacgtcctagatccaattttaacgccacacatacttcgctaagcaactacgtttttttctttcttggctctttatgaactaaacaataacaaattcacattaactaattaataaattacttaaatatcctcaaacatacagggatattatcggtaattcagataatgtccactcctgtctcctacgtgaaaaacggcggcaaacaaaaccgcgagccagacatcggcgaggaatacaataatcaccggcgacggagacggcttcaatgggccttaagca

SEQ ID NO: 127867 - DNA, 363 bp, Arabidopsis thaliana columbia
cacgcccggattcatcaatgagaccaaacataggtttcaaaaatcagtatttacacacaatcaataaatatgatctggatacatatatataactcaaaaaggatcaaacattgatttacatacacacgttttatatttgtatatatagaagatctacaaaaagaatctgttatatcgccattgttgaaataaaaacatcttagtaccaatctcttcgtgtgtgttgtgtgacactgattctgtcttcatgttatgttcatgattgtctttttgagcagccatagaagaagagcaagttcgatgctgaagatcatacgcaaccatgttttatccaccaagaatccgtaaacagtgatccctgct

SEQ ID NO: 127868 - DNA, 271 bp, Arabidopsis thaliana columbia
gcaaatggggggtatattcaaatggggagtgtatatacatctttgccaacttgaaaacgggtgaatctatgggtaaacatttgtatatatgaaaaacaatgacaaataacaaatcaaaaatgaagaaggtgggatataaaaaggagcaaccattgattggtcttcttttctggacgacgacttgaactgctccaacaaaacagaaaaaggatgaggctccgatcaacgggggagatggctccgaccagcattcttcatgttcttcttcctc

SEQ ID NO: 127869 - DNA, 137 bp, Arabidopsis thaliana columbia
tcgcgatctagaactagtcttgacgcctgggcgcggccgtgccatggatggcaggactgagctttgtcgatggacaggccataaactttaccctgggggagggatcagatctatccgaccgtactgtgaggtggttt

SEQ ID NO: 127870 - DNA, 433 bp, Arabidopsis thaliana columbia
cattagagattttctttgtttcatatcattttgttcttgatggacctaattacatgagagagcaataacaactactagtgtttaccaaaagagagagagctaaactatttacccaaactttttaagccgcggaatgattaaaacatgtgacccgcgcagatatttgttagtctattaaaggagatttagctgatgcagttaaggatcagtgtttctggcttctttggtcttccacttggcaagcctttttcattcctgttgcagcctgaacgaatcccacaataacctgaagctcatccatttgctgagacatgaagtgtctctgaataatgtcaattagttgctcctttgtgggattcggaagagcatccacgaggttaaaatgtcgccaatatctcagtaatgcagccattatccaacttggtaagatcaa

SEQ ID NO: 127871 - DNA, 279 bp, Arabidopsis thaliana columbia
tttgtcggccgccctttttttttttttttgggaagaacaatagacaacttcgaattaaactagaactcttttaagttttaaccaacagaagatagtacaaagttctaaagaacactggtgaaaatcaataacaaggggacagagcggtttttcctaatcaaaactacaagaaagtaaccccaaacattttataatctaaagaagttgaattccactcattttcaagtttccaaattagaaccagccaaatgaaaaatcccattcaccaggatttttacc

SEQ ID NO: 127872 - DNA, 259 bp, Arabidopsis thaliana columbia
ggatagaactaaccacacttgtatattttatttgtctattatgctttaaatttacattgagcctttgaccaaagaaaaaagttgacaataattagccgtttcttgacattggtgcctgatatatcataattagccatttgttggcaaactcttagatattcaatgagatcattaaactgggacttaaagggatttaatcttttccaccgggtatggactcggcccatttgaattaagtatgcctccaggcgaaagaagc

SEQ ID NO: 127873 - DNA, 149 bp, Arabidopsis thaliana columbia
ggggaaggaaaattgtacctcctagttcattaaaataaaaccttgggccggattggggtttccccacctttggtaaatccaaacctaggggcaaattgtattaaaaaaaaaagggggttttggaccccaaaaccaaatttttaaaaccc

SEQ ID NO: 127874 - DNA, 395 bp, Arabidopsis thaliana columbia
agaaaacaaggcttgatgcatatatatatatatatatggaaatattgagaagtcggtttgtggtctaaacgggccttctaaaaacaaatttgtgtgtggcctaataattgagtcggtaatgttgtgcactttaatgatgatactcacttcttgtttttcaaactttctccttttttacctaactcactaaaaagttggaaattaacttgtgcttgaactgctttgaatgttaagtgatgccatccgtctttctgcagcggctgctctcttttccctctgtgctgccattgctctcctcacttcctccactttagaaattggcttctacttctccgcctgcgcagcttcggcctgagccttcttttctcgggctttgcgtagtttcttcaactcct

SEQ ID NO: 127875 - DNA, 213 bp, Arabidopsis thaliana columbia
tttcggccgccctttttttttttttttgggactaaactaggtgtgttgtatataatatagtctcaaaaatttcaatcttaacttataacagaaatatatctcacacgtctttttaaaacgaaataataaagaatgtttttatttccagcatttcagcttctttgtagcgtctatgatgctttgcttcgtttccaatctttggcacttgagcaa

SEQ ID NO: 127876 - DNA, 225 bp, Arabidopsis thaliana columbia
aaaaatagtaaaacagagagaaagggggttatttgaggacaccacgggttattaattacagcacgagaaactaaaaaataccccaaatgaaaagcagagatttaaggttatgcagagcaattaaatacaaacatttatgcttcgctttttcttatatataacttcccatttctcaatcccctttaaaccaaatatccgagaccaaataaacctaaaccggaacac

SEQ ID NO: 127877 - DNA, 365 bp, Arabidopsis thaliana columbia
atacgttcgttcttttctgttgacaacttcgttcataatacaagaatctctacgctaagaatttcattgaagagttaaacttataatccaaagccaaaagagtaagggtagatagaaaaaaagaacgcatttacattcttcttataacgttgtcgtcgaaacgtttttaaccttacttttataagctttattagtcttcttcaagccttttgatggtaagctctgctctgagatggagaatgccattgatgaagtattgactatcttccgctataaaagacgtccatgggaccccaaacaggtttctgtaacctactgctttccctcctgtgaatgtgtagttccctttgtatttgcttatgaaa

SEQ ID NO: 127878 - DNA, 333 bp, Arabidopsis thaliana columbia
aaattaaaatatatacaatgggtcaacaaagttgatatattttatacacaatataaaatatatatatattcccgattagcaaacagtgtccttagtaaaccaggcaaaaaaaaaaaaacacagaaaattgctgccaactattccgcctcaacgtccggggggaaactcgcattttccatatcgaggaggatgcgtgacgacgggagcagctccaccaaagaagcacgtaccaacacgacgtgagttcttctggtagtaactattgaaggcgtacgaagcgagagcttctaacgactcaggatgataacacgtggcacctggctgaatcgggcg

SEQ ID NO: 127879 - DNA, 452 bp, Arabidopsis thaliana columbia
tgaaaacattcatatgtcagaaaaacatcaaaattatagagagttcctttaactgaagattatgattctggaatggtcggagtcaattatggtcggatagctaacaatctcccgtcgccggagaaagtagtgaacctcctgaaatctcaaggaatcaaccgtatcaaaatcttcgacaccgataagaatgtactaaccgcacttgcaaattccaaaatcaaagtaatcgtcgctctccctaacgagcttctctcctccgacgcctcccaccaatcattcgccgacaactggattaaaacccacataatgccatacttcccagcgacggagatcgaagctatcgccgtcggtaacgaagtattcgtcgatccgacgatcacgccgcatcttgtcaatgcgatgaagaacattcacacctctctggctaagtataaactcgacatagccatcaa

SEQ ID NO: 127880 - DNA, 160 bp, Arabidopsis thaliana columbia
agtagaacatcaacatttgtaagatatataatagaaaacataacttccatattaatttggtccaacgaaacattaaaactgaaactcaaaacagagttggatttaacaacgaaagcaaaacacaaaaccaggtttggtcgaaaatctacttagatcgctg

SEQ ID NO: 127881 - DNA, 229 bp, Arabidopsis thaliana columbia
ctaaaaaaacagattggccccaaaataatcaacaaaatcaatcggggccccaacaaatgcggggaccgccccaaacaagggactcataggtaagggcggaactcacaaaaaacaaacaaactccacaaattcctaagagaccagattagctttccgggtaacaaactcagatcaatttataaccattcaatcccccaaacccggaaaatttagaaataaaaccctccaa

SEQ ID NO: 127882 - DNA, 295 bp, Arabidopsis thaliana columbia
gaaaaaaaaaacccaaaaattttttggccccactaaatgggtttgggaacaaacaatccaggggcttttttaattcattaaatcgaaaggttttttgggccaatttttaaggggggggaggggatcctttatttccgtttaagtttaagttttttttttttttgctgggggttggacgggaagttcctaaaaccttttaatcccagtttggaacattattttcacaaaagggtggggggggcctttaaaaaaaaactaagggccacattttaatgggttggaccccttaattttt

SEQ ID NO: 127883 - DNA, 187 bp, Arabidopsis thaliana columbia
ggaaaagaaaagaaacgctgcggaactcggtgaacaacaacgggcttttacaggtgtgtgcaaaaaaaaaaaaaaccaaggttgcaggggactactgttatacaaaaccaaaaacgcaaaactttggtggagaatgagacgaccatatatcctgaagagggttctgagttagcttactctccttaca

SEQ ID NO: 127884 - DNA, 228 bp, Arabidopsis thaliana columbia
ttagtggaggagatatggctaactagaatcttgacgggagagatgttgctcctcataactgaggaccgctgtgagtatgagctgaggacataatagtaatgatgaatgtggtgagaggttgagaacttaggaaggattgaagacaactacaacttcacatctactacacaaattcataaagaagggacaggaggaggaaaagccgaaccagtgaagagtaatggatgg

SEQ ID NO: 127885 - DNA, 124 bp, Arabidopsis thaliana columbia
attaggggccaaggttttattacatacagaagcgtcttctagtacttgtaaacacatatctgttaactcaggatgacctctaagccaaagttggaggataaaacaaaaagtagattaaagtttg

SEQ ID NO: 127886 - DNA, 142 bp, Arabidopsis thaliana columbia
aagattaaatctcatacttaaaattaatcaagaactttggcttagcaacaaccatcctagaatctaacataagtctaacacataacaaaccgtacccctctaacaatcactgagagactcgttaactttaagcatatcaaaa

SEQ ID NO: 127887 - DNA, 145 bp, Arabidopsis thaliana columbia
  unsure (1)..(145): unsure at all n locations
ggntcaaattcggcgagttataaatggtatgaaccgaactgaattaaccgagtaccaaactgaaccgaatttttattcggttcaattcggcaaaattttaaaaaaccaaaaaacccggaaaaccgattaaaccgaattgtttaac

SEQ ID NO: 127888 - DNA, 166 bp, Arabidopsis thaliana columbia
gtagcagattgagggattacctggggacttactatgcaatgggatggaaacccaaatatagcactaggcgtccagatgttagaagagtgtatccctccccattcaggtgaaaaacatcggattcactggtgttttcaggctaatttttaggccactagttgaggac

SEQ ID NO: 127889 - DNA, 391 bp, Arabidopsis thaliana columbia
aataaaaaatcttacttttaatcgttataattagggactgatattctcgtaatcaactactatacattacaattctacataaccaatcgaatattggatttcctcaagtgtgcgacctttggtttctggtacgagttttgctacaaaaataacagtagccccacaaacagtagcgaaaacataaaacgttcctgccggattccaattcattagaaagttaaatgtaaaagatataatccatgatccgacccagctaacaacagtcacgaggcttccggctgatccttttatgtctattggaaatatctctgacataatgacccaaggaatcccacccatccctaatgaaaatgatccggtgtacaccaaaacgcctgtaagtgctagatat

SEQ ID NO: 127890 - DNA, 393 bp, Arabidopsis thaliana columbia
gttactgatcaaagccttttttattaaacgggtgactcaatttgggagacaagaatcccatcagtatctgcataaagccattcaccatcacaaatccgagtccctgcgatatttaccggaactcgttgttctccaagccctttcttactcgcttttatcggatgagaggccaaagctctcactccgatatcacaaccgttgatctcatcgacgtctctgatgcatccgttcacaacgattcctgcccatccgttgttctgagcttgaacaacggggttacctccgagtattgcacatcgttgactccctccaccatccaccacatgaactctaccgtttgctttctcctcgatgaattgacggattaagccattgccttcaaaaactttgaca

SEQ ID NO: 127891 - DNA, 375 bp, Arabidopsis thaliana columbia
ttctttttttttttttttggttgagcaggaaccatgatgaattataaccgggggactctaactatacatacatatagcaaagttcagtacctatgctgttttggcatgacatttctactttatctttacttatcagagcttaatcaattctaaccctaattaatcttcttacgcattcccattcgtgatctagcatatggcagcctcaaaacttccccagtgagggatgagtaaagcactgtgccttgaagagtatgtagtgcttcacttgagcaactgacgtcctggaaatcaacaaatgcaacaggagtcccatatgtaccctgaatcttcaggttcaagaatccacggcatctcgagaaaacttgaattagc

SEQ ID NO: 127892 - DNA, 142 bp, Arabidopsis thaliana columbia
gcccggatgacaaaccactgctaagggccaactgattatctgggtagctcacccgtttatcggtctggatattatctgcagaacttggtatagcttttccgcttcccacatcttccttaatcttctcaccaatctcattttc

SEQ ID NO: 127893 - DNA, 141 bp, Arabidopsis thaliana columbia
gcaacacaaagatcacatttataggacgggcatgttttcttcaataacaattgcatctgatggaatcatcttatgtacaaacacaacaaatacaagatccaataaacacttatgactatttgtctctgactttctagatac

SEQ ID NO: 127894 - DNA, 367 bp, Arabidopsis thaliana columbia
gaagaaaccaaaggaagctttaatgagtgatataaaagagttacaatctcgttgagtagcctgaaagtggggtggttctgttacattgagaatgttacaataaggaactgagagttctggtctcaatcctgaaatgtctggttttaacattcccagagagaaatctacaacaacaaagatgtgtacagcactcacataatgtatgctgctgctgctgcttccaagactaaagggtagtagtcggagtaaataggaagaaagactaataatgcttttgttttgaatcacccgcgagtcaagtcaatatcagtgagtgggtttctgctagagtcaagtgatctgcctgagcctgagcctgaaacgggcc

SEQ ID NO: 127895 - DNA, 164 bp, Arabidopsis thaliana columbia
ttttttttttttttttttttttttttaataataaaagatcaggtaacaattggtttaatagaacattatctcccttagttaattacttttgaaaaccaagattagtacgttataatcttcacctccgaagatgttttaaaaccctaattctaccgtaagaatct

SEQ ID NO: 127896 - DNA, 315 bp, Arabidopsis thaliana columbia
tttatttttttttttttttattttgaagaaacatagaaaatgtttctgctttggatttgcacacatcaattttgcaagtatatcaaatcaatatggcgagagagcatttacatacacctggcgtcatattcttacgtaatttctccggcgaacagttacattccaccgtcacacacaagaaaacgaaaagatgtttttttaaagaatctttttgtaattaattattccgtcagaaagagatcaaatcaaccgtcgccgatctcgtcttggtcaccggcgactgaggcaacctcgccgtgaaattaggaaaagaac

SEQ ID NO: 127897 - DNA, 130 bp, Arabidopsis thaliana columbia
ataagaaaagaatgatcaactattgtaaactgtccttgttcatctaaactttcatggggagctttggcaaagtcatgcacgagagttccaagctttgcgcattttttgggaaagatacattgttgcatta

SEQ ID NO: 127898 - DNA, 233 bp, Arabidopsis thaliana columbia
  unsure (1)..(233): unsure at all n locations
tatcttttttttttttttttatatagaaagaaaagagaactgtcatttcaatggtgcatccagttttaccaaaacggaggaaatcagatatttgttcttaatagcactaatcaaactgaaaaatacaagtcaagaatcaaaaacagagtcattgcataatgcaaaaacttngntagaagacttgaccgttctaaactttcaagtaaccgggctaatatagagatctttaaaga

SEQ ID NO: 127899 - DNA, 428 bp, Arabidopsis thaliana columbia
caaatcttaaacgttttactttgtgctgcactactcaacctcaatggccgcctcaacaatggctctctcctcccctgccttcgccggtaaggccgtcaagctttcccccgcggcatctgaagtccttggaagcggccgtgtgacaatgaggaagactgttgccaagccaaagggcccatcaggcagcccatggtacggatctgaccgtgtcaagtacttgggtccattctctggcgaatcaccgagctaccttaccggagagttccccggagactacggatgggacaccgccggactttcagctgaccccgagacattcgcaaggaaccgtgaactagaagttatccacagcaggtgggccatgctcggagccctaggctgcgtcttccctgagcttttggctagaaacggagtcaagttcggagagg

SEQ ID NO: 127900 - DNA, 197 bp, Arabidopsis thaliana columbia
gggtaaacgaaaatggggaatccttcaaacaaaaatcacaagttcggattattcaggaaaaacaaggcaattttgctctaacaggccggaaaattttaattaaaagaaaaaaagaacaagggaagatcatcattcaaaaccaaactttgggctggggggcttttattaaacaaccgaggaggaacttatttttttcc

SEQ ID NO: 127901 - DNA, 144 bp, Arabidopsis thaliana columbia
gtaggaaataaacagtaatgaaatttgttgggattacagtgttttagaattcaacagagagagaatgttgtaaatctcccaagaacaagacatgactccccagaggaatcactttcttcccgacatcattcgctacgcttagct

SEQ ID NO: 127902 - DNA, 248 bp, Arabidopsis thaliana columbia
acaaaatacaacggtccttccttataggttctcttaatcacagcattacacgccaacatctatatacacctacaataattattgtgctaacatgaaaaaacgatcaaaggaaaaataaaggatttagagataaagaaggcaaattcacatgatggaacagctctttggattctattcgctgaaggaatcacatctagggacgtggcattgtctataaacaggtggggcggaggtcacaccccacccca

SEQ ID NO: 127903 - DNA, 214 bp, Arabidopsis thaliana columbia
ataaataaaattttatatattcctaattagaaggtccatacacatttcgtgtattgactacaacaaaagaaacaaaacgtgaaagaaacatagaagattttatatgatattggttatcgatgataaatgatacctgcaaaaacactataatttaaccatcacgacaacaaaagcatactggaaataattaaataaaataggaaacagattgggg

SEQ ID NO: 127904 - DNA, 315 bp, Arabidopsis thaliana columbia
aggtaaattataaatggggggtggactttggtaatacacggaaagatcattcaaaggactacaattatacgaactagcttctgaatggtggtctaatgctttctaaaaccgttgttgggatattgggttatttcattaaggcgtaatgcattatattttatgtggtaaagaaatctacttattttggcttaaactatataatgggtccttacatattagttttggtacactgacacctagaaaaatacgaaacgggttttaagatgaggcttaagagaaaattcatgaactaaccacattggccaaacaaaacaa

SEQ ID NO: 127905 - DNA, 295 bp, Arabidopsis thaliana columbia
actctattactgattggtattaaagctgtatgagaaaggttacctatcacacttttgagaattacaaaaactaaaaacgagttttccaccattggggataggaaattacaagcaaacattcattaatcataacccaaaattttctctcagtaaattttacatttcccgtgaaaacacgaaggaaaattccccaacaaaaaaaaaaagacaagactgagagaagaaaagaaaacaaaaaagctcactgactcgttgtttcttcattttctttggctttctctctgtctcccatttt

SEQ ID NO: 127906 - DNA, 247 bp, Arabidopsis thaliana columbia
gaaaacaaggtacaatacaaagcatctgtatataaatgatacaccaaataaaaaatgtcgaaaagggtaggaaaactaatgtaacctatagtttctcccagctgctcttattcccattaagcttaagaccaagagcagcccaattctaatgatacaacaaacacttcataacaaacgtatgaaacaagttcaactacacctgatggttgatacggttaggagagattcagcagtagtaccatcctgc

SEQ ID NO: 127907 - DNA, 447 bp, Arabidopsis thaliana columbia
atgaaaatcaaccaataaaataaggaaaaatgattccgacaacagtatatacgttacaaattcgtggtccaaatctttttttataacaaaaaaggaaaaataaaaaagagagaaaatatgtgatgctggtgatatccagaccattctggtatatataaatacaactaaaaaggagaattttaaaaataaaaaaatctagtgctcaaactcacaattttctaagatgattgttatttttcggattttttttcccacaattatatgaaacagaattaaaagaatgataaagcacaaactccatttctccagcttcaagaccttccttctctctatttacgaagcattggtgagagtggatacaggagagcttgctccatcttcagatcctgcgtttatattcatacctttatctgtactccaatttcgttcatacccttcaactttctc

SEQ ID NO: 127908 - DNA, 191 bp, Arabidopsis thaliana columbia
gacaaactatcttcattttccaaattacaattcattacataatttttttaaaacatccaaagtacaaacatatttataaatggaggaactgcaaactggagataaactatttcaaaaaaaaattgccccaaagatggattaacttgctcagaagtttttagaatgtggaagaacactaattataccccccg

SEQ ID NO: 127909 - DNA, 354 bp, Arabidopsis thaliana columbia
tttttatggtctaggtatcctgggagctcccaccagacaaaagtacgaaaggactaatcccataaaaactgaacaagaaaaatcgaatcctattctatgaactggataattaaaagaacccaagaccattgacaaatgggtttcctcttggactacttcctgtggcgagcaatgtggtagacatgatatgaacattttgaccttgtgggggtttgggattcgggttgctgaaaaaacccaaagaagattgaaagaagggactcaagacaacaagctcggaccattttccacagcggtacgagcttggacatggctattgtgcccgtgccgtgacatttggatgtcatgagatac

SEQ ID NO: 127910 - DNA, 396 bp, Arabidopsis thaliana columbia
cccacgcgtccgcccacgcgtccgcgcagactctctctctctctctctctctctctctctctctctctctctctgtgggcttcggtggagatcacttgggtcgaatactgatgaagaaactggctgatcggatccttcatcggcttactaatcatgaaaccgctttaaacgccggccaccactgtgatttctcgcctaccgttctattctcatggctcagaggggacagatcaaggtacaagtggtcttagtcataggaaggatcacaggatgtcctctcatggtgtccacctgcatgtccatgatcgatatgttgcgatggacaatgggatcctccaagatacactgacaaagccaggtggaattatcactgggatagagtataacggtattgac

SEQ ID NO: 127911 - DNA, 138 bp, Arabidopsis thaliana columbia
gattctgtattggttttctttccggcatgattaaaccggtactaaccgcaaagacaaaaactttttcctccctcaagtcaaaaccggtttatataggacaaagccatccttctctgaagaatcacaaaccagaaacag

SEQ ID NO: 127912 - DNA, 298 bp, Arabidopsis thaliana columbia
ggggggctgggaacttttcatttgaaacaaaacttatggggttacacttttttacattacaggcacagctttggaacaggcaaggggaatttgccgttttcatccccaataacgaacaaaaaattagatgcttttcttcttaaactacaacaattgataaaaaaaacagtttaaactcgcaggctaataataacctgggcgaagttaatctttgtttcctccctaacaggagtggttctctctgccagtgcagtggcaaaaaacttccaaaaactgggatttcgaagaagctccaaaa

SEQ ID NO: 127913 - DNA, 123 bp, Arabidopsis thaliana columbia
atcgaccacatctgagcttcgttggttacagatactcaagtgttaatacaaatggagagtagtatataggcattgttctcaatatgacatcaaacaaaaaaaccttctgaaacatattgagac

SEQ ID NO: 127914 - DNA, 279 bp, Arabidopsis thaliana columbia
ggtgatttttgggagcgagccggatcaccggggggggattcttaaggggagggctggggcactccgccgttccaaccgccaagcaaaccgtaagggtgactcgaccagaaaagccaccgagaaaggtaatcgggaatcttctcgcgctgctattgcgatcgcgttatttgattattaaaccatgatctaaataaaaccagttaaaaccaatgaatgtttgcttagttagaggttacgtgaaattgagtcgtgaggaagaagaagatgactccattcatt

SEQ ID NO: 127915 - DNA, 110 bp, Arabidopsis thaliana columbia
ctaatgctgacgctttatctaaaaaatctgtgggttgttccttactttccattgacgagagtacgaatcgagaccagatctgcgtgaggatgatagagaagtgcgtagga

SEQ ID NO: 127916 - DNA, 314 bp, Arabidopsis thaliana columbia
gggaaatcaaataaaagtggcaaatgaaacggtttaacactttaaatcaaagggggggaggaacaaacaggttaaattttccgaacctgaaaacctaaaccgctaactaaaaactttaatggacaacccttggttttgttcccactcggcttcccgtttggcgatttataaagttcgggggttaacttgggcagacgggggaaaatcatttgccttccaaggttccaatcataaatcttatgttgggcgccttttgttcgcacctttggttcgagcccaccgggtccttatgaacataccgagaattccccggc

SEQ ID NO: 127917 - DNA, 153 bp, Arabidopsis thaliana columbia
cataatcgtaaattcaatataaaagggggggagttcttatctcacacgaccatgtaaatggactcgtatctccaaaggatgacatgaaaacacaaattttataaacacagcgattatatcagttaatggattcactggtgtggatatagtgtg

SEQ ID NO: 127918 - DNA, 409 bp, Arabidopsis thaliana columbia
ggcccaaaataaaagatcacaaaataacaaggaataaataatgatgtgcatagctgcttgtttcaccagcattgattctaaaggtgtgagctttgatgaatatacaaactaaaatgggtcagtccttataaacatcaatctcttcacttaatttggctttgtagctttgtagatgaagattgtattgaacgaataccaactcatccagatgctgtctttcacgattgctcattccttcactgagcaacaacttctctgctaagcttctcttcagcttgtactttgaagcaccttcacatgtctggctcagaattttaatggccaagctctgcagttctgggtactggctcgccttatgagcccaccattcagctggagagattccagtgatctgatcagcttgactcgc

SEQ ID NO: 127919 - DNA, 258 bp, Arabidopsis thaliana columbia
aggaagtcgtgaacagatttcagatttagaccaaatgaccagaatacgagaaagtcttgatggcagctattgagtttaaatgacgaaatggtttcaacttctcaagcatataatctaaacccgcagccattttgcaaagtaaaaatccaactaacatcgaaataaaatagttccagcgttacacacacaagccttacatttccattggagccacgtcttggtcacctgcaacaccaccacctcgttctgctggtgcag

SEQ ID NO: 127920 - DNA, 110 bp, Arabidopsis thaliana columbia
gagaccaaatcttcaatcttccataatatcattagcaatacggcatcatcgtaatattatcaaaacttgcaaccttctaagattgctgattttggatggggagggaaagc

SEQ ID NO: 127921 - DNA, 236 bp, Arabidopsis thaliana columbia
gaagaaagggggttatgaatgatgaaaaaagtctatgttaaatggaaaacggattttaactagcccgaacaaaaaaagtaaaaagcgacagcatatatcacgtgtgctcaacttactgattaaatagcctaaaactcaaattatacgttctaaattaagactaagagtctcgatgattatcttcatgaatccggtgtttagggccggtaggagaacgaagaggaaacaggggcaaa

SEQ ID NO: 127922 - DNA, 190 bp, Arabidopsis thaliana columbia
cgggggcgtgttcaatgacactgaataaattcttaaaacaaacttctcaaagaaaaaaatggcttcaaagaactcagcctctattgctatctccttggcccttaacataatattctttaccttaaccgatataacacattggggtagtgacccaagacctaagcacaagcctgtaccaagttctaaaccc

SEQ ID NO: 127923 - DNA, 138 bp, Arabidopsis thaliana columbia
tttttttttttttttggttatttaatttaaggtgtgtaaaacttaaaagtgctatagaacttgttcttaaaacaaactttggctgaaacaaaaccaaagggcaatagaggcatgtggtgcgaaagcttgtctggacag

SEQ ID NO: 127924 - DNA, 114 bp, Arabidopsis thaliana columbia
cgttggtgtttgagagaacattgcagaaattgtattcccgcaacctcattggagaaagatcttgagagattattatatctgtattgaccggttgctagggcggatggaaacgcc

SEQ ID NO: 127925 - DNA, 334 bp, Arabidopsis thaliana columbia
gacccttgaagaaaacgcttaatgaaggatgaaaaaaggctaggtcaaatggaaaacggatattaactagccctaacaaaaatagtcaaaagcatcagcaaatatcacgtgtccccaacttacgattaaatagcctaaaactcaaattatacgatctaaattaagactcaagagcgctcgaggatttatcttcatgaatccggtgattagtgccgttaggagaacgaataggaaacaggggcaaaagctccggtgccggctcggagccggttatcggactcggaaggaagtagaaccctctttccgctatgggtttttgctcttccttgtccgg

SEQ ID NO: 127926 - DNA, 351 bp, Arabidopsis thaliana columbia
aataaaagactctttgattccaagtaaagaaaaacaggataatggagactagtttcaccaaaagagtaaatataacagtactactactaagtttctaaagatcaagtcacgtttgtcgtaatccaaactattaaggtttcacgacagcaaagagaagtcgacacattaatctaacccaaactcctttgaaggcctgttattgtagatatcagcagatcatcatctcctacaatcatactcagcgtcttataaaattcctttctcgacaccttcttctccctgagttcctggtaaccagcaattatcaaatccatgtctttacgagcaattttgctcgagattgctttgaac

SEQ ID NO: 127927 - DNA, 174 bp, Arabidopsis thaliana columbia
gaaacgttggggtcctaatacaaccaaactgaacaggggtcctacgacgattaccacattgtttcaggaaccagaaccaaaaccagaactaaagctaataaaattggggaaagggtagggtattcttaacttttttatttttccccaacatcggaaaaatttttcaattggggg

SEQ ID NO: 127928 - DNA, 105 bp, Arabidopsis thaliana columbia
accaaatcttcaatctttcatgatatcgggggcaatatggcatgatcgtaagatgatcaaagcttgcaaccatctaagaatgctgattttggttggggtgggaaa

SEQ ID NO: 127929 - DNA, 223 bp, Arabidopsis thaliana columbia
gggaagataccttaaaccgggttgagaaataggtagactcacattgataactgaacaaaaggggagcggaacccgaatgactatcacaagcaaaaaagggactatacacagatcggaacccttttctttatttagaagatattctggggatcagctcagatctcattaggccatataaaactctgtgttccaaaaatgtgaatagaagagagctgaagaaaga

SEQ ID NO: 127930 - DNA, 444 bp, Arabidopsis thaliana columbia
caaaactctataaattcaatcaaaaatatttgaattccatatgatacaaatcacttgcaaaactcaaatccactcctaaatgatatcatcccttccaagtatacaagcaaaaccagtgaagaaaaagttgccctaaataacgtctttacataagaaatacgaaaaccaggtttaaggatcagtctcctcttcaaagtccatgagaaaatcagttaagttctcagcatcatccacggcctcgtttagagacatccgaccttccttctttggtttaggcttggcggtgcgaagctcaggggtttccttcaagacactccagttcctcggcactttctcgtcgtctttttctacatctgcatcgtcttcgtcgtcatcgttttcaccaatatcaacagcttgtgccatttgcatcatccatgtcaggtacctcgagctgctcggttt

SEQ ID NO: 127931 - DNA, 197 bp, Arabidopsis thaliana columbia
aactcattgaggtgctcaccgttatcatttgatgcaaccatgggtcggctccttctcctattgttgtacatcgttattctactccattacggttgttgctgcagacaccaacaagaacatggccgcatctttgacctttccggagaaccaaaccatgaatccttctttaactgatgtgggtgcatcaccgaggacga

SEQ ID NO: 127932 - DNA, 149 bp, Arabidopsis thaliana columbia
ctctttcttaagtttgtgagtcttcgatgcaacggaggcttcctggacctagaaaccactggttagaccctaattcgtcgcctagctcaaaagagggggctttcgcaatagctccatgacgcatggaaaggaacagctgagaggatcac

SEQ ID NO: 127933 - DNA, 505 bp, Arabidopsis thaliana columbia
atgttcgcaactaatccatattagatttaaatggggcattacctctggaaactaagaaccatgccaataaaagtccatctaagccatataatcatatatccaagggaacattcattggctgcttaagaatgtggtcggcagaagattttatttttgctcaacataagatttaacagtctccatccatctaatatactcagctttatctttgttcttcatgtactgatgcaagaactcagcaagatcatcacttatacctctttcctccaaaaatcgataaaccgagtcttgaagttcatcttccatttcctggaattcaggtccaatataggcatttggtgagttctggctgcttttacgaacaaagaacttggtgatctgtatggtatcaggccaagcagaacacatgatctctaaggtctcaccatcacccttagagatgttgacaatgaaagtaatatgaagctgaacatcttcagggtcgctggtagtagattttgatgat

SEQ ID NO: 127934 - DNA, 189 bp, Arabidopsis thaliana columbia
aagatctgacaaagggcggaaatattaaggggcaaaacacgggtaccaagataagggtaacaatgctcaaggtgatcaaaagctattaaaaagctaacaaacaacacccaaaaagccaaaggtttggacaaaggtagctacaaatgagtattcacaattggggatcacatcgtcgatctttaaaatcat

SEQ ID NO: 127935 - DNA, 283 bp, Arabidopsis thaliana columbia
aaaaacgatattggataagcttcaaatatttcccgggtagcaaaagatttaaagagctttctcttccatccatagtatatagggaaaccgcaaccgaaaattaaaagacaggcaaaaaaaaaaactaaagaaagccaggaaaaaccattataagaaccaggaaaatacccaaactgggtataagaccaatctagcttatgctggcttaagaagtatcttaaacttgcaaaaccccaaaatataaaacctgtaacaccgtaacgtcgaaaagagaactaaaccg

SEQ ID NO: 127936 - DNA, 142 bp, Arabidopsis thaliana columbia
acagggccgtacaaaaaaaattggttgtatggatgcgcaaaacaccgagggttaacaagcaatgatgcccatccattatttctaccaccaccgttgtttttctttttagagccaggagaattttcgggttcgaccaaacaca

SEQ ID NO: 127937 - DNA, 123 bp, Arabidopsis thaliana columbia
aattagaagattagtagtattaagtatcaggggtggaaccatttaaaaagatgagcgcgagattagaccacactagatgaaacttactaccaaaccatgtaaaatacttcaatagctgcgggc

SEQ ID NO: 127938 - DNA, 239 bp, Arabidopsis thaliana columbia
ggcagaataaggcactaaacttggggggtttttttaacatgtcactggttacaaagacttaactttaacagcttcactatcaccaccatcaccatcaataccattatcatcatcatattaaatactcttccaatggccagcttaaccaaacaatgacttttttccaaactatgctaagtcctaacgtttaactttcttagaacacatgagaaacaaaaggatgaagtaaacaggagaat

SEQ ID NO: 127939 - DNA, 293 bp, Arabidopsis thaliana columbia
catgcatcacattcgaatttctgatttataaatagtgcttgtgttaacatgaaaactgaaatgacagagaggaatgtacaacaaagaatcaattagatccctttggttttatgttcatcaagacaaacactatcaccaccctcgtcatctgtagctacaagcctaattaacagcgaagaatttgtttgttagtctcatgaggttaatgatctacgactaatgcaaatgaaaggagagtgagttttactataagtacccaagagattgattttgcgtttttttcgacaccgtgt

SEQ ID NO: 127940 - DNA, 268 bp, Arabidopsis thaliana columbia
aaaaagggggtgatttaaataaatttgggccttccaaaaatacctaaaaggctaaaggtatattatctaaaaacaattactcatctacctagagctgctattttttttatgactaagcagaaaacaacccaacacattcttgcttaggccaaaacggggcaaaacctaaacaaaaagacggtttccaaaagccatccatagccaaccaagcctgttcccccatttggcatttgtgtctggagatatttgggaatttccttggattgct

SEQ ID NO: 127941 - DNA, 206 bp, Arabidopsis thaliana columbia
ataagcaaatacaccttattatttcaaattaaattgtgctggaacagctgtgtttcactctgacaaaaaaatgagagaggaaacatctaaacgctcactttactcataagccaaaatgacattgagagagggagagagcatgagttctttacgagaaagggttagcagctactttacgccaaaccccacgaaccggtaaaccaccg

SEQ ID NO: 127942 - DNA, 300 bp, Arabidopsis thaliana columbia
ccccagggcaggggaccaaattttaaaaggcccccagggttcaaaaaatcaatcccccaggggggttttgatttttttaaaccccccgttttttattttttaaaaaaaagaaaattttttttttttggaaaagtctcgggtccccttaaacgttttttggtaaaaaacccccccggggtttgggaaggggaaccaccccattttccttttggggccttatttgggtttggaacccttgggcctttccccccgttggaaccatgcccccggaaaaaagcaattttttggggaccggggggc

SEQ ID NO: 127943 - DNA, 233 bp, Arabidopsis thaliana columbia
gagcacctcgacggagaaacctacatctacggagatcaattgtctgtggatgctggaatggattactctgccggtccagtgaaacccagcgatgccttcccctatgcttgcaggtggtacgagtccgtggcttcccaactcggtagactgttacctggaaaggccgttggagtacaattcggtggctctgctgctgctggtccagctgttgaagctgaggcacctgcagctgc

SEQ ID NO: 127944 - DNA, 174 bp, Arabidopsis thaliana columbia
ggaagcaaacactttttaaatggaacctaacaaagaacatttttgaaccaagtttacaagcctctcataagtcacacctggggacattccaaaagttaggaacaaggctttatcaactaaaaaaagaactttacttaggccccaagcaaaaaaaaccccaaacccaaagacccc

SEQ ID NO: 127945 - DNA, 124 bp, Arabidopsis thaliana columbia
acgcccaacctgacccgtctgggctcgccgcctcctatatcggttctctctcgattaatatctccaagagcaagcttcgttttcgagtggtgtcgcttctaattgtgatttctttaatattgca

SEQ ID NO: 127946 - DNA, 240 bp, Arabidopsis thaliana columbia
ggcgggaataaaaaatgcttggactactaaccatgtttgggggcaaacaaaaaatactggttttggtcaaagggaaacaaaattggggggtctaaagcaaaaacagcaggtacaagggttttggttttggccattcaattatcccgcttcctccatcgatatcgacttttcccattccaggggcttcttcttaaatttcggttcccttatcaccactcattttttcattatccattctaa

SEQ ID NO: 127947 - DNA, 171 bp, Arabidopsis thaliana columbia
gtgttcccacgcctttttggggatttttataaagccccatccttaaccccggaacttataattgattttcgagaaatcacctaacagggcaaaaaacagagtttaatttttaaggccaacccctgattgggttaacaaataaaagggcccctccagttacacaaacataaa

SEQ ID NO: 127948 - DNA, 164 bp, Arabidopsis thaliana columbia
cttcaaaaatggaacttttttttattttttcaggctttaagagaccacaccagatggggggtcagaacaaatttttaatcaaacatagcctaactgaaggggagagaatgatacccggaatagggaccccccagaaaaagggaataaggatttgattcctgggg

SEQ ID NO: 127949 - DNA, 128 bp, Arabidopsis thaliana columbia
tggtggagctgacactgctgtatttttgtgtacaccaattctttgtgatagtgacaggtgtcagagaggaaaaccgaacggtcccaaagccaccaccggtgaaacatgggccggagtgagctatggcg

SEQ ID NO: 127950 - DNA, 439 bp, Arabidopsis thaliana columbia
cgttgtgaattgtggtgaatatattactgtcgcgtcgaaatatttagtaacactaagtcgaccaaaaaaaagatgagagacgagaaagtctaaagaaagtgtaataagttagattgctggagtttacacatctatgctcgttctcctctaataaccaccaacagagtaaattggtaacattccggtagatgttttgtcgggcaccaaatcgaatccgtagggttcccgagcattgaaactttagaaattaagctggtaattggagctttttgttgttcttccagcttaggaaataataatagaagaagtcggcatagagcagtgtttgaacaaacccggcgatccatgttatccagtgaacaaagtgcggctcagtgaagtaacggtagatccagttgaggatgtataatccacggtaccccccaaggagaaatatata

SEQ ID NO: 127951 - DNA, 387 bp, Arabidopsis thaliana columbia
aaagaacaggctcaacaatttcattccataaacagagcagaggatctgcaacgactaagttctgaggattcatcaatgtcatccacacatacacacatcaactaacattatgacgtttaaggatcttctgtatcctccatcttgagatcttctagtttctacaatgctgcaacacataggaaaatgccctaatcgagatcaaggaactccattcttttccgcattgtgccctttaaaagcatttcttccttctctgctttctgagccctttttatctctgcttctggaacctgaaccatatgagctggaagctcttctttttccacgtcctaagatcacagaaacccgattcaaacaccgaaatcgttcttaaaagtggaaactttc

SEQ ID NO: 127952 - DNA, 371 bp, Arabidopsis thaliana columbia
gataacatccataagacttgatcattatcacagtagggtagtagcaaagtttctcaataaacaccttcttaaataacatccattagacttgatcattcactattactaaacatgggaacagaaacatcatcagatggataaaactctatgatgatttaagatacctcaacgatgactttaaaaagctactaagaagctgagagagggattggtttcacagcgctctgaatccgctcaaaagctactctcactctttccttaagacctgaatgctcactctctacctctccactctctttatccagctgagcgacattgccatcgaccctaatcaccagtttcccgttttctcctagtttcacatccccgaa

SEQ ID NO: 127953 - DNA, 166 bp, Arabidopsis thaliana columbia
gggggagaaaaacgaggtttttggttaatgaaaaaaccccaaagccttgcaaatttaccttttaaacaggcttttttttttctctaccactgacgaagcaaagcctggtgcaaactccggataaaactgggttcattttccgggaccaaagttgggggcaaaggcc

SEQ ID NO: 127954 - DNA, 202 bp, Arabidopsis thaliana columbia
aaaaggggcaaatttcacaaaaggaacattaacgggttagttaaagaatcaagggttcggtttaacaatttcttcggttgggaaaacccttcccgaataaaccaaaccaaaacctatactactaaccaaaaccgggactgaagcaaactacccataacatgggcttaagggaaaaagccttttacaaaataaagggggggaa

SEQ ID NO: 127955 - DNA, 151 bp, Arabidopsis thaliana columbia
gggggggaaatatttctattcagggccatatagaccagagttttaacttttaagctcaaagacaaaagaaacgggcccccccccattgcacgacccaaactaaaccacatttttttattttagatcaaactctaagttttccttttatttt

SEQ ID NO: 127956 - DNA, 506 bp, Arabidopsis thaliana columbia
  unsure (1)..(506): unsure at all n locations
aaagaaatgatttttaatatattatagatttagagtctaaagcatcaatctttgataattaaattttttaacatcataataagaatttaattatccaaacgatataacatttgttcttcaaagcaaccaaaaacaatttgcaaagagaatcaacgaagtcttctagcttctctctcggactccagcaaggtgagaatatctccctctctgacaggtcctttaacgttcctcatgatgtaacggtccgagtcagtgaacttcactctaacctgagtcacttgaccccttgatccagtccttcccatcactttcactacaacagcgtgcttgatctgagaatccattctgattcaacaaaacaaaaacattcagagaccaaattttacaaaagaagtgaaaatccttagaaaaagagaattgctcacatttgaatcaagactgtataacctntataaaccaatcacagctctggagaacaacagatgcaaacaaagcagagaaaacac

SEQ ID NO: 127957 - DNA, 434 bp, Arabidopsis thaliana columbia
aaaactacaaccacaaagtagggtaaatttaacttttgaattttgtaaacataccaattaatacttcccaaaatagatcccaactttttgacaaaacattgaaactttttggcgaaagttaatgacattctcagagtttgtagctaataattgcaaaaggtttggtctacattaagacttaacccactgaaattaaaaggagtagaaaaatgtgtttctggtaatttgccagaaaattaattggtttgaaaacttcgaagttgaactagctagagagcgcaataatcgtcagtgtggggaacgttgaccagatgattgtaaatgacataagcacccccaccataaccaagctctacgatagattttcactcggaaataggggcatatccgtcatctaaagtaaaacatatttacggtacttcctgaaaaacttt

SEQ ID NO: 127958 - DNA, 435 bp, Arabidopsis thaliana columbia
atacgctactattatattcatgatgcatcgaagaattacttcaacattattgtgttgatttgttttcactataccagcaaataacaatttattgccttaccaaacatcagctagtgttactacatttgtactagatagtatcaaatctaaaacagaggagttttacttgggttcttctgtccatcgtctcttcatttcggatttggatcgaacttctttaagattcccatccaaaccataatctctctccatcacaagattgattccttcatctgaataccatccaactccaatgcacaacactccatctttcttcacatccacgtatgcactcacaccacctggtagccacatcacagacacatcttgcatatctatcatctcttcctccccaaacgaaaccaaagtttccggtaagttccttctctttagagc

SEQ ID NO: 127959 - DNA, 208 bp, Arabidopsis thaliana columbia
cccaaaagtggggggggggattttatcattccgggacagagtcccatagagatgtaatccaaagaataatctaaaatcccgcccaaaattgccaaatcagggggctccaaaagtccccatccaaaagttccttttttttttatccaatctttggaaaacccttttccctttctttttttataaaaaaaaacaaaggggcccatgaaaa

SEQ ID NO: 127960 - DNA, 174 bp, Arabidopsis thaliana columbia
ccagcacatgaagaggggcaaaacgggagtgtattggtccaggtagcgttttgaatacacatacaggctgtacctacaccattgacaatctcacgacgactgccaaatcacattgaaaaaccgacttctgaatcaaataataagagaggaggatcatctgggatcggtggaagt

SEQ ID NO: 127961 - DNA, 142 bp, Arabidopsis thaliana columbia
attattccaaacccaaaacatcaaagttggacatagggcttgaaactatcaagtccaacagggaaataggggaaatccctccttttggttcacaaggccccatcatttagcaatatttcggcgatgcatagcatttgatttt

SEQ ID NO: 127962 - DNA, 304 bp, Arabidopsis thaliana columbia
ggagaaaaaacccttttaaaataaaaaaacacaaaaaacccacacaagtttaagcccctttcataaattaaaacacttaagagagggtaaaacctttcctaggggcaacttttagggagaaacttctaacataacaaggcctggttaatggaaaggggggccaaaaatgcgggtccatgtttaaaactgggttttccccataaaaattattgtcccaaccatgctaaaactcattcttataaaactttcccattacaccattttaaaaaaactcccaagccaagtaatcaaacccatttgaaaa

SEQ ID NO: 127963 - DNA, 144 bp, Arabidopsis thaliana columbia
  unsure (1)..(144): unsure at all n locations
ttcttttttcttttgnatcaacctttttttggacgggctaataaagttaagctgtgtgtttacccccgcgccttcttttaactacatttgcttggttcaaagaatagaaacttggcaatggccataccataccaatggaccaaa

SEQ ID NO: 127964 - DNA, 194 bp, Arabidopsis thaliana columbia
cacaaaaaggttttttcgggggtaatatgcccacaaaaaatatatatctggggtgggagttggggttcgatgtttcacacaagaggagcataaattattgggctccttttcgggctctttgcccccattgtttggtcggttttttgggatctggcgaacttggtttcctttcatggacagggggcccccggcct

SEQ ID NO: 127965 - DNA, 298 bp, Arabidopsis thaliana columbia
aaacacaaaaaaatgggtttttttccccaaatgatttagtttttgggacaaacttccaaaaagaaaagaaaatcggcctttgttttttcatagttcatggccacgagttaaggggggggcttgaagagatagagaagattgatttttcatttttgggagggtcccactttcgttcgatatggggcttacttaaaaggccaagcaacttttatgacccaattcaacttttttacctttaaaataaaggtgaattgaccagggggaacattggggcttccgaactggaaaccagattggg

SEQ ID NO: 127966 - DNA, 176 bp, Arabidopsis thaliana columbia
cggacgctttggttctaagacagcagaaccgatagcctgagaaatggggaataccaaagtaagggcagctgtttatggtccaagagagattcaaaacaagagccaggaaaagaagaacgaccatgcagtggggttgtgagagtataggatggctcagtttagtactggcgatcgtc

SEQ ID NO: 127967 - DNA, 100 bp, Arabidopsis thaliana columbia
agggaatccttctcaaaactgggagattccatatattttcaagaagatggggcaactccagctctttatgtcacccaatatatatcaagctcactagatt

SEQ ID NO: 127968 - DNA, 360 bp, Arabidopsis thaliana columbia
agggcacacaacttttgataaagaagttgacaaacgaaaacagaataacacatatcaacattacaaaatatcaatttgaacccaaacggacaaaagaataaattacagatgaaggacgcccacggctcaagctcaagctctcataacaacgaaaacaaaacaaaaattcttttcaattgcacaacaacctcctaataaaaataggtaacaataatagcagcccaaacggcttcataaagcagttggagaagcaccaagggcctgctgctcctaaggagctcttctctctcaccctcctcctttcactccacttagtcaaattagatgaccttcttcctttccactcttctttactcactt

SEQ ID NO: 127969 - DNA, 148 bp, Arabidopsis thaliana columbia
ggttgcatgataagggggtttaatgttacatcggttacatgaaaagaaagatcctacccaaccaaaatgaaaacgaatgatttctgtgctacagagagtcttttgatgactgaattttaagagaaaaacggtgattaagcctaaaaca

SEQ ID NO: 127970 - DNA, 355 bp, Arabidopsis thaliana columbia
tcctttttttttttttttttttttttttttttgtttgttttttttttttcaggatgaaatttctccatatatttgactgaagaaaacacaaaaacatttatggaaaaagaatttgcatttaaaatatttttgcaccaccaccaaacaaaaaaaagagaagccgaagaaacagtaaagtagcaagtccaggcaaacaaatttgctttgcatttgggagggtcatataatttacctatacgggtccacaatctcatgagagctgagcctatcctctccttgggttcctctagttctggggttgggtttccactggcgttctgcgaatataaaacttgtttacaaactccaaaggaga

SEQ ID NO: 127971 - DNA, 295 bp, Arabidopsis thaliana columbia
atgagaaatgaaacttcttgataaattaatacaaacccaagctctatacatttcctatattaattaagacgataaaatggctgaactaccatatataaaccaaactcatcactataaaaccctaaacaaagggttcttgcatagattaaaaaaacatagaagaagaaacccaatcccaactactaaaaacaccgaaaataatactaatatcaccaacccataatcaaatcccattttgcaagtgtaattaactaaccctagttaataaagacttgacttaattaactaattataa

SEQ ID NO: 127972 - DNA, 350 bp, Arabidopsis thaliana columbia
gtttttctctgtactattttgttttgtgtttagggtttctgaatttggttttctcccttttcttcaatcaatctttgtcggctcttccgatctgctcaatcacactactagccgttgttttccctgcggtttctagcttcaacactattcgccgcgtatcctactacctacagttgtctttgaagaacatgcatgatattcgaaatcctgaaagtttttggtcgggcaagtaatggcggaagcgatgaattcgtcggagaagaaagatgatagctcggaggagaaaggaggtgagcttttgttctgtggtgctacggctcgggatatcattggaaaacgaaaaggtgcga

SEQ ID NO: 127973 - DNA, 301 bp, Arabidopsis thaliana columbia
aaaaaaaaaaaagacctttttttttgattttacaaagtcccctggctgggtttcagggcaaagatagaagcccggggaaaaatcccgggccccccttgtggatttaaggctcataatcaaaacatgttctccctggtggtcccccaattagggtttgccaagaagaagcgggatttttcttaagaggggcttttttcacttggggttcctggggcccataatgactgggtctccccccaggacccttttggtggtgaaacgacctttgtaaacaggaagagcttttttttttccttttccg

SEQ ID NO: 127974 - DNA, 456 bp, Arabidopsis thaliana columbia
acacgaacgttgacttgggatttactctcaatatgtacattgtccagagatgcatgtaaaacaaagaagagacaacgacaaaagggtactacaatatcccaaaaaggctttttgtttagtttttgtacaaaggctgcgactgctgcgagtaatgtcacaagacaaacctaaaataaaatttatgtgtagaaacaaaaagaaaaagaagaaagaggtccaaaaccaagaacactggctacaaataggctggtctgcatcatttgcttcgcttcattttccagctgactaattttcatagaagcgggttcgacgccttcttgaactttggtgcatagagctacttctgttagctccacttgtgctgatgaactcgtcatcgatctcatctactctatactccggaaactctatggatgctactgagctgtcatcagagttggaattctcatagctaga

SEQ ID NO: 127975 - DNA, 191 bp, Arabidopsis thaliana columbia
gaatgattctgcagtttattgatagggatgaaagccaatgaaactaactgttccatacaaaagaagttacttccaatgatcgacagaagagatttaaacccaaagttgtgtaagcgcggagattacggcctccgttcatgctttgacttttcttaaaccctgtggaaaactctatcttactttagacctta

SEQ ID NO: 127976 - DNA, 179 bp, Arabidopsis thaliana columbia
gcgaaaaccaactatggataatggcgaatttaccttcatgcctgtccatgggcacaccttggggaggaactagcacctacgcacaaaatactaccggagcttccgccaacaaagaacgacgattggcctatgatgaacagctggtgctggatctcaaggatcatgaactcaaacaaagt

SEQ ID NO: 127977 - DNA, 402 bp, Arabidopsis thaliana columbia
  unsure (1)..(402): unsure at all n locations
agatgtgaagaagcatgacatagagctacattgaatataacttttatgtatacataaatataaattttatgtgttcgtgatgttttttgcagtatttcaactacatgggtatgcttgcagtagaaggaacctattcaaagatggaagctcttcttaacctaaacattcacccagttgatatcttgttgatgttagccgctacagaaggtgacagacctaagatcgaggagcttctcaaagccggtgctgattattcggtcaaggacgctgatggaagaaccgctatcgacagagccaacagtgaagagatccgtgatttgatccttggctactcgactcaaaaggcttgactccgcttggttttaatacacaggaacaacacangttatgttcttgagtttt

SEQ ID NO: 127978 - DNA, 157 bp, Arabidopsis thaliana columbia
ttccgtattttttctttttataggcatgctagacaggattattagcattaaccataatgcttaatatgccaacatatgatcttagaggatacatacttctacatacaagacatgaattaagccatacaaagaattttaaataacaaaaaaaatctat

SEQ ID NO: 127979 - DNA, 246 bp, Arabidopsis thaliana columbia
ggaaagaagtaatcaagatgaatgccctcccctgaaatcatcatagcaccaattggcaatgcattttgcagttaaatatcagcttccttcaataaaacaaaaaacaaacttttcacatggggaaaaacaaactaaaaataaaccggggatgcatgaataatagatccccaaagaaacagaacaagtggggagaaaaaaggggtttttttgctcagggtcaaagggaacaaaaacctaccttttttt

SEQ ID NO: 127980 - DNA, 265 bp, Arabidopsis thaliana columbia
caacccaaaagttttttttttaatagattaaaaaagaggaatttgttctttgattctttaattgttacaatacaacagcatatggatccatcagtctgatcatcaccatctaaaattaaatcatgtgagaccaactaatcttaagggaatttagtcgcttctgtggattcataagcagcatcagctgaagaagtatctatgtctgtgagacccaactccttgttttgatcccatgacctctcgtactcttcaaatgtgagctgat

SEQ ID NO: 127981 - DNA, 316 bp, Arabidopsis thaliana columbia
aacacggggaaaagaaccccaaacagaaacatgcttattagaacaatctctcccaatgtcgaatcatacaacagcggcaaaaattgcgggacctttcgtatattatcttctttgtataaagcctaaccttggctgttattgtaaccccaaatgaatccatattaaaaagaaaaaaagacgcagccgcaaaaatattacactcgaaaacgactcaacagagcaaaattctttggcctcttgatgcctccaaaaaacatctgtacaatctctttaaggagcacgagccccttgaattctcattatctcgggttagttc

SEQ ID NO: 127982 - DNA, 394 bp, Arabidopsis thaliana columbia
tcctttttttttttttttttttttttttttttgttgttttttttttatttttgttttttttttttttttttttttttaaagggaaggagaccctgtaatataaaaagggtttttttgaaaagttatttataaaaaagggggggggtgtttattaaaaaaagacaagttccccaagatttaactttgtgggctgaaatcagccaagtggcacaaacttttaaattttggcctttttacgggccaggaacctttttttagggggagggaacgcatccttttttttttttggggcgttaatggttttcggcactttttttggtgccttttggatggaggacttttttttttaagggccttttgaacccatttttttttaaaaaactggttgctttgt

SEQ ID NO: 127983 - DNA, 222 bp, Arabidopsis thaliana columbia
aaggcaaaaagggttttgcataaaccaaaaacggttacatttggggaacaagcaagcagtagtaatgggaccccacaagcaagcagtagtaatgggacccctgaaactaaaatgtaaaggggaagagggtttgaatgatgggcttatgccacggattggagggaagcttaaccagggtttcaatagggcctgggggaggaacagaggcttgaacaaagaacc

SEQ ID NO: 127984 - DNA, 394 bp, Arabidopsis thaliana columbia
ggtacatcgctttcattaacatccccacatgatggtaggcctttttcctttaatccattatctggaaaacaggaggaaattattttggaaagtaaatcaagaatgaatctctaaatcaattaccaaacgccgccgttccattaccggtcaggcaagacagaccaacggtccgagaattcgcctaacgaaccagtttactcgcatttaaccaaaaattgcataccggttcaatcaaacaacagaacagaccaatctcagaaaatctgcagccatttcaccatcattgctatatgttgctttgaacttcactcttgcgaggggaaaactttgtcagtttcttcttgaagctatatgttttcttgggatacagcaatacaatcaaactccatgaagt

SEQ ID NO: 127985 - DNA, 282 bp, Arabidopsis thaliana columbia
gtagaaaaactttgacttccaactctgagggcattttgtatcatagggggggccaatcttgtaatatattgacatttgattagcactaaagaaagatgtggtacccattggactttcttatacatctaaagctttctcaaggtttccacgatttgctccaccaagttaaatacttgaagcttcaagcagacgagcaaatgagatctgaaatctttcaagcatttttagctgttaaggtgcttagtagtagaacgatttggctttattatctgcagggtcctt

SEQ ID NO: 127986 - DNA, 368 bp, Arabidopsis thaliana columbia
  unsure (1)..(368): unsure at all n locations
agagaagaagaagagttacttaaaggaatctcagtgttcaaaatcagttagtcaccaaacagatcgtcgttatcatcttcttcaccaacccctccacattcagtttcagctgctggttgactcacagaagcccatgacgtaccaacagccttggcaagtgagtcaccaccgtaaaggtcatcgtaaatccctgtttttggaccccgtttcaacatattcatagcttcctggagtcgatctgttacacctcctcttgttcctcctgtaaaggctttctcttccttcactttgcctttggngtatgagtgtcactcgcaccagtgattcatatttcccaacgaggcttccttctttgacatttataggac

SEQ ID NO: 127987 - DNA, 329 bp, Arabidopsis thaliana columbia
caaacaattggtatccatgatggcttgggtatgtatatgaagaaatgacatattaagtaacatgacaaggccatatatacgcaacaatcctggaaatttcattgttatgtaaagggacccattaatcaataaccatgaaaaagagaagaaagaaacaaaagtcttataagtcttggcttcttcacacaggcttagagttatgatctgcaaccttaggcctaagctttctgttaaacttggctaaagtagaaaccaggaagacccaaaattaaattatagaaacggaaaaccaaaacccaaaaagagaaacaaaggattaatgatttata

SEQ ID NO: 127988 - DNA, 282 bp, Arabidopsis thaliana columbia
agcacaacattacttatatctcaaacgttgggttcaatacattaaagccgtgggagataaaaggttaaacgaacatagattctaagcacaacattacttatattactacctactattgtagttctatatttcttcctaccaacacacaaacaaaaagaactttacacaaaactacttcacttatcttaagacagaaaatataattaaggcttggacactactagcaagtttcgtgttcttctgcatcaaaccgaggaggcatgactctctttcgtaccagca

SEQ ID NO: 127989 - DNA, 256 bp, Arabidopsis thaliana columbia
aaaagaagtaccttactattattacaaatcaaactttaagatgaagttggtgtattgggtacaaagaaggagagagagatctgccttccattacatagcaaagttggtctggactttacttacgagatgctctccatacacagtttttttgaaaacttggcatcctcctctccctcccgggtacttctgtttacatatatccaagggctccaccaccgcgttgaagttagtctcatagaagaatgcgacacaaaca

SEQ ID NO: 127990 - DNA, 307 bp, Arabidopsis thaliana columbia
aaaatcttgggagttctctggttctccatcttctttatcagggcatttcaggccttctactgggcttttcttccttaactcaatctccacctgctctaccctcttagatccatcgcattccttcttatcttcttgatcacatatgtcatcactttttccactgcaaccttcctgagcttcattttccttatcttcttcaacatgacaggtcttcaaaaccttttctccggcattatcatttctagtctccttggatggctcctcatccattttcttcctctttgcacggcttttccgggcttggttc

SEQ ID NO: 127991 - DNA, 373 bp, Arabidopsis thaliana columbia
ctccgagacttttccataggtaatacaaaggtctcaacagtttttcctcagaaaaatagcaatcatgaataaaaagccaaaaaagaatcttaacataaaatagtgatttggtttcaatcccgaaatcaagaatcacatcacaggaagagataatatctaactaagacttattgtacgccatcgttttacagaccggacaagagttcttcctcacaagccattgattcacacagtcgatatggaacctgtgcccacatcgtaattcccctacctcgtccttcgcctcatactcgtcttgacagatgatgcactttctatcagcaactgttgtatcttgccggcatggtttgactttccgaagacaacttttgat

SEQ ID NO: 127992 - DNA, 446 bp, Arabidopsis thaliana columbia
gcatcacacaaatcaaaacgtatttattagcaacaaccaaatatcttaatattttttataagttaccaataaataccagctttcccataatacttaaaaaccctaaccttaaaaactcatttattagagcatttttgattttgtgctattacctactacccttggcttactactaacaacatcacacacaactcaaactcacagaagctcatctataaacgatttccctttaaatttctccattttgaatcccattttctccatcctcaaccgttctgcttcgatctcaaccatctgagcccgcgtctcctcaatccgccgcttcacttccaccacttccttctccatcctaaccaaatccgtttcttgagcctcaagctcttctctcttagccttcactaaaccatcatgcctctctttctcattttctacatcttcttgagact

SEQ ID NO: 127993 - DNA, 306 bp, Arabidopsis thaliana columbia
ataatacaaacttggttattaaataattcacaatggagagaagaaagaaacaaaaaataaataaatttatcaaatattaatcaagagtaatgtaagttatctaagacaattattatcatgaatgaatgcaataaagttgacaagaaaaagaaatttagtagtccaggctgttcttaagtaagttcaagacttctttgtaagccaatttcttggccattttcttatcagaggcctttgctgtgtgagcaaaactcatcttcttagcttttcacctcaaccggaaagaatcgaaatctttagctttac

SEQ ID NO: 127994 - DNA, 271 bp, Arabidopsis thaliana columbia
atattgaaaccatcactatttgccaagcacatgtacgaacatacaacttaagaaatgtgaaattattatatgctaatttctacgatctaaagcttatatggcaaacaactattaattgataactagtggggtagcctcaccagtatcattgattattgagcttatcgatactttcctcttcagtagtagtatcgcattccactgtcggttcttccaaagcctttgaaatttctttagaggctgggatgcttttctgagtttgcagacccgt

SEQ ID NO: 127995 - DNA, 253 bp, Arabidopsis thaliana columbia
tttctttttttttttttttttctttaagacgggatcggtttatatgaaaaatggtatttacttaaaaaaaaagtaacaggtcataaggttaaattagtgaaacttcttttgaaatcttacaagttacaacactacgaaaactcttatctttggagtatcccatacattaacaacaacggttcatgctgttttaaagaagaactagagcgcttaattatactgatccatgacaatgttgtgaacaagttgaaca

SEQ ID NO: 127996 - DNA, 182 bp, Arabidopsis thaliana columbia
acggaaacatgttattcattgtgttcggtacatacgatattaactgcgacgaacccaaaacatgaagcattcttattggttcacactttaagtcgaaacgtcttcattatcatgtagtttccagaacctgatccagatgtagagccagcaaatgaaccggcggatgaaccagctgaaccacc

SEQ ID NO: 127997 - DNA, 144 bp, Arabidopsis thaliana columbia
aaaagaaggatgcgggatgggactgatgaaaattgggcagggttattacaaccaaaccttccaatatccacaaagtaacatacagcaattcgtctgctacaaaactggtaaaaccggaggaacctatgctcactatgatcttta

SEQ ID NO: 127998 - DNA, 364 bp, Arabidopsis thaliana columbia
atcagaaaatgatgaactttatttaggtggatcttcattatccaagatcaacatcaacaatactgtgattatattatacatcaacaatagaacaatataaacacaaacttattactcttacatctttctttttataatcttttgctcccgagatttttggtaaagtgtcagtcttccttcatcaatccactgaaactggcttcatctcctctgcttctttcctcagctcatcaaacagaacagacgacagatatctttctccgaagctcgcatgaattgtctatatgataataaacacaaaacattaatttctgaccaaatcataacacatagatcaataacaaagaccaaagaaaacacttgt

SEQ ID NO: 127999 - DNA, 403 bp, Arabidopsis thaliana columbia
tttctttttttttttttttgacaataagacacgatgggaaacagtagtggtaaatggaatgtttaaacagagaagaaggaacagaacagagtctctgtctccaaaaattctgaagacacatcaattgtcacaagtcttgtgctctgccgtttcacgagcaaatgaccaaaaaaacaagtagaagaagaaaccattaggcttcaataccgaagatgaaccagtaaaaacaaaaaaagaaaaaaacccctaattaggttttttaaaaaaggagatgaatttttcttattaatgttattgaagcttctctcttatctgtcttcttcaaaatctgagaatggtgtgtcagccaaactccaatctcattccacattcatccttcctttccttttttaccatccttccc

SEQ ID NO: 128000 - DNA, 175 bp, Arabidopsis thaliana columbia
aaaaaaccccaaaacctttttattatagaagataccccaatcggaaaccggttttggggaaaattatatggaacaaattggcggtttgttactggggaactgattacttgggattggtaaagagggaaaaagggaaaaaccaggttttgaaattgagatcgtacaagctaaacaa

SEQ ID NO: 128001 - DNA, 283 bp, Arabidopsis thaliana columbia
ccacaattatatatttcctgcaacagattcaacaccaaaacatgtttagacatgataacagaaagagagagagggagagagatggagaaggggaatcagatttcagtcttgaaggaagaggagctgagctcgaggagagacacgtggatacctgggcaattcgataaccatatccattttcgcatctttatctgataaacttgatgatacagtgactgtctccaaaactggtgaagttcccagcaagaatctgataaattccaattcatatctgatgccagag

SEQ ID NO: 128002 - DNA, 363 bp, Arabidopsis thaliana columbia
atgatacactacaagctatattgtattggtaattattctaccatttagtaccattacatgtgataagcaccatacttcatcaactaacaactaaattttcaatcatgaaggcaccaaacattatcttccaagtatagcgaacacgatataaaattgtctaagggatccaaagagatggcaacaaaagagaccgagtatcttacgactcttgaacgatttcctcagtgacatcgataagatcctcaaactcaacttctttggcttcatattcatcttcttccacatcacttacttcaccatcccgaaggttttgcctcacgagattctcctcttcatgcagagacttccactgcattacccatt

SEQ ID NO: 128003 - DNA, 218 bp, Arabidopsis thaliana columbia
tctttttttttttttttaacacaatctatagatatcctttattgaaataatcaagaccagagctaaagaaacaagagatgattagaacaacaacattgccaacaacaacaacacaacactaataacaacaataaccataagaactaagaaagaaaaaaagaacatctgaagaattgaaacctcaagtaaagatgacgagaattggtatttacccaaat

SEQ ID NO: 128004 - DNA, 282 bp, Arabidopsis thaliana columbia
  unsure (1)..(282): unsure at all n locations
caagtcaagctttttgatataatttttttcaatgcacaaaatcgagtaagaaaaatcaaacacagaataccattaaactgaataggaaattcagagaaaaaaaaagggggcaagtgtttctcggagcatttccagaagcctagccattagctttatccttttacgtttctcgtcaagctgcacattagccttgatggtcgaccatgttccctgccacaagncaacttcttgactcaaagcctttgaaggccattttcttgctgaagcctgcttcatgctttg

SEQ ID NO: 128005 - DNA, 178 bp, Arabidopsis thaliana columbia
  unsure (1)..(178): unsure at all n locations
aagtggtgtagataatcagattttcacaggttgtgaatcaaagtaaattggatgaatgatgcataatgttactattacaggtgtatgaagcangcttattttggtcaaatgtaaaaaaaaaaaaaagtggtaaaaatagtagtcacgaaggaattgagacttgagatttttgaaaaat

SEQ ID NO: 128006 - DNA, 424 bp, Arabidopsis thaliana columbia
gcaaaactagaatggccccatatatataatcggaacttcatataatacaatgttgtaaaaccctgaatctgggtgaaaaataaatacaggcaaaggcagcaacaacaacaggactctttccacactaatcgagttgaatatgagatcactcaggcttaaaagatattggaattccacagtatattatcatatgcttttccattctacagtatcattagcagctcagacggggggcgacaaatctcttatatgggatatgtgaaactaaatctcgactgctggataatgcagcttgactgttatgacaatccaaatgtcccaacaaatccagggagatactatacctcctctaggagaacaggtctgtcactgaaatgaagagctcagattttcatcccgagtgcaaggggtttttcccctcaca

SEQ ID NO: 128007 - DNA, 234 bp, Arabidopsis thaliana columbia
acaacaaagggggaatcagattagatcagatttcatttttgtacataaatgcttacaagataaagcaaaacaaatgttacattttgtttcaagataaacaaaacacagggttttcagggctgggcataaacaatggggtttttagcaaaggttgtttcagggagggatgggggttttgcttccacaaaaaaagagactaggagattcctgagctttggggggattgcagttttt

SEQ ID NO: 128008 - DNA, 248 bp, Arabidopsis thaliana columbia
atctctgctactgcttttacagtcacgggtgttgttaacaagttcttgactgttgacatcaacgttctgattcgggataagcatgccactcctgttggttcgagtcgtcttctttttactatctgtggaggtgtcggctatcaccagagtgtcaaattggataaacccattgagaaggtctgcgagaaagatagcgcgaagggagaggacgatgaggagttgacgcaggtgtttccggggaaactagc

SEQ ID NO: 128009 - DNA, 227 bp, Arabidopsis thaliana columbia
ccagcaacccaaaacccgataatcatcatcctaaaaaatggggtttgggccttatggggggaagctaccaaaaggttttaggggtaccacaggggagcccaaatggacggtctatgttatagctaaagagggggctccttttttggacttggcggccaacggggtctccggtttttttttaacgggcttttttttttttgacaaaataaactaaagggggcaggggt

SEQ ID NO: 128010 - DNA, 277 bp, Arabidopsis thaliana columbia
gggcatcggaaaacatattatcttgtattatattattgcgtttcacgttgacaaaaaaaatgttagatggcatagttaattactcgtagcagtttcgacttcaactctattggccaaaaacgcatcaatcaaatccgatgctttgtgagtcacagggactgtgttctcctctcttgtctcagtctcgcattgggcgttgggtcttgttcttgatttgacaccaactgtttcagcttggtcagagaacatgacctttgagacgtgtgagctgcaaatc

SEQ ID NO: 128011 - DNA, 399 bp, Arabidopsis thaliana columbia
gcgtctctatctatgtcaatgaaccctagaattacacttcaccaatggcagattctttatttacacacccaggacaattctaataccttataaaaaaaaagctctgttaaaaataagatttgttgtaaacaaaccaaaaaacagaatgattactactagagtactagctagctactgttgaatcaatacagtgttgttgttaccattgatggttccttcatttataatagtcgggttagattcgatccgtggagttacggcctctactgatgtgacacgacgctctattattgctgttgttccctgttctattgttctgcgacgaagatgaagatgacgaggaagagaaaaactgaccaaagactactgaaccacctctgattgagcaaacgggaacgt

SEQ ID NO: 128012 - DNA, 286 bp, Arabidopsis thaliana columbia
aaacaaaaatttattttttcccaacaaaccccaagacaaacaaaaaaataaaacccatttccctgggttctttaaaggattaaaaaaccccgggggggattttatttgaagggggggataaataaaaaaggggcatcataaaagcagtccgtaaaagcccgaccgtttttccaaaaagaaacccaagttttgctaaaaaaaggggcttaaacacacgtttttcccgaaaaggctttgtaaaattcccaccccccatattcaggcccccaacgggggagggccgggg

SEQ ID NO: 128013 - DNA, 386 bp, Arabidopsis thaliana columbia
gttcacaaggatagcctttttcattgtctcactgtgaacatacaagggagagaattagggcatcgaaagctttcattataacacaagcaatatccttctaaacccaccagggctttttctccatcaagtccttggagaaaacataacggaattttgaactgtatggcaaccattcgacgacctgcgatgctttcttgttgtttggtttgccttgtacgcatttttgtattgattctccaagcttttcgtctgcgttatctattaaccatctcatcaggtcatcaaagctcagagaagcttcctttgtaaacctctctataatcttaggtgataacactttcttctgcatctttacaaccacgtttgctccaagaaactctcttttt

SEQ ID NO: 128014 - DNA, 412 bp, Arabidopsis thaliana columbia
aatcttaaacacatccagttgtttcactgtagaggttaagcctaagctcagcaaaagacattagttgttcatctttacattagaagctactacatgcgtcttcttcttcttctctaacataagttttcagagagggaatactttcttgtgcttgaagtataacacaaaaccaaaatacaaaaaaccgcatccaatacctgttatcagtaaaacatactggaaagtcgtcggattctggaaaacagagtcttgcaaattcatcccgaagacagcggttacagcggcaaaaatagctgccacaaaggttgccgcggtgagaagcagttgaaactgaatcaactgattctgcacattccccagcttaatgttgatcagatcctctgcatcatctatatactctttcagcgatgat

SEQ ID NO: 128015 - DNA, 263 bp, Arabidopsis thaliana columbia
aattggaaaggctcgatggggattcagtctaatatgctcgggagaagtaaaatatgcatacaactttatggtaagttttgtaacttttccataaaaattaaagggcctagatccataaaatataggcaacgttttttttgcctttttatccaagaaaatacaatataagcaaaggcccatttgcctatataaaaccctaactttggaaaaaaaaactttgtttttttaaccttctcgtttcaataaaatccaacacaccccaa

SEQ ID NO: 128016 - DNA, 335 bp, Arabidopsis thaliana columbia
ataaaaacgttataataagcaacgtgtcggtaatctcatactcttacaatcacgcaaaagggtcttgacactgaagtaactatcttaacttttaagtaatagaaatctcctcaagtaagtgatcaagatacatactcaccctgatcaaacttgattgaagaatccaacactgaaaccactcacttaagtgcaaattgcctaccattcataccgaatcttgccctagtcgagccatctgtatcggcatactttaaaaccaccttgccaaggcctgccactggcttaccattggggcttggacgcggaatcacaacattggtcaaagcaccaaactt

SEQ ID NO: 128017 - DNA, 364 bp, Arabidopsis thaliana columbia
gaaaaacgatattaatttcccaaagaaggatatttagcaagactttggtatattacagcttatattttatattgcagttaagagtccatcatttaaacggcttgagcttccaagaaagcattaaaattcttggcggcttctaataaccgtggagagatcgccggagacgtcgggtatgaaaccggcgatgatgtggagaatcgaacctgacgcagtgaaggagactccattgcttttctgtttttcgaaccagaaacctttaaaacacctttgatctctttctcaacaggttccttgtcgaacacgaaagccgctgaaaccggttcgtcatggtcgttatcacctgaaccacttttgattagct

SEQ ID NO: 128018 - DNA, 415 bp, Arabidopsis thaliana columbia
cgtcaagctgctttagccatggctatggcggcgtctattatccaatcttctccgctctccttcaatagcaacaacgcaaagccacggattcatagttcaggatcgctcggcggaatcaaaagccaaaatagagtctctccattgagtgcggttggattaagctcaggccttggaagtagaaggaaatctcttttgatatgtcactcagccattaacgcgaaatgcagtgaaggacaaactctcaccgcttcaccacctccctcctctcccggaaaaacccatctccgtcgtctccaccatacaacttccgatcaagattcaaatactcaatggctctaatcatctcactccccataggaacaccaccacaagctcaacaaatggttcttgacactggaagccaactttcttggat

SEQ ID NO: 128019 - DNA, 348 bp, Arabidopsis thaliana columbia
aatgtctattgccctatttttaacatgattcaaaaccaaaattaaaccaattccatttttttctttatacatttctttgtctttaactttttaccttaaacaagactgtttgaagaggagtggaaaagattcgatgaaacctatgtttgcttcttgcttgcttaccactctaatgcacctcaggttaggtgtttggtcctgtgaagtttgaggtagcagctgtattgtactggaagatcctcagtttcccctcctttgtcccataaacaagacctcctccaggagaaggatgaaaacacgcaacgttcacttcatcctctgaacttggcagtactctcacaagctcca

SEQ ID NO: 128020 - DNA, 369 bp, Arabidopsis thaliana columbia
acaatgtgaacatgagcataatgatttattttggtttttattcagtctacattctcatttttttcctgatacattggacaagaagaagcagatactatataataaagtacatcatgccttgtcatattaatagctaacactaaagatagtggcaacagttactaaatggctcacacaaaggaagcttcagaatgtgatgacttgtttaggttgccttcctagcttcccgagagctttatcgagagcaacagggaactcttcgaagggaaccaattccgtttcgtattttagcttcccgtctcgtgcaagcccgaggagatagtctatcatctctctgcattcttttactttacccatactcaaccaact

SEQ ID NO: 128021 - DNA, 357 bp, Arabidopsis thaliana columbia
gattgaacattgtgtattgaacaaacaaaatgggataaagacttgtcaaagcagcaacaagttccaaaagagtgactgagagcttacaaaaaaggcaaagcgataggatttgataaggtttcaagcctgagtgcctgtcaacgacttcatctgaatgtgattagaatcagcattgttagtcggcaaagcttcataagaaccagttcttctcactccggccgccatcaccaccatcgtgtaagtcacaaagatgaggataaccacaagcacgacgtgttcagtgaacattagatccaatatagaaacagctcttagcttagagtcctgaatatcacattgggttgatccttcaacacc

SEQ ID NO: 128022 - DNA, 423 bp, Arabidopsis thaliana columbia
aaaaaactaataattcttgaaacacaaaccaaattaaaacacaaaaatagtacaataaccaagttgatttaacttaaaaataaaaacaaattgagaaaattctccatactttttccggtgatgtttcctttctacctttctcaagaactctcctccggtgactccggttttctgcagagaatcatatgcatcggagagaatattccggtttcacctcctctggtcaaataatcagcagtcttaaacaacatctcatgaacatcaacagttcctttaggagcaactccaaccgctgacaaaatctgaaccacaatgtgattcctccaataagcaagcctacccatcttaagcctagtccaccacggctcagccggtggactcgccagatccttctccttcactatctcaaacccaaccttttta

SEQ ID NO: 128023 - DNA, 241 bp, Arabidopsis thaliana columbia
gttgggacctctcaaaggatatgaaactttattcaagcgttacaaagaaaaagacattgtcatgttgactacataggtgcttcaggatctatcaaccatcacattaatttctgcagttacgagttaaaaaaagaaaagagaggggctcaattatgtcagagaaagatgggacttagctgcatcatttttcatttttgggccatccactgcaaaagggttttcctgactacaccattgaacc

SEQ ID NO: 128024 - DNA, 440 bp, Arabidopsis thaliana columbia
caaaaacccattctatgaacacaatctcacctccttcatcgtgtttcatacctctcttcccaacacgatgctcaccaatactaatctcttcttctttctctctttacttcttctttcttgttttctccaagtttcttccaatggagacgctgagatattgagtagagttaaaaagacccgacttttcgaccccgatggaaatttacaagattgggtcataaccggagataatcggagtccatgtaattggacgggaatcacatgccacatcagaaaaggtagctccctcgccgtcactaccattgatctctccggctataatatctccggtggctttccctacggattctgtcgtatccgtacactcatcaacatcactctttctcaaaacaatctcaatggtacgattgattctgctcctctctccctctgttctaaac

SEQ ID NO: 128025 - DNA, 336 bp, Arabidopsis thaliana columbia
aaaagttggaggataataatctataatctccttagatttgtcctagtatttaaatggagtctctcaaatctcctactttccgacataccaaaagcaaaacaaagaaacttagtcttggcttgggtaccaaacttttgtctcaatcatcttcattgggaaggccatgcttgtacatgagctgttccaaagcctcatcaaattctttctccagatcaaatatctcctcgggatgcctcttcttcatgtcttccatcttcttctcttgatcttttatcagcatctcccttttttccacaaactcctccatcttttttttttgaaactcgatgaagcttg

SEQ ID NO: 128026 - DNA, 170 bp, Arabidopsis thaliana columbia
ggaaactggtgtctgatgaaaatccacctagcaatataagcgtgaactttgatgatctaggagctttggaaaatgagaaagaaactaaaaaagagtaggagatgcttgctctttatagaccagccaagcttaccaaaggccacatgacaaagcctaccaaaggtatactg

SEQ ID NO: 128027 - DNA, 144 bp, Arabidopsis thaliana columbia
gacataaaaagaaagattttacaacaaatgaaaagagatgcaactttgcttaacctggaaaaggagaactgccttcttccaggttaagactcaagattagcatctgtcatttctctggatggcatttagaagcaagtcaaggaa

SEQ ID NO: 128028 - DNA, 220 bp, Arabidopsis thaliana columbia
tcgcggacgtgtggtcggacgcgtgggcggacgcgcgggtgaggatttgcatggagcccctcttttaatattggctaacaagcaagacctcacaaatgctgtatcggctgaggaactggaccgataccttgatttaaagaaattggatgaaagagtgttcatgtttgaagcagtttctggatatgatgggcgaggaatcaaagaaagtatagaatggctg

SEQ ID NO: 128029 - DNA, 326 bp, Arabidopsis thaliana columbia
aaacacaatgggaaatcaattcccatgaagattcaggctttgcgccaagttcattaatcagatctgacaaaacctaacaagtaacaacagcctttttttcattgatacaaatttggattggttccaaaaatttcatgaaagaaactgccgcctgcctaaaagttagacaattcatgttgatgctgcagcaagttaagccgccttatcctccaaagccttgagtttttgcctccattcttccaacttaaagaatttctctaactgctctgggtttaggtctcgggaagcagtcttctgctgttgagcttttgggagtcggatttttt

SEQ ID NO: 128030 - DNA, 459 bp, Arabidopsis thaliana columbia
atcacttgaactctccccagtgagatgagccggactcaaaatttcatcatctttctgattttcttctgacactggtcctggactttgacctggctttcccttgacctttgggcgagctttcctttgagcgtcccttgctttaataccagaatccggggttatataatccaacaggtctgatacactgagatggcctttgctggaaatagaggcgtctggcttgggagtaccatttcgtgcagcttcttgctgttccagagctttggactcgaaatattcaagccacgcagccgcatcctgtgtccgaagatcctcagggcctagttttgcttgtagaatctgtagagtggtctgctcatgttgaacgctcaaggagtatgcgtccatcagagaaagagcaatagcaatggcatggtagcttgcagcagtctggatatgatcagctccaagtagtctctg

SEQ ID NO: 128031 - DNA, 343 bp, Arabidopsis thaliana columbia
cgttcgcgtgggtgatccgccacccgctttagtggagtgtttcttcttcctcctctctttcccaagaatctcttccttattttctcggcaacgaagcacaaagggtcatttttgtcggttgaattcacaagctagttttctcgatctctctctggatctatagctgatctgcattgcggcttgtagctggtatttgttccatagttgtaagctatggtgacaatcaggagtggttcaatcgtgattttggttctgctggctgtatcatttctggccttggttgccaatggagaggacaaaacgattaaagtgaagaaagtgaggggaaataaggtgtgcacgc

SEQ ID NO: 128032 - DNA, 282 bp, Arabidopsis thaliana columbia
tttggtcgttcctgcgtcccataatttattatggagaagggagagcaagtgttagcttttgatctttcttatattcttctctgaaatagtaacacactgtgaagagtttttcctacatctgaatggtgtctgatccagctgagaacaggaaaaagaagaaaatggcgtttgtgacaactgcggaagtttgtgacgcgaattaagagctgattcggagtggtcagctacgatctatgcaacccattttccagatttatggccgtcgacaaatattctcaggac

SEQ ID NO: 128033 - DNA, 390 bp, Arabidopsis thaliana columbia
aaaacaaaaatgacaaacaaaatccagttgtgtaaaccttttcaatacaatgagagatgaagtaaaaggctgcaacaattttaaagacaatgagagaggattggaggatgaagaagagtattaaaggaatgagaaagaggaacagctcttaacctaattaagtaaatgcttcttttattccttcttgtttgttcatgtgggtctcttctgatttccacctcaaaagctgatcttttctatttaagatagccagagtcatacatagagagaagagaagagagagagagatagagataacttataacttcacatatcaattaagaagtcatataactaatgacagagcttacaaggatgattcttgttctgaggatattgatgtgtcctgac

SEQ ID NO: 128034 - DNA, 309 bp, Arabidopsis thaliana columbia
agtgtaaagtaattttcattatattctcatgtgtaacgaaattattactttatgctaacaatttgttaggtgttttaagtttatgggccaagaatatatttatagaaccataataataatattaagacccaatctgtgaaaagcccaaaatgcttaaattgttactttcttcaacagacgggaaagctagcgagtgcggatcacgcgcggagaacgggaacgatcggataatggttccaccaccgtgaatgcgtcggagggaaggtctccgccgtaaagaagagagatagagttcgcgtggagaaagct

SEQ ID NO: 128035 - DNA, 168 bp, Arabidopsis thaliana columbia
cctgaaaatattgatacaaaactcagcagaatgttagagatacagttaaatgtccatgagcaaattacatttgattagatctatgtgggaaagatctgattatggccactctaaagaatcatactgaaatgttcgaacgacagaaattccactcctgtctggcaacag

SEQ ID NO: 128036 - DNA, 169 bp, Arabidopsis thaliana columbia
ggttatgtgacactacgtaataaaataatcacagttttcagttttatttgccccaaagtaagataatcaacaatctgagacataataaaaggagaaaattatgaacaaaaagtagcagcatcactctctctctgtttggtaactgatagatgagcatttaatgaatgtt

SEQ ID NO: 128037 - DNA, 364 bp, Arabidopsis thaliana columbia
acttgagaaataacggggagaaaagcatgttgtaggagcagaaatgcaagatggctgttggatgcaagcaggttgcgcacaataacccgagtttttttgcccttcagacgcaagaacagttgatctgaccactggggggctaacagtacatttcaaggggaggtcgaagtcagaaagcatcacatgtccatcatctttaacaagaacattctttggctttagatcgcggtatatgatgccaagcatatgaagattttccattgcaagaagtacttccgctacataaaactttgctggttgttctgaaaatcgcttcccgggctgtctttgtcgaagggtatgcaagtcaccttcaggacagaac

SEQ ID NO: 128038 - DNA, 474 bp, Arabidopsis thaliana columbia
ctcctaaaatttctttgtaactagataaccaaacattttttacataaaccatctctctgacaattactattaaactaatctgtttaaaacaaacattttgatggttgacacttattttgttggaaggaagagacaggggaatgtactttactggagctgtgaaaaccggttcttgattagagtggctacgtgctgcgcaacccatgccgagccagccaccgtgcagcagaatccgtgcgtgtgaccttccctctcgatagataaggaagtatgcggagcttgctttgaaatctcttcaaagagttgcagtggaccccaatgatcatcaatgccaaataaaaatgcaagcttgctctggttttctctcatgaaatcccaatctggctctgctgcaagctctctaaactctgactttgccatgaagagaacattgcgcatggtgtgatactgcctcaagtgagtgcaggtagcttg

SEQ ID NO: 128039 - DNA, 152 bp, Arabidopsis thaliana columbia
tatgctatcggtctacgacagaaaaaggaagaaggtccctttttaaaggtaatggggtctgtagaaaatttgtgttcgaagaaacaagttttaaacttgatgggttttgtggtctatccggtgaagctattgatgctcttggtgcacatttt

SEQ ID NO: 128040 - DNA, 289 bp, Arabidopsis thaliana columbia
ggccatgtccttccagggggttccttgaaaaggtttcaatccaaaaatttaaggcggccccaggattgtcgggggcaccttctttaaaagaaggcttggattttggctgatgaccacaaaggttttggttccttgttctcctacagccttgccatggccctggataccatttaatccattcgaaacacaccaccgttcagttaaggttaaagaaccaggggaggattaatttgcaggtttttagcaaaaacctgaaaggtccacctcctttttgtcctttgaaatgggg

SEQ ID NO: 128041 - DNA, 153 bp, Arabidopsis thaliana columbia
gggtttgatacgacaacgcgcacgatggaaaggagaagccggtataagaccaggaagatgagtctgcaggtgaagaggagtcttaagaggatgatgactctgacaaaggaatggatgttgatgagaaggactcagatgatgacgaggaggagg

SEQ ID NO: 128042 - DNA, 192 bp, Arabidopsis thaliana columbia
agagaactaaagcatgatcgttcttaggagccatgaattaaaacaaactttttgggccttttaggatattcataacttggtccattttaaggattttgggttattattcgccgtccaaaatttatagattcaggacccttgaaagagcctggcataaaaacctaagcaaatttgagggtttaaacaggtttg

SEQ ID NO: 128043 - DNA, 213 bp, Arabidopsis thaliana columbia
ctacaagggggggataacttaaataaacccccaaacttgaatcaaaaacatcacgggtcccctagagatttttcatttgtaaactagaaaaaaagattttttgggccataaaacgaacatgattttctgtttcaagaaccaaaaaacaatgccccaaaaattaacaagggggggccattgattcgaggagcaacgcatagccctttgggacag

SEQ ID NO: 128044 - DNA, 130 bp, Arabidopsis thaliana columbia
acgtcatcaacaatttatacgcattggaatatagaccaacatttagtaaaacctggaccaaatacaacaagtctgatgttaaaccaccgtttctgtctagctcgattctactgtgatgatcggagttggt

SEQ ID NO: 128045 - DNA, 275 bp, Arabidopsis thaliana columbia
ctggcccccaatgggaaaaaaacaattttttgcaaatcgcaactttacacggtttctggacttacatacccttgatttctggttcactaacaataactagaccgaaatacatgggaatcgggaattgaaaatgaacatttttttttttataaagatttaactcaccatccctgggggggtttaaaaagggaggcaggggctggtttcttcattcatgggggtcttcatcatcattcattacaaaaatgtccctccaatgtatttttaaaaccagt

SEQ ID NO: 128046 - DNA, 371 bp, Arabidopsis thaliana columbia
gggaaaacttttggctttcataactttaaaattaagctggagcttttaaagttttttctcaagagtctcagagaaagtatcatttgaaatcatgtggatttactattttgttatacagactcatactacaaatttagatttggacatttgacacacaaaaatacatttcttgagaagcttatttcatacacacttttggatggccatttcttttacagtcgttgccagtctctggaacaccttcaggttatgtcctacttttccctcattcagtaatgcaagcctatctatggtaggtgacaatttgccacagagatctgtaacttcctgttgtatatgggattttgaaccatatgatcccctttcatttg

SEQ ID NO: 128047 - DNA, 390 bp, Arabidopsis thaliana columbia
ggttaaaattgactttttattttccgtgacttggttggggtgtttttccaaataaagaagacataatttatgaaattactaataaggattgtaacagcttcgtcctctaccgttgtcgctactttgtttgctgctgctcgaaccgctgcatcccctatacggtggagaaggcctcggtggtggttgtggcatcgctgctagtccaggctgttgcaagacgtatcggatccttccatcaggtaacatgattggcatcatcgacattccaccagctgcgtgacctcccgcatgcattaatggttgtgaataggcagaagctccaaatccaccaagagcaccaagggactaagagccatgccataactaagaagaggaggatagtttggttgc

SEQ ID NO: 128048 - DNA, 278 bp, Arabidopsis thaliana columbia
gggccaaaaaagagtttcaagcggttataatccataataactggttcaaatagatctccccacccctaaactggtaaacccaaaggcctcgaaagaacctttttatttccacacaaagggaacacacttggttagcccacaccaatcaattttttcctttccttaacaaaatttcttcattcaacaataacttccattaaaagctccttttccatttttttttcctttaaaatttccgggaacccttttattcccatatttttaaaaattttggaagg

SEQ ID NO: 128049 - DNA, 153 bp, Arabidopsis thaliana columbia
ctcggcgaatttggcttggtttcaccgctctctctgctttttccgtttgatcaacctccaataaatcctcgggtaaaaacggattcctctaaaccggacgaagaagaagcattttcacgagcctagagataaaggtacagtagaaagagaaag

SEQ ID NO: 128050 - DNA, 237 bp, Arabidopsis thaliana columbia
ggggaaaccaaggggttacttctaggtcattaaaattaatacttcgggctgcattgggtttaaccaacttttggaaatccaaaactgggggcaaaatgtaataaaataaaagagtggttttggaacacaaaagcaaatttttaaaactccttccgttccttaatattggaggctttcgggaaaggcttatatttcatcttcctcaaaggggtttttttccggataatcaccaacctt

SEQ ID NO: 128051 - DNA, 169 bp, Arabidopsis thaliana columbia
tttaaagactgtgagagagagagagagagagagagagatagagaccccacatagagcactaatctttacatccctaactacgatgattatcacacctaccgatctcgctttctttctctctgatgaaaagctaacggaaaatgggggaatacataagaaagagcaaaat

SEQ ID NO: 128052 - DNA, 133 bp, Arabidopsis thaliana columbia
gttctaccatatttattgatgctgaacgaagaaaataattgaccctttcaaaaaacgagaaaattaatgctgttttcttctcttcactcacatgatgaatcaaacacagatgacatcaaacccatattattta

SEQ ID NO: 128053 - DNA, 300 bp, Arabidopsis thaliana columbia
ggaactaaaagaggggggtatattacaaatgcaccagtagtatgatacataagtcttggggttaaaatcaaatacctaaacaatatacaaggtaaccaaaccaacccaacacatttaccaaagagttaatgaacaaagatgaggaacctaaaaaaccatttaaaagagtccaaagaatttcactacccttgagagcctatttgcattgatcattctgcaactgccatatatatgtaccattctgcaatggtattcccatgttacctccattcattctctgatgggcttgactgtggacat

SEQ ID NO: 128054 - DNA, 415 bp, Arabidopsis thaliana columbia
  unsure (1)..(415): unsure at all n locations
tttntttttttttttttttttttttaatacaaattaactggggctatagtgcagcacagcagtacaagttggggcttatattcatagaaataatattggctttgctaaatctaaactcatacagatataaagggaaaaataaaagactcgagatactttagcttatatttattataagggtttctacaaccacaagaggttacacttacattaagccaaagtactaaaactcttctgtgtctgaaaatggattccggaaggttttggtgctagcctaataatcctagggaaaatcttgtaatcctcgatgttgaaatcgatgagcctttgctggtacagcccgaaaggtgagcctgataacctgaggctaaagatttctgtgttgactttccagtttcccatcaataaacttttg

SEQ ID NO: 128055 - DNA, 190 bp, Arabidopsis thaliana columbia
gggggatacaattttttttatgatcaaaaacaattgggtttacttttttaagggttgaaatttaaacagagggtaaaaagttgcaacaaagatcagccaaattacataacacttggtttaaccaaaagggaccaaatctcttttttgaaggtttaaccaaccaatccactagattcgatcaagctccttt

SEQ ID NO: 128056 - DNA, 368 bp, Arabidopsis thaliana columbia
aaacaaagctcttacgagagtaaaaaaacgagtgggttccaacacaaaaataatacacacgaaggcggcaccaattcacttactacatacactaacagaagaaatttgcttaccttagggcagtgtaaaatcaaatgaagccttgaagagaatttcgactgcttcaaagaagagaggagcgatctcaggggttggagtcttgactgcacatttcacaccaggttgacccactatggccgttagttccagcaggaacggtgtgcctcttggtaccttggccgaaagatagaggacgtctggggtcccattcttacgctttgctatgaagaacatgtttgatgcggcgagtaaatcaagtgttgactcca

SEQ ID NO: 128057 - DNA, 381 bp, Arabidopsis thaliana columbia
gataagagtaattaattgtacattttgggtcttgaaagagaataacgtacatgatattgacagagaccaaaaagagtacattttgtgtcttgaaggatgatggagaatttatcatgtggaggagtgagaagcgtgtgaacgtgaagcccaaatgccaaacacaagaaaccagaagacgaacaatattgcccagtaacgtgctggtccgtacctgattcttgtcagcacaacgaatctgaagaagatgactactgttaaagcacagagaccacctagaagtatgtgtagaccactctttgcagttctctttccgacacgaggagcaatgagccaagccaaagtaactgtgagtaatccggttgcaagtagtattccggtacc

SEQ ID NO: 128058 - DNA, 452 bp, Arabidopsis thaliana columbia
gttaatcacggtctaaatcgatttaaaatcgttttggtcaattaccacggtttttacatagaaccaatcgccaaaccgaagctccaccaaaaactaatataataaaccggaatctttagcctaccgttgtttgtttcccggttaaattaaacatcttcaatcttgaatcctagagtcacctgatggtttcttcctcaagctcatcaatattccctcaacaagcttatcttcaccaaaagtttttgcaggcttcttatcagtgtcccaagaacccagaatttgaagtaaatcactctctgtttcatcttctttcttcttcctttccccaccgctctgttttgaagaagctttttcctccatctctgagtcataatcttctccctctgaaacagatgactcattctctggacacgtaagcagcttaccattaattgaatgttatttctatgata

SEQ ID NO: 128059 - DNA, 462 bp, Arabidopsis thaliana columbia
aaagaaaacaatacataaaaagggggattcaaagagagaatctgcacagttccatctaacttcttatgaacatcaacaacaagtcaacaactacaatttcacaagcagaatgatactaattactttcaccattaggttaactactattacattaagaattatttttttctttactttgtttttgtaagttgaagccagatttgttcgaaaacatggatgataagatcatgatactcctttggattcaaagtaaggtagcaagcaagaaggtcttccaagtctttcgaagctctgatgttgttctcttctatcatctcaatcattgattccctgaaatctttctttggatcaacggaccgcttcatcacagcgaagctctctagaacatcttgtttgctctctgatcttctagaagtgcttctacgagtacctgagagttgaattctaggtgaattcactctt

SEQ ID NO: 128060 - DNA, 298 bp, Arabidopsis thaliana columbia
acttaaaaccaatactttgttcattgagattaatgtgaacatatacgtaatacatgtaacagatagatttagtttggacttatagttctatgatttaagttctcaattagcttgaacgattattatatttcttaaaataaaaagcaacaacaacacaatttcactaagtttctacatatcacaatgttgtttattaatataagcagtttttgcgctgagggcatattccacgttgtatccttgcatggctataaccccaatgatgacatgtgaaaaggactccttgttattctggatc

SEQ ID NO: 128061 - DNA, 282 bp, Arabidopsis thaliana columbia
attataaaaaagaagggttcaatactctttaattctgtatctgtattagtaaacaatctatactaaccacaagaaagaccaaacttaaggaccagaaatctgatgagtctctcttgagattttgctactctcttacatgactgaacagacgcatttgttcatcttcgggtcacctttaggcttcttttctttttccgtaaccggagcttggatgataacgtgcattgtggtgacagcgcctgcgagattagagacaggacttcggtagtctttaaccgtctt

SEQ ID NO: 128062 - DNA, 323 bp, Arabidopsis thaliana columbia
ttctttttttttttttttaccacaaatcgtttggtgtgaaacttttattgcaatttagctggttatgagaagaaaatacactaggtctaccttcagtcgcttgattactttctcaattcaatcttgaaagaaatttctaacgcatttgaatacgagagccgactatctctatcttccctaactgaggattcaccagcaacagaaaataataaatgtaatactgacaagaagaaaagaaatgcggaaagacattatattggctatatacctctcttccctgtcttcatcagtatgatcttcataagttggagggttcaataaca

SEQ ID NO: 128063 - DNA, 350 bp, Arabidopsis thaliana columbia
ggaaaccctttaaatttgtatataggtcaacattaatgattcatagtccctctctgtactatagtattcttctcatgtttatattttacaccaaaacattcatctacttgcttctggaaacaagttttaaattaatatgttaaaactcaaaatctctaattaattccctttttttctttacaagtcctctaagaaaagaaaaaacataaagggaaaaaaaaaaaaaaaaggagattagagaagactcaaaacgattagcctgcaagacatggatcattacaccacaccataagctcaaagcgacaccgtatcttcttcttatacaccaaatttcacacaacacctgacgg

SEQ ID NO: 128064 - DNA, 135 bp, Arabidopsis thaliana columbia
ttcacgcgtgcgtcgacacatctggtatgcaaggtgattacagaacctttgtggagattatttccgaaaattctgaggatattgtgcagagctggcctctcgatggctactctatctgggttgatggaatggatg

SEQ ID NO: 128065 - DNA, 392 bp, Arabidopsis thaliana columbia
gcctcaaccggggcaacttgcataaatattaaacaaagctaggaaaaaacacatagataagattcgaaacattaagcagacggaatttgaattttctagaacttaaatcccaacaaatcccaatttcatcttaaacttgtcgagtctcagtgtctctttagtgtcctgcaactgttggcagcatactagtacccatggaactgcaactaggtatgtttgaacttgcaacttggacacatggaggatcaggagacttctttttcttgaatgcaggttcttcattaagtgagattttgatgtcggagaaggtaggcaatccgaaatcgggtaaaggtagattactattagcactcccaggagctgcaaagtgttgctctaagtacatgcggatt

SEQ ID NO: 128066 - DNA, 395 bp, Arabidopsis thaliana columbia
agagagaatatcctcggaaaatggcatcatataaccgaatctccaaataggttcaaaattgataacaattcaaaagcaaaataggtgcaaagtagctccgccacctccgatcaagaacccagttccgggaacagagttccgatggagaagaaacgaagctataacacgcgaccaaataccaaactaaagtaaagaaactaatattgttttttgattcatctgcggatagagttttgaggattcgagttcactttgcacccttcttaactgcagccttggtaaccttggctccggttgggtccttcttgtcaacactcttgataacaccgactgcaacagtctgcctcatgtccctaacagcgaaacgtccaagtggtgggtactcagagaaggtc

SEQ ID NO: 128067 - DNA, 308 bp, Arabidopsis thaliana columbia
ggggaatcaaaccgccattttcaaacgtttctagagtctttccaaatcataagtctgttaaaagagtttaaaaaaaactgagcaaaagcttggatcatttgtaccggggaaaaatccttagatttttaagaagaaagcaaaccaaaatccaaactaaatcgaacacaaagcaataattttaatggggagggagaattcagcaaatgccgctatttagtgtagaggccattgcagtagccgttattattttttacattagccaagccattgggagatttcttggaagttccattgatgaaaatgtttgt

SEQ ID NO: 128068 - DNA, 484 bp, Arabidopsis thaliana columbia
agtcaccaattcttatctttgtttgatgggtagaatcatatatggttctggacaagaaggttatatatatacacacacaagcaaccatttgttgctttttggatacaaaacaaaaagcaattaaagtaccaattgattaagcctaaatcgcatcaattgatcttctcatgctaatatgagctccaaggagtggtccaatgtttccatccaagaccgatttcaggtccagaatctctaaaccggtttttctatcaaccaccatcttgtgacccttagagacataactcctggtttcttcccgcggttccaaaatgttcttgctgtcgattttatttacatccgaaaccttttgctcttttgctatcacaagtagcttcgccttcaaccggtttagagctttgatcctgtttgcaaaccggtttctttctcctgaagattgtagtgttactccactcggaatatggtggatacaaaccatattctc

SEQ ID NO: 128069 - DNA, 479 bp, Arabidopsis thaliana columbia
cttcaaaatctcaaaattctatgacaaaacgatagtctttgtttatgtcagtaccacaaagaggtggaaaaaaacaccaaaaaaacaataagcaaactatacactgagaagaaaaataaaagagagctcaatagatgttttatactaacggtagattagatcaaagatccaagctttactctacatagagcagaacccagaatcccttcatatctcttttattctagcaccgataatctactgaaaagaagacacttagagctctgtctctttgtcaaagaagtcccagccgtcatccagaagctccttacgttcattaacagaagcttttgggctcttgttattgctcgaggcttcaggtgtttcataagatgcttccaaaggcttctccgtcaataagctcttcatggatgaggcggaagaagccagtttacagctagtctggcttgaggagattgattggctcaatggcactcggt

SEQ ID NO: 128070 - DNA, 470 bp, Arabidopsis thaliana columbia
cttcaactcactttttacgtgtgccacttgcttcttgtgtttctccatctccaaatcattctctgataaagaatgctttagatcatcgcactgagatcttacggtttctagctctgtttgtaagagtgaaattgctgtttctttttcatctttggccagctttatcacttgtaactccgctgctagcgactctgactctttcctcattagtgaaatcttgctctctagctcaattttcttcatgttctctctctgtagtgaagcctcggcttccataaccgattttttagtcttttccaaatcaactctcaggttctctgcttgctctgcctgtaacatgagactatcttggttctttttcagattctcaatctcttcctttaggattttgatctcttggtttaaatttgcagtaacatcttcttcatgcctcttctgattatctatctcattggacttctcatcaagat

SEQ ID NO: 128071 - DNA, 301 bp, Arabidopsis thaliana columbia
acagggcagaggaacaaatttttaaaagcctccaagggtcaaaaaatcaattcaccaagagggctttcgattttttataactaccggtttttcattttctaaaatatgaaaatttttttttttttgcaaagtcttcggttcccttaaacgtttttttggggaaaaaccacccggggtttgggaaaggggatcaaaccaatttcactattgagccttcattcggttttgaagcctttgagctttacccccgtttgaaacatgaccacgggaaaaagcaaaattttggggatcggggggactg

SEQ ID NO: 128072 - DNA, 277 bp, Arabidopsis thaliana columbia
aatgatctgcaattttctcaaacatgatcaaatcataaaagaacgggttgattaagtacttcaactaactaatgctgaattacatagatactatatccctacttatcaatcctaaagaccagagggaagcacagccggaatgtgaatcttagatattaggctctcataagactagaatttggaagccatggcaacaagaccaataggaggagcctgtgagtagctgtcaatgttctcttccaagaagctcatatcatcatcgcttatagggaaatca

SEQ ID NO: 128073 - DNA, 253 bp, Arabidopsis thaliana columbia
gtgggggaaaaaaaaatcaacgcaggcttgcctttggcttgccaattttattccaccgggggggccaaatttaaactcaaagaagggttaacccctgtttctccattcaaactattatgctgatccctttttttttcacaaaggggtcaaataatcagcctaggcaagggggcatcatctcttccattggcccggtttgctttaaaaagcaactcaaaagaatcctgggggactccccctccctgacccaaaa

SEQ ID NO: 128074 - DNA, 318 bp, Arabidopsis thaliana columbia
agaggaagggttcttttgggtcttatgggtcttggaaagctgtttctagtcttaccatctcaaaaaaaaaaaatcaaaaaaaaaaaaatccggggatttaagtttgaaacaatttataacttcagataataatggatgtttatttacaaaccacattctttcaaacctccacaaactttgtacattcaagaattgcatgaatctatcccagataggtggcaatcattcttcccacgagatgaagcgaatcgaaccagtttagtcttcaaacaatggaaaaattgccggagaccgaacagtttcactccccattttttg

SEQ ID NO: 128075 - DNA, 154 bp, Arabidopsis thaliana columbia
aacgccattacaagaatcttaagcaggggacttcaaaaaagatttgagaaaagaaacaaaaggctctactagagagagagaacaattgctttgtatcttcctcagtcgatatagatttatagatatagatagttctctattgcatatagaagaa

SEQ ID NO: 128076 - DNA, 441 bp, Arabidopsis thaliana columbia
gttctattcctgtttgaatatgcgactgtaacaaaattcatgaaaattgagcttttgtatataaattcctactctatgttctgtcatgatctgtctcatttctcttggaatttgtactcttgttgttgttctgttgcctcttccagtagaataagcttgctggaatctgatgttgaagaagagccgctaagtattgtttgaaaccatcgagcagaagctttaggtatccttgtgagattgttcttgtagtcaacatagtagatcccaaaccggaccgtgtatcctgagttccattcccaattgtctagcaatgaccacacaaaatatcctcttacgtcgcattcatcattccttatggcagctgataagtttgagaggtaatctctgtggaagccaatcctcttgtcatcttttaatgctttttccatgtctatgaatgga

SEQ ID NO: 128077 - DNA, 313 bp, Arabidopsis thaliana columbia
ataaaaggcgatttcattcatatggacaaatgacatagtatgaacatcttccaaggcatcagtggtttctttcacagcttgaatggcattgtatagaaatactctctaagaaaactatcgagtgagcaagtgagtctagagggtcttttttactttgcagtcttgtatatgtgttttaatcagaaaatctggaagaagaggctggtggatccatcaccgaatgatttcagatctgctggtttgaccaaggccctgcacaaaggacacgtcctctctctctcaaaccactctgaaacgcaatcttcgcaaaaca

SEQ ID NO: 128078 - DNA, 417 bp, Arabidopsis thaliana columbia
  unsure (1)..(417): unsure at all n locations
cacgtgaaattgtggtatatacttgtctgtcaaaaattgatataacaaagaaaggaatatttacaaagtggtgagaacgactaacaataggattaattatcgtctaactcgagtttattttttgaaatatattttgtcccggtgataatatcattttgggatcatatttatattttctctctacgaaaatattccacctcggaccaaaatgtctaacccatccttcttgtgatgaatgatanggaagatattgtataacccccatattagcatcctcacaaaacttcagtatttccatgttttcttgatcaaaagcctcccaattgtcaaaacccgcggatcttaaaaaccctaccgcataaaatacatcttactcgggtatagcggcagacatccgatcattccacctaaaaacgc

SEQ ID NO: 128079 - DNA, 379 bp, Arabidopsis thaliana columbia
ggcttcaaaaaaggttccttccattttgataaatccgcaatattccaaaataaactctttcaagaatcaatagaaaactaaaatataatataaaaaagccaagagttctaaacaaaagaggcagaaccaaaaaaacaaaaaccataaatatatctaagcgtttgatccaaatgcttcagatatctttgatagcacttcaaaaagaaaaccatgcttctgcaaaaagaactcaaattccctagcctgcatcgctttccactgctcgtaaaatctcttcatatcctttgaggcaagcttactcaatccttgttgagcagtaagttcatccatgccaagacccactatcgatctaacaagagaagactttgtaaaagagact

SEQ ID NO: 128080 - DNA, 350 bp, Arabidopsis thaliana columbia
tcttttttttttttttttttttttggatcgataccattggtgtatatattcattcttataacattagattggcaaatagctaacttacaagttatgtgttctggtcttcagataatctttacaagaactcaatagattccccaaaaccgaatccgaagactcacttctcgaacctaggcgtctgttcacatcgtccattaacctcaaaactgaatcttgctcaaatcgggacaagactctggaccatgcggaagttgaaaatgctcgtaactcagtctcctcaatttttccattaagatcagcaagagatgatatagccgaaatatgatcgcctttttcgagtttcctga

SEQ ID NO: 128081 - DNA, 309 bp, Arabidopsis thaliana columbia
cttgaaaatattgattcaaaactcagcagaatgtgggagattcagctaaatgtttgtgtgtcaattacattttatttgctctatgtttgaattttctgcttctggacactctcaagaatcatactgaaatgttcgaacaacagaaattccactcctgtctggcaacagcttcttcatgtaatactttgatctcctcgaaagattgattctttcccgtcttgcctctggtatcatctcgattggacattcctgaaacccgcgtctcacaaaccagtccgcggttctcgttgtcagcagaaatagcatctc

SEQ ID NO: 128082 - DNA, 503 bp, Arabidopsis thaliana columbia
tttattctgttgtgaataatgcagagccggcgtgagctcaggcgccaccgtaacgaagaacaaacctgaaggagaaaaataagccatgggatgtgcggcgtccaagctcgataacgaagatgctgtacggcgttgtaaggatcgccgccgtctgatgaaagaagctgtctacgctcgtcatcatctcgccgccgctcacgccgattactgccgatcgcttcgtatcactggatctgctctttcctcattcgcctccggtgagcctctctctgtatctgatcaaactccggctgttttcctccatactccccctcctccgctttctgaacaatctccggctaaatttgtccctccacgtttttcgccgtcgcctgctccttctcatgcctcctccgtctggaactgggagaatttctaccctccttctcctcccgattccgaattcttcaacaggaagaagatgatgatagaggatcaatttccgaggtcgggacacgctccga

SEQ ID NO: 128083 - DNA, 354 bp, Arabidopsis thaliana columbia
aaaaataatggaaatcaaaacaggaacaatcttacatctttgagtttcctttttccttcaaaccaagagaccaatatgaaacttttctcttctcaagtatgtatctgaagaacaacatgtcaatagaagatacagaagctctctttctctctctttcttctctacaactctaactttatgaagcctttcgcactccgagttcttccaaacgtttccaagtggcttcacgttttgcttcggtttcagctgcttttgattcatcttccttgaactttgcgaggcattctttaaataactcagggtcaaggtcatgaaatatctttcgcacgtttagtgtcaagctatgaacagctt

SEQ ID NO: 128084 - DNA, 358 bp, Arabidopsis thaliana columbia
tcttttttttttttttttccaaaactcggtagaagtaaaagatgtaatatagcaacctttcaatactgaacaatcacatgaaactataaagataaaaaagcacggggcaaagtcaaaaagatggatcaaagcattcaagatagagttcttggatgaaacttgaaacaaagacaacttcagactcggggattcccttttacagacacagtccacatactattacagaccaaaaacaagaattggtttacttgcaagggaacactagaatttcaaaaacgtgttaataaatatgcatgacgagagcgatataattggctcatttgcacttctttatgataaacagcagacacatgtatat

SEQ ID NO: 128085 - DNA, 351 bp, Arabidopsis thaliana columbia
ttctttttttttttttttttttgcaacagtgaactttttggttgtttgtttgatacaaacttaattacatgacaaagagtatgtaaagcaaatcaataaattatatattataccaagaaaaaaagatttaataataaatgccacggagcaaaaaaaagaaatgttttatcttctggatctcctccgatcggcggcgtattgagacaacggcacaacttccgacaaaggagttgactgcggcgtaaattgcggcgtcggaagtggagaattccgacaaacgggacaagaaccattgagcttaagccaagcgtcaagacaataaactgggaagtatgtgtttacactcaggca

SEQ ID NO: 128086 - DNA, 167 bp, Arabidopsis thaliana columbia
tcttttttttttttttttattttactatgaacattacaagactcttaacattgcttcaatgctttgaccaaatcctacagataaacggctaaacatctctctgattgcaaatccaaaaactaacaagataaaccattaatctatagctaccatgaagcgcaaaagat

SEQ ID NO: 128087 - DNA, 324 bp, Arabidopsis thaliana columbia
atcaagacatattttattaaatgaaggtagggggtgataaatcccaagacctaggtgcatgttttcttacaggcaaacctcataaagtatcaattacccctaattatgattgtttttagttcccttcctggctgatatgctgctgttctgtttcttcttgtatctctgggatcttaattcctgctgacccatcaccacctgattcggagtatttagcgatcttctgtaactcatctctcacacctgactgttcataactagcaactgcttgttggtctatcttagcttggggcttacgacggcgaatggcctagactgcttctg

SEQ ID NO: 128088 - DNA, 283 bp, Arabidopsis thaliana columbia
gggggaagcggaaaaagggccccccgtacgaaaaaaccaaaaaagagggcccccctcaaaaggttctttaccttggagagggcaaaacccgcccgggctttccctttttttaattggggcccctgggaaaattggataaaggtaaaccccagcccatcccttcccttaaccccccccaaaaaagccccaatcagggggggggggaataaacccccctggaccccccccccccaatttctttttgggcctaacgccgcttttgctttttccccggggaaacccc

SEQ ID NO: 128089 - DNA, 456 bp, Arabidopsis thaliana columbia
gcgctctttttttttttttttataaaaatgctaaatttcaactgtgataaggggtgatgttggcatatatagctgtgcaaaacacagtgaagtaaaacacaaataagtacgagcttagagatttgatgcgtcgtaccgtgaacctaagaagagtcattcctcattgtgacaagctactttctaagagggtctcagactcagagagctgctttcttcacctcgaaaaaatttgagcgttctctgtttgctgcatcaatgtcttcttgtgatgccacggccactgcaacgcctttatcactaacagagtctattgcctctgcgaattccttgaagtccttcaaacttgtagataatatctcttcacgccttatttgcctctcttcgtcggttacattaagtaaatgcctcaacaaactggtataacctttggcatcagggagttggtatgaatcgaca

SEQ ID NO: 128090 - DNA, 382 bp, Arabidopsis thaliana columbia
accaaagaaaagatgaaattaaaagaaatattttgaagctactataacaaattaacaactcaacataacatccattttctactcttctattaccctgaagtatccgtcacaagtcaactcaaagtcacacacatacgaccactaattgtctacggttacttgatctgtatcagtaactcctccttttgattacattcatctaactcccaactcctactccatctcaagttcttgtggttgaaccaactgctgcctaatgagacttagttatataacggtgaatctggttcagagccgcaaccgaagtgtatgtagagacagagtcttcctttggtattgcacaaagttcaagggagctgttgacagtcttcttacttccttg

SEQ ID NO: 128091 - DNA, 527 bp, Arabidopsis thaliana columbia
tctcccacgcgtccgtccaacttaaccctctctcttttcttgcaaacttttgctcggaattctatgctttgctgatctattgttttctctctgcaaaagtaatgagaagctttttgctatgttaagctttagatctgctattatttgttcctgtgagtcttttatatcttgtgtggtttctttgagaccttaagcagccattgtcacaagctgagctctctttctttctctctagttcaagattctaactttggagcaagtaagcaagtcagagagaggacaaattagctgaaatgctggagattgaaagccctacgagtctctgtttccgtacaaacactacttgtaatgctctgcttcgagagcttcagaaaatatgggttgatattggtgagagtgatgctgagaaagaccggatgctaatggaattggagaaggaatgtcttgaaatctacagaagaaaagtggacgaggctgctaattccaaggcacagcttcatcagtcattggtatcaattgaagctgaa

SEQ ID NO: 128092 - DNA, 380 bp, Arabidopsis thaliana columbia
ctatcaaaacgaagaaaaagaaaaaggctaggccacttcgcaagtagccacttgcaatagatcaaatcaacatacaagttttttttttctctcaaaaatacactcatgatcaacacacttgtacttcttctccaagttatgccatacaaatagcaattcaccgataatcacaagtccttgtttttaattattatatcaatcttacatagctgcaacggaagaggtagtactaatgggttgagaagacttggtattgccaatgccattgcagacattaaagccgtaccaaacagagttaggcaagaaaaggttgtagtagaaagtgactgatctgatggatgagccgtaaatcttaacattctctggtttccagccgtcgg

SEQ ID NO: 128093 - DNA, 220 bp, Arabidopsis thaliana columbia
attccatagaaatacaacactctgaatgcaatcaagtaatcatgattgtttcgttttagatctcttccgctttcccctgttgagctagggtttcgtaaagcggagcgtttcaagtttctagagccagagactcacgatgccgctcagcactgatgcaacaccaaacacgatgaacgacatcattgcgctttcccttcctaacgcaactagcagtggtgct

SEQ ID NO: 128094 - DNA, 260 bp, Arabidopsis thaliana columbia
cttttattttttcccatggaatccgagaagatttaagtgggaattcatcctccgattcatatattttgctcaccggacacttcagatcgagctactgcaatttgaggatcgtgtttctttatgtttcaattcacggcgtatttatctcgtcagaagaaaaatggatactttcacggctgaggatctgtcggcgatcggcggaatagctacagaatcggtccttcactcttgcattccgacgcattggctacctttcatcc

SEQ ID NO: 128095 - DNA, 402 bp, Arabidopsis thaliana columbia
  unsure (1)..(402): unsure at all n locations
aacaaacaaacttacacttcaccacatattttggttatcatactccataaaaaaattcattgcaaatacaaaacttcatatagttatatattacataaccctgatcaaacatcaggtgatgtgtttcaaacttccgttttgtgaaatatttccccttgggtggcagatttgatgatcctcaagtgcttccaccatatcatcacatagtcgattaggatcttgaatcgttgttgtgtcaacagctagaattgatgacaatcttgtctacgtagcttataaaatggatattgagagcttgtgctccaactaatgcacttcctgcgatatatgaaatcgnatggtgaaaaaaacttatttcttcatcgggacctttcacatttgaaaatgccaatgatgtgtgac

SEQ ID NO: 128096 - DNA, 378 bp, Arabidopsis thaliana columbia
atatgagaaaatagaccattcaaaagtaataggggataactagagaattcatcgggtatatcgccagaaaaagaaaaaaaaaatcggttattgaagcaaagaacttcaaatagtgtttatatgtacaaaccaaaagtaatgctctggttttttttccaagtgaatgaacaaatgtcaccaactcacctgtcactcacacccctgagagccaccggaaaagctcacttatctcttctccggcatgattcgcttctaaatccatcaccgtcaattcctcactccgacgactactcccagtaaaaaatcctaccagagcttttaaacgacattgcacgcgacgatatacctcgtgagagtctgtcaacgtaatcccttgag

SEQ ID NO: 128097 - DNA, 231 bp, Arabidopsis thaliana columbia
aaagcaaacccccattccataaaaagggaacttttgcttgaacaaggcccctaaagggctaaaattaactaagggaccccggggggtgcccggaagggggccacccttgggaaaaaactaaaaaagggctaaagggaaatgggtcccagactccagaaaaccaaaccccttaaaaagctccccctccccccttggggggtttggtgaaaaaaaacttggggatgtggggga

SEQ ID NO: 128098 - DNA, 427 bp, Arabidopsis thaliana columbia
agaaaaacatagacttggatcaaagggtatgcaaatgcattattcttaatcttacagaacaatcataaatccatgattcagatttgtaaaaagcatcagttacaagcctctacaatagaggtggttcataggaatttttgttttcctttttgactacttagagaatagcacaactattgagttttaccttctcagcttcaggagaaaaaattgccttcacctcctcgaagacagcttcaatgggctttgcagcattaatcttcctaactttccccttagcttcgtagtaatgaatcactggtaagctagattcaagaaacaccttaaagcgcttccttatagtctcaatattgtcatcctctctcccctggtttcggcccaacaggcgcttctccatctcttcctcaggacaatcgaagaataagac

SEQ ID NO: 128099 - DNA, 167 bp, Arabidopsis thaliana columbia
gaattaggaaaaaaataacgatccaaatgatctgaattttatacagacttcaatggtactagaatgtcttgatttaaaacagatcaaaaaaaaaaaacccgaaattcatcgtcgagtttcgggaaaaattacaagagataaatgagagctttagaaacccataatgg

SEQ ID NO: 128100 - DNA, 132 bp, Arabidopsis thaliana columbia
caaggaagagattcatagctgggaacttgggttaaattgggaacacgggtgggactttcaggtgcacacagttggaactggggtactaacagacatggattgggtcaccatgaaggcatacctgaacgtgga

SEQ ID NO: 128101 - DNA, 118 bp, Arabidopsis thaliana columbia
ttcatttgtccgctgttgtgctttttctgcttaagcatgctctagtcgactactcgagatctagaacaaggaaacaacaatctgaatagacatggctggcaaaggtgagaaaggactc

SEQ ID NO: 128102 - DNA, 174 bp, Arabidopsis thaliana columbia
tttattttgggaacaatgtcttaaggaaaacaaagagggttacctgtgtggaattaaataagcgatgaacgcaaaaggcactgcgaaaaaaagggacataggataaggctacagagacgatattaaacgaaattgacagcttgcccaacatgttataagaaatagtcaaagaat

SEQ ID NO: 128103 - DNA, 384 bp, Arabidopsis thaliana columbia
gaagttaatgttaaattagattcaaaaagtaaacaaacatttgtacatcaagtgcaacttatacttagagagtagaaagaaaagttataaagagatttgaaagcttaagatcttgattgaaaccataattggagagccttctcatatcgatagtctccacttgcggggatggttgatatttgatttcttatttgcttgtcaagccatcggattaattgagctgctgtatttggacgttccccatgtcttctaccatttctctcatgccatatggtgtgaatggctgcttggaagatataacgtgctagaaaactcttttactgtcccgccaagaagtactgagagaggttactaaagaggaccaacttgttgagaacttcgcct

SEQ ID NO: 128104 - DNA, 449 bp, Arabidopsis thaliana columbia
aaaaaaaaaactcaaatttccaagtcattaaataacaaagcgatatacatttttcgattgaaaaacgagagtttaacaattgaatatgcatcttacaagtgatcatctatcgccatatttcggggaaacaaaaattttgatttcaatctgacctcaaaactcccaaaaaaaataaaaataaacaaatcatttcattaatttatttattgcttcaaaagcggctcacggctctcttcccactggtccaatctgctcgaagctttctcaacctctttgtcccaatcagttcgtaaagtgacaatcactaagattattgtttgcattaaagtaccaccaatcatcccagtccatattcccttagctcccatatcataagtgaagccaagaacgaatcccactggaatccccacaacgtagtaacatccaatgtttacgtacgcaacaaatgc

SEQ ID NO: 128105 - DNA, 297 bp, Arabidopsis thaliana columbia
aggtggaaccatattacaattgggcgggtaagaaaaatacaaggggctttatagaatgtacccaagacaaaagagcttaacacattatgcttcattatctccatatggttataacctgatagttaaaaaaataagctcaaattaataatatgtaactactttttcttggagagacccatattcattttaaaaattatgaaaaaggaccctctctgcctcagttcaagggttagctcttgagtttcctccgaggcttaaaatcaaccaccaccacacttatgttgtctttgcttcctt

SEQ ID NO: 128106 - DNA, 127 bp, Arabidopsis thaliana columbia
gagatgggcggagacggaaaagatatcaccttgtccgaggtttcttagcacagtaacgccaaggattgttggatcgacatcgacggtaaggattatgatgagacaaagctcttggatgatcatactg

SEQ ID NO: 128107 - DNA, 143 bp, Arabidopsis thaliana columbia
gacccacgcgaccgggaacagctgaaactccccagatcattaagggctatcgaaaatggaagatgatggagacaacagaaaccaaccaaaatatagagctaaaactccagaactggatccagaaagacgctgaaccgatgaga

SEQ ID NO: 128108 - DNA, 161 bp, Arabidopsis thaliana columbia
gttgaggaagcaaggcaaagtaggcaaaaactccctccaaaaaaaaaccaagcggactgagaaaactaagcaaaaagaacgccgatcggaatatagttaaacgccatggatgctctgtctcaggcgaacagggtccgggatctcggtaccgtacaagaaca

SEQ ID NO: 128109 - DNA, 176 bp, Arabidopsis thaliana columbia
gaggtgattatgaaagcgcgtaagcctgcactcgagactaaaaacataacgaaagacattcacgattgcaagcgagacagtgaggctctatacttacagttagggataagagggcacaatgttgaggacactcagattgcttattctctgaatgaagaacaagaagggcggaggag

SEQ ID NO: 128110 - DNA, 435 bp, Arabidopsis thaliana columbia
ctgttcatcagctcctatgttatccaagttcttatcttctgttgaaactccattatttacttgagcctcttgatgcctctccttcgtggaatttccatcactttcattagcatctacctttggcttaacatcttctttattctccaaactattatctttagtcgagtctccgatgctctctccttgaatatttacattttcaccttttgttgtttctttgttcatataaacttcattacttctttgactctcttctcgcttttcttccttagaactttcattatttgtcttggcctctactgatgcattgccctttaattcttcattacctaccttgttctccaagttttcacccttcattgattcttcattacctgccttgttctccaagttttcacccttcactgattctccattggtttcgggagtctcttc

SEQ ID NO: 128111 - DNA, 228 bp, Arabidopsis thaliana columbia
attggggtgttttttttttttttttttggggggggaattaggatatcacacgaccaaagtatctgaaaagcattggaaaattaagcaaaggagcttcttcaagcttgttttagttaaaacaagaaggggctaaatacaagaataggcacaaattccccttaccaaaagagggcccaaaagatttggggttgaactcaggctgctgtcctcagggggggggacaccaaa

SEQ ID NO: 128112 - DNA, 126 bp, Arabidopsis thaliana columbia
aaagacaaaagcattagagggagagtaaacaacaatgctctttacgaagattcatcattcttgcaaaacacactatcgcatgtgatcagatattaaaagattccaacgttgcaaagggaactgacc

SEQ ID NO: 128113 - DNA, 246 bp, Arabidopsis thaliana columbia
ggattacagggggtttttaaattcactaaaacaacggaatttacccaaatatactgaattggtgagtactgaatcggcgacacatttgaacacgaatatacttattagcttatgggattgcaagccctaaaccatggcaactttggggaattaagaaatatacaacttagcttggccgtcaataaagagactaatgaactttttaccgtaaacagtttttttttcgatcaggaactgtgcaagctt

SEQ ID NO: 128114 - DNA, 447 bp, Arabidopsis thaliana columbia
attctacgaagtgcaattggaaactaaacatttatagcaaaaatagtttcaaaatttttgtgacgaattgtgtcagcgttatactgtagtttctcagtaatacaatggattcttcgcctcaacgaacaatgttaagtcaagaaatatccaaacccaataacttgtacttgacccgacacacccgagggatcatcacaggagaactatgcttctgatctcggtttgttaagtttggtttgggagttacccgttcttgaattatgtctaaaagcttgtcttcctttcttgggtgcttctgactcaaccaactccttgagcttctctagagcgggtgtgtaagtggcacgaatggaatctaatgaagtaggcgggatcggatagataggacatgaatcactcccaactttctccaggagcttcgagaaacgccttacctcatgattactc

SEQ ID NO: 128115 - DNA, 390 bp, Arabidopsis thaliana columbia
cacaatgagaaaatggtaaattatgcaaactgaatccagttacatttttcaagaccattcgcattcgcattggctaatagaaagaagaagacaaaaacatagattcaaagagcatatacgtataaaactcattacctatgaattccatattgatgatcctcttcatcatcttcatcttcgtcttcatacatagacttcataaatggctcatgagcatcacgagtcatcttagcatcaccaccagcggattctagattgttacctgtaacaccggcgaccgctcccataacggttgttgcggcggctgctgtgactgcagcttgtcttttagtggcagagtattgttgaatgactaataccgaagcatgcattgtgaaattcgacgaagct

SEQ ID NO: 128116 - DNA, 216 bp, Arabidopsis thaliana columbia
aagaaaagatttatatagtttcttaaaggaacaccaagcgaattacttgtgcatagtacaaagttacaaacattaacgtaccttaaaagcgaatcttcacatcatcttctttttatatgaagcaccttgtgattatcttagctaaaatattaatcataaaaaggatgcatcgtcctaggaaatgcctaacgaatttggcaagccaaaatattttta

SEQ ID NO: 128117 - DNA, 407 bp, Arabidopsis thaliana columbia
actagttggcttataacggggtgagaaattcaatgttgcatttgcatttgatccgaatatacataatttatatttataatatatatgggctaatgacaggcttattaagtagattcaattgggctgatgaggtgaatcaaacggcgtcgtcttggcgtaggaagtgaacaaatttagaacgtatagaagatgggatgcgaacaggacggtacttgttgtcgagccacacagctattccttttgcctccaatataggctcttgatttggaagtttaaagatgaaatgatcgaagtaaatacgcgcagcagatgtccccgatatcctcgctttcaccacgaatttgtctccgctgtaaaggtgaaaggaacttcattgtcaactctgaaattgctaaggcttccccaga

SEQ ID NO: 128118 - DNA, 126 bp, Arabidopsis thaliana columbia
ggtggggctttattccattaaccggagcaccaacatgaaaagattacccttagtttttctgccttaaacaacgggagtgatctttctttattgggtaagcgacgacaccttttttttcatgatcta

SEQ ID NO: 128119 - DNA, 437 bp, Arabidopsis thaliana columbia
atatatatgaagaaagttggtagagagggagagataactcatcacagtcaaaggcacattacaaattacatatggggtagatatatattatatacgatgataataatgatgatgatgatggatggtcatgatgatgatgatgatgatgccattggttcatacagagctagtttcggagaggccaaattcaagtccccaaagctcaaaagcacccttgacgaagtcatagtagcctcccttcaaagcaagtgttcccttcacaagtccttctctcacaaatggatatgtcaataggtttgctagtgaaacattcaccgcctcctgcatttatcaatacatttatattgttatatatgatcagctcatcgatcaacatgtgtttgtataccctttcacatcggccacattgatcttaaaggctgaatctccaagttctg

SEQ ID NO: 128120 - DNA, 340 bp, Arabidopsis thaliana columbia
gaatcgggaaaaatgtttgagattcagctgtatatataaagttgtatcaagaaacaagtccatgaatccattaaagagtcttgtgaaactttcttgagtgcaaattgcaaactagcttgcaatttttccaaaacatctttagaaagataaagaatctgacactttctctggtttttattttaagaagggtgtatcttctctctgttcagttattgaaatataggaagatcaggcttagctggctcgggaccagcacttgtttctccaacagatacaatagtcttactactgcttgaagaagctccttgatcaatctctttcgtcatctttatgaaataac

SEQ ID NO: 128121 - DNA, 323 bp, Arabidopsis thaliana columbia
aaactactgcgaaaaatatgataagccttaggtttcaaccaagcaccaccgccggtgttttatcggcgtcagtgagccgcgccggttttatcaagcggtgcggttcgactaaaccgagaagggtgggccggattgttacaatggcgacggcggccagtactttcgatcaccgctatgacgattatatcaccactcccaacactgtcggagactgtcactcgtttgacagatggtgtcactgacactggagcagaagaatgttccttatgacatgaaaattgtggatttgagtcacaaaccagaatggttcttgaagattagtc

SEQ ID NO: 128122 - DNA, 448 bp, Arabidopsis thaliana columbia
aaccaaaagcattgaacatcttgtgttccaggccgtaaatctatgagtaatgtagtagttgtttaatatgaaatccttgggatactgttcgacgttgttagtgttctcaccttaaatattgaacactcgtatcatgatgaaagaaaatatcaacctatttcctaacttcatatgtcttgcaggatgacatgagctgttcatgatgatgttatctttgactggtgaaacacttcagttcctacagaaatttctcgaggccataaaccagattcttgaggcgtaccacctttctgattgctaggagtaggccgggcattagggaccttacgtcaattatgtcatgtttaacagtgtaaacgtctcctggacttgagaagtagacttgtgtactagatggtagtcctggtagaaccatactgtgaacacgaaccccgtcttctccgattac

SEQ ID NO: 128123 - DNA, 358 bp, Arabidopsis thaliana columbia
gatggggaacaaacaataaatcaagaagaatccattttatatacaaccacaaatataaaaaaccaacatttacttactacacaagaatctatactatagaaccctgtaaaaatgaatctaaactttactttcctaaaagctttatctacatattcacacaatgtactatggttatttacaaatagaggtaacacctctttcaagttttaagatcttatcaacccgaaattgacgaaagatctcgacttgaaaaccccgaaaagaaaccctgttggtgaatcttgaggactcggtttcgcgtctgtgtttccgcctttcacttgaagtttcgtctgaccgatgacttgtctaatggatt

SEQ ID NO: 128124 - DNA, 403 bp, Arabidopsis thaliana columbia
catagcacgagccatgaaaggtaatgaaagaagaccagaattgggtacatcatcatcttccatagttttcagtgtcttctccctggctttcgctatcaatttagaaggagtatcctgatctgaaccacaactcaactcttcctcatcgtcgctctcatcactactacttccatcgttcgtggagttcatctttctggacaaagtagcattaatctgaagttgttcagatatagctgccctagttccatcatatctctcagtcagtccacggcttaacatgcgtttggcccattttcctgtgtttttgtgcttcaaagtcatccgttcctctactcgtctagtctcctgcttaatagcctcttctttagccatttctgggtccattaatgctcccatcgctgat

SEQ ID NO: 128125 - DNA, 493 bp, Arabidopsis thaliana columbia
tcgggcaaaaaaaaaaaaaagcagaggcagccatgggagaaaagagaaaatctacttcgaaaaccctagctaagaacaagaagaggaaaggtcctcatttgcctaattcaatcctgaagactattgccaatgagaaacgtcctttgaactctgacgaagatgacgatgagatcgattccgacgatgaaaacgtcgatttgtatgagtatgaagaaggtgtgcctgaggaagagtctaagaaaaacaatcgctatgaccgcgtcgataactacgactacgagcttcccgaggatttcgaggatgaaaatgtggagtcagatgatgatgaagatggtggaaacagcgagaatgaggaaggtgaaggtgatgacgatagacacacacggatgttgcaaggtctcactggaatgccaagtgctgcctttcaagaagagagtaagaagagacctgtactctatactgaagcgtatccagagtctgaattcaatcctac

SEQ ID NO: 128126 - DNA, 199 bp, Arabidopsis thaliana columbia
aaaagcaccataggacatgccatggaatggaagaacaaaatattctaaaattaaattacctgatcacaatggcctgatcaaattcaaaacacacgttttgtttgttttaataactcaaactgatcacactttgggtgggaggggtctttaagttcatcttcatggccaggtccttttagttgccgaactggtccatgaa

SEQ ID NO: 128127 - DNA, 271 bp, Arabidopsis thaliana columbia
ggaaattggcgtttcatcattcatgcctgccatattatagttataggccacaagtaaccatattccttcacaatgcgactgatctacagtaaaaaggcgctactactacactactctaaaacaaacccacataatctatcaattgacgtcaaggagaagaagatccgaagaagtcaaccaaataagatgctaaagaataaccgtatgaatatgtcttttgttgagatgttcaaacatggctgccctgagtttacaatatcctttcctgaag

SEQ ID NO: 128128 - DNA, 402 bp, Arabidopsis thaliana columbia
gtaatatatatttatgtacatgaacaataacccatgatggtgttacagagttgctagaatcaaagtgtgaaataatgtcaaattgttcatctgttggatattttccaccaagaaccaaaagaatattcaagttccctgaacttctggcaacattcatgttatatgtatcttcctaattcttcctttaaccttttgtaactcgaattacacagcaagttagtttcaggtctagagataagagaacactgagtgggcgtgtaaggtgcattctcctagtcagctccattgcatccaacatttgtgaatgacacaagttaacaatcctttgcaccatttctgggtgcatacatggaaacttcttcgattgaaacttcccacatgtgcaggtgcgttcgctgtcac

SEQ ID NO: 128129 - DNA, 359 bp, Arabidopsis thaliana columbia
gaaaaaaaaattaggtttggctttctaattggaaaccagttacgatggtcgaaacaagaattccagtgtgcaagactcacttattcagacgggtgatatgatgcactcgcgtcaaatccaaatgtttaaggttaaaatcggttatatatataacctcgtttttaaaatattaaacaataaacatgcatatatatgttattgtttctgtagcacggcatacatcaatagaatgacgattgagaaatttagtttcatcagtacgtaataattagtacttagcaaaaaaaagaagtggataaatatctttaatttatggaatttcaatggttgtagagcaaatttttccattatcgcatgca

SEQ ID NO: 128130 - DNA, 373 bp, Arabidopsis thaliana columbia
acgagacgggagaaatatataaaggtgcaacaaacataatagaaaggtacattaatattaaaactcaattgtggagaaactgatactctcacaaattatatgaccagagataaaccctaaaccatggaacttatcataatcacaagaaccaagcctagagaaatcactcccggagcaacggaaccggccaaattgcgaacagctgcggcgggccctggagccggcgcaagaacttctgaatgggagggatccactcccggagtaggcgctggcgatgacaaagccttatggaccggaataggcgctggcgataacaaagccttacggaccggagacgctgagggggaaggggaaggagagggatgaccaggag

SEQ ID NO: 128131 - DNA, 143 bp, Arabidopsis thaliana columbia
ttgccctttttttttttttttacataggagtcacctaaatatgcgaaagtgtatgggtgtaaaacgatggttcgaataatagtggttggtcttaatatctattttcttagctaaaaataaggaagggttaatttattgaatga

SEQ ID NO: 128132 - DNA, 99 bp, Arabidopsis thaliana columbia
acataggagtcaccgaaatatgcggaagtgaatgggtataaaatgatggtttgaataatagtggttggtattaatatctatatacttagcttaaaataa

SEQ ID NO: 128133 - DNA, 351 bp, Arabidopsis thaliana columbia
ccggaaactgggttcttgggattgaacaaatcaaaaccgcttgcattattaagtaggataattcccggttataatacaccccggaaggggccggatatattttgataaacagggaaatgaaccccaaaaaatatcgaagctaagctcatgggggaaatgaccccacctaaaggcccttgttgccatcgcacataatgaaaaacagcttcccaaaaaacttgtttaggggcttgaactccaaaacggggcgttttttgaaaaaatggggggcaaggcctctcttgaggctcaagttctcgtctttgagggtctcaagggttaaaaaaagctgtctgaagacctttttttttt

SEQ ID NO: 128134 - DNA, 463 bp, Arabidopsis thaliana columbia
ataaactacttcaatacatgccatttccatgaagagaaattcataacattttccaactttaatacaatcacaagaggaatttagtagtcaaattcttaaccatttgcagagaaaatgtgctcattacaatctctcgtctaccttaatttagatgaatcagaccttccttgtcctttagaggcttggtagaaacgcatcaaacgacaccgtgtattcatgaaactgcttcacgatctcttcatatttagcggctagttttttaactttagcttctcctgactgtctcacctggttagtcttcgcagtattgtcatcaaccatagctactactgattcaacattcgtttgcctggtttcaagttcacgtcttctggattcaacctccacttttaattcattcaactgtttcgtccaatcatcaaacatgactgctttttctttctctagttgtttcaatgattcg

SEQ ID NO: 128135 - DNA, 512 bp, Arabidopsis thaliana columbia
gtttcttcgaatccagacacaacaaatccgaacctgaccaaaactgaaaactatgtcagcctacgagtacccgaggctctctcgttccgacattatcacggcgctcaaggatgctcaaatcgctagcgttacagagaccgatctcaaaaccccaacttccgactttgtctccgagctttacaccagaattcttatctatctcgacgccctcgacgaagaagagaaagggcaagttgattttgaggctttggagcaattggagaatccagatcatcatgccacttcaatgcaagctatgaagctttattgcaaagtgaaagatatgttagaaatgcttgattgtccattaccaattagtttcaaggatctcttacgccctgaatcatcccgaaccgagtttttcatcagcgcacttttgaactatggtctatacaaagactcgaaaatggatcttataagaccaaaggcagaagagttgggtctccttgatgagcagcgaaagcagtgtgagg

SEQ ID NO: 128136 - DNA, 402 bp, Arabidopsis thaliana columbia
aataaaaattccatttattggatcaatatgaattcaactaagagttttgagttttgacagtaaaaacagaaaataccataccaatctagtctgattaaaattactgttcatgtgagccacacacaatatggcctcaaagattcaaacttacttaaatcatttatagatagatttttctaaagatgaccaaaaccaagcatggtcaagtcaaaagcggaaacggcctttcctaatccgagcccaggcgatggctgcaactgcagctcctccaaaatgagctgaacctgatatgttactgttcccctctgatatccttaaaatgtcttttcctatgagaaagataccaagcaacattgccggaactggaatgaaaaattccaagtatagagtagctcttgggtg

SEQ ID NO: 128137 - DNA, 408 bp, Arabidopsis thaliana columbia
gccttcggctggttggatcctgatggagcggccgtccttttttttttttttttaacaaaacaaaaggattatttaaagaactcagctttgaagttaaatccaaaaacaatggttgcatttgaagtacattaatggtctttgaacaccaaaaagaacattacaaaaaacgaatactaaaagcaggaaacagttgagtcacttagacattcttggttttcttcatcttggaaggtggacatcgacccttcttcctcatcttacgcttacgaaccagacgtttcctgcgtagcctaatctttttggccagcttcatctttagcctgaattccaagagcagtttctctttagcttttttcgattccaacggtagtttatccactggaacaggagcaacaacagtgtttgggt

SEQ ID NO: 128138 - DNA, 155 bp, Arabidopsis thaliana columbia
ataagattaaacttttattagtaggcgtgaatttacaatttaatcaaagaacttttggaactaaagttaacaggaagtgaaaataccattgccgtgttaaaaacatgatgtacagtaactgttgattcataatctaccttcaaacccaactggag

SEQ ID NO: 128139 - DNA, 268 bp, Arabidopsis thaliana columbia
aatatacaacattaaagatataataattaataggaaaatctgagaatttttatggtttttgttatgagtagggttgatccttaaaaatactaaaaccatccgcacacagcaccaacattaaagggaaagataactaaggagaggagttaaaaaagagctgccacaagttaacaccagaggggagtcacagcacacggtcacattttaccattcacctttttttataactagtgaaagtaaggaggaggaggatgagcctggtactgat

SEQ ID NO: 128140 - DNA, 356 bp, Arabidopsis thaliana columbia
ctagtaacaggggggacgacccctaataattgggggctgacccttatatttacgataaacataaactgaaaatagtccgtagcccatacaccgcgtcataaatcctagcatagactgagcacaacactttaaaacttcaacttattttcgttttacatgtacacaaaacacaattgcatagcaatacatttctaagacgatctcaagatcttgaagctgcggattgagctctaacctcaagttcttgtagaaactcagctactttttcgatctccggcgccacattcttcaccgtttcatctgacaataaccggtcggcccatttacaaagagaaggagtttttgattcgtctaaa

SEQ ID NO: 128141 - DNA, 450 bp, Arabidopsis thaliana columbia
gttccattgatctcttaactgtaccacaaacagcgattagtttgatccgcaaaacctaaaactgcaaacacaatataaaccacatgcaacatttgaagtgaatctacacacaatccaccacaccacataacattaactttacttagcatcaaaaatacagagcagacacatgctactgcttcagtttcattttggcattattacattcggatttcgaatgtgtgtgttcgactttcccattttcccaagctctttccatttagacccagaaccagagacactccacaacttgtcaccaggctttgccgaacccaattttggtttcataagaggaagcttgttgttcccttttcccattccgttagccatcaaccaccttgaaccagactgcacctgctgctgctgagtcgtgattccccatggcttcttatctgtctcgctcttcatacc

SEQ ID NO: 128142 - DNA, 185 bp, Arabidopsis thaliana columbia
gggaaaaattccgggaaaaaaatcgaaaaaatttctcacaataaacagattctgttgcaaaagggggctaataagttcacccaaacccatgttcatgagaggttttaaaggttattgccctttttgccttttttccccttttccaagggggggggctaaattgtttttaaagaaaagcaacctgg

SEQ ID NO: 128143 - DNA, 318 bp, Arabidopsis thaliana columbia
acccaaaatggtggaaccttaaagcttcgaaagaaacttggaagaggaaattaaatttaaaacatctaaagtctgataactagaagaaagcttccactttcatggacattgatacatcagcatatagggaaagagagaatgtccaaaaaaattgaaccctaacctccacattcacacatacacagctaaaagtctcacaatttatctcctgctgcttaatctataagaccaatcacgatcgcccctgtccctgtctctattgcaatctctgtccctgtccctatcccagtctttgtctctatccctatccctgttcct

SEQ ID NO: 128144 - DNA, 317 bp, Arabidopsis thaliana columbia
gtaaaaaagacagaagcatagactagaagcaacagaagctgattacaagtacgatccgggtaaaagacaaacaaaataaaataaaaagactaaaaaaaaaaaggcaaaccaaaattaaaaacattaactaagcaaacaaaagatccattgattgatccaaagatcgtacaaactacaaaaacctagaagaaggaaaacattaaataaacaacaacaacaaaagtagattaaaagaaaatctcttacataatctttcaattaatcatatgatcactgattagagagtagttgttggtgttggtggtttcttagcattg

SEQ ID NO: 128145 - DNA, 433 bp, Arabidopsis thaliana columbia
cactgtaatgaattcatacacttattactccctggggctgaagttacaaagattctagattacatacactctcaactaacacatactgagaatttaggaccaagattagcctttacaaaacccaaaaccaacattaaacttacgattaaaatcctattgaacaaaagaaaagggacctaagtagacaaaaggaatttcactgagcaacatcattccactgaagatatcctccgtgaccgccttcatctttaaactcatagacagcaccacatgctttgtagccaccttgaactggatcatcagccagaagaagcggagtgtccaagtcgatgaatctgaagcatccaaggccagcagcaaggtgaccagagaaccccattgctaatctagtctccaccattccccctatcataagctcaatgccagatgatct

SEQ ID NO: 128146 - DNA, 453 bp, Arabidopsis thaliana columbia
caaattaatagctttttagaacaccagaaatagaagaatactctcagtcaaagccaccacaattactcaatgagctacaaaataggaacccttaaaatgtctccaatatcagagcattttagctaaaaaagactacatcccaagacagtgggatactttatactcctaaatcatatttatacaaatcgacaaagatttgttcattttccgaacatagaactgttaactcttgaattccttaagctacttattcttatggagggttttgtctttagttgagattgagtttggtcagatctagcaaattccagtccaagtgggacgaagctgtccttggagctacatttgaaccagcagaatatgacctcaccagcctgttactgttgttagtgctccctaagtatcccaatccagatttcaatctctgagcttccttcttcagtaactgatact

SEQ ID NO: 128147 - DNA, 465 bp, Arabidopsis thaliana columbia
ttcctcttttgtttactgtttggggaaagtgaaagcttgtaaacgaaaggttgtaaactgtggccaaaggtttacttggactccttctgtttcactggaaactgttcatttgaatggtgagagtttgattctgatgcattagtaaattgtaaggaagagaggattgagcaaacatgggagaacaactagatccattttccgcttctaatcttccggatttcatatcttctcaaaaaattggtagaccggttaatttcgaaggacaaactaaccgtgggcatcctttttctggtcttaagaagagaggtcaatctagtcgttcttgggtgaaaattgatcaagatgggaactctgcggttttggagctcgacaaggcgactataatgaagcgttgttccttaccatccagggatttgagactccttgactctttgtttatctatccgtcgagtattttggggcgtg

SEQ ID NO: 128148 - DNA, 358 bp, Arabidopsis thaliana columbia
gataacttgggggtaaaatgttcaaaatattcttccatgcttacagtttcttttttagattgaaaaaaaaacaaatatgttacaagaaaaaaaaaagggaaatagaagtttttatgaaccccatcataagtgatctggttaaaaaaaaaccaaagactttccattggctctgccaaaaaaaaaaaacaactgcaagcggataaaaaatcaataatatttgtattttccctatgacttggggtttaactcaccaccttcaccttattgcatattgaaccgacctaacaatgatatcaacgacggggcttcccctgatccatttgattttatgtctgcacctgaactttccattgatctt

SEQ ID NO: 128149 - DNA, 531 bp, Arabidopsis thaliana columbia
cccatttttccgcggacgcgtggggcaaatactaccgcttcctcttcttctccaaaagtcgtttgttttcacatttctttcgattcccacttgactctccgagaaacctttgcagatcaacaaacccatcttctgattctggaaaccctaacccacccggttccgattcagacaaacgggtcggagaccgattttgatctcgaactcgattctttctcagatgaaagtatcaaaaattgagaatttgaggttgactgagtcttaatcatctcgatcaatgccgctgacacccccgtggatttgtggagaattcatcaatggaggaacccaaaatcgctcgtcgtccaactatttgcttcagaccaataaacccttctgatttagaacgtttggagcaaatccatcgtgacatattcccaatcaggtatgagtctgagttttttcagaatgttgtcaacggaggtgatattgactcttgggctgctgctgatcggagtcgccctgatggtcattctgaggaacttattggat

SEQ ID NO: 128150 - DNA, 371 bp, Arabidopsis thaliana columbia
cgggctaaatttattttgagagtatattgaaatatgataaattgctttcacaacttattacaatgcatcttatcatgatttaacaaatgatacattgatattttggcctaaaaacccaattgatattaagcttattcgataccatgtctatgagaccacacttattgcatattacaagcttcaacgattaaactccaaagtaccatttaaattcattttgacatttttgcggttagctctctaacaaacttagccgcgaccattgccggcatgtcatcagcggtatcacgctgtggattgtactcaacaacatcagcccccaccaaatgtccctgaagggtgtgtaatatgttaaggacgtctcggaaaga

SEQ ID NO: 128151 - DNA, 219 bp, Arabidopsis thaliana columbia
gggaaccaaagacaccttttttaattctaaaaagaggggggggccaacccaaaaatcatcctgggaaaaaccttggggggaagcacaaatttacccgacggggggggagaaacggttttacgcaaagccttggcggacccccgaaaatgggagcagcgatagggggcacacggggagaaaaacggggggccaagggggggggatgcttggattgaaacg

SEQ ID NO: 128152 - DNA, 275 bp, Arabidopsis thaliana columbia
ccaaataaaccacatttgggggggaatgcaaacactttaaatcatacataccaaaaaaagaccacaaggataaatcagaaaagatcgaaaggactctctaaccataaaaatgacagtcaatctcaaccgggtaactatccatacagacgttccatggactggaagctgaaggcttaacggctcgcagagccacccatactgaactggtacacttaaaacctgaccccaaagcaatctgccaaagcctatctccttacttcatccttcctttagct

SEQ ID NO: 128153 - DNA, 118 bp, Arabidopsis thaliana columbia
acgaaatagaccacaaatgggttggattgaaaactctttaaatccatcataggataaaaagtgaacgaaaataaatacgagacgatagattggactattgaaccatacggttaaatat

SEQ ID NO: 128154 - DNA, 170 bp, Arabidopsis thaliana columbia
tgtagaagcgctggtatctccgattgagagtgggagatttgaaattcctttcgttgctaagctgaagttagtggaggagccgtccgacgatgaatctgagttctgtaattatgattgggacgatagctaaactttgtcagatgatcttttactgttagatgaagagtggg

SEQ ID NO: 128155 - DNA, 337 bp, Arabidopsis thaliana columbia
cggacgcgtgctaaaaagcgttttttctatagaagctcgatttgcgggaaaaggttgcatctgcctcagaaaattatctggggagctttcaccaattagctcttattgtctctctctctctcttgggttaatgattctacagatcctctactcctaatttagagacgacaaaacgctataaacaacatctttacagtcatatggccatcatatgtctccgggtactgccgaggttgaggagatgagacctgagacgccggtggataatgataaggcgttcgatatttctgatgatgatcatgatgataagactgaaccggttattgtttctggtgaa

SEQ ID NO: 128156 - DNA, 401 bp, Arabidopsis thaliana columbia
tcttattttttttttttttctcaaattataagggttggtttacaaacaatttcggggttttatctctccgaagagattcagattaatcgacataatatgcttctctgcattgttcttagctcatgagagatctcaagcaccaattgttgctgaatcttttccacaatatcagacacaacaccttcagattcaccaccaaaatccaaccaaagacatggctttattagatcagtttcaatgatctgatccaatgatcttgtaggagagtcagagcagagtaaacttcaaacaaaatgtcttatcgcctcgtgaatcagatcatcttctctaagggatgattctagattgaggactcttgagctcttcgatggcgagaaaggccaaaacttgatgtcttgacg

SEQ ID NO: 128157 - DNA, 346 bp, Arabidopsis thaliana columbia
gggagagaatatcctcaaattattttgcctcttcactcactcacgatctctacattttgcaccccaacaaatatttgacgacaatcacaaaagaatgtataaaaaagaaacaacacagttaaatgtacaacaactcaaacaacactttcagctaatattattcaggatcaaaagaaaccccaaaacaaatgctgaaatttacattgaacattcacattacgtggttaaagtgtcaggaagagccatggaatgagctccaatgatcttaccaccaacatttgggaaggcctcgtaatcaggaagagggcttactttaccatcaacgtttacttgtagaggatacttt

SEQ ID NO: 128158 - DNA, 349 bp, Arabidopsis thaliana columbia
ttctttttttttttttttttttttttttttttttttttttttttttaaccaatgcaaactttattcaataataatacattggattgttacatgggacatgtgcatataaataaatttaacaatgtaatagggatgacaaacttttacaagacctatttatctttaagaacaagtactagaccgttttgtaagctagctatatttttttttaattccgaagtgtatgtaatataaagggaatgtaatccaattccaaccaataaattaaaattatttttccttagggacctttatcccatattttttctttaagcatagctgcacatcccataggcgcacgatctccctt

SEQ ID NO: 128159 - DNA, 256 bp, Arabidopsis thaliana columbia
tattttgatcagatccaagaaaccaaaagagtaaaacaaacacagagaagcttcttcttaaacgatgccgtactataccagagatgacaacgacgtcgacgatttcgatgagtttgatccaacgccgtacagtggtggttacgacatcacggtgatctacggccgtccgattccaccttccgatgagacttgttatcctctctcatctggtgtcgatgatgatttcgaatacgagagacctgaatttactcagatc

SEQ ID NO: 128160 - DNA, 284 bp, Arabidopsis thaliana columbia
gtgaagacccaaaactcatcattagctttaagcacttgaaggaagctttcgctccttagtaatggaaacaaatagatcccattgtgatgtttgggggatccctggtcttaggacattggggagtttttggccccatgcgggggagagagagaactttgaaatgcaaaagtctgacccaagttctttccttttcaaccctaaagataacctttgaccaagatcgatatacttgccatcaaaaaatcctgacccggaaaaaaagaatcatgggattgtatttcaat

SEQ ID NO: 128161 - DNA, 271 bp, Arabidopsis thaliana columbia
  unsure (1)..(271): unsure at all n locations
tttnttttttttttttttttttttgtaaaatattttccagaattactgtaattgtaactacaatgcttctgttactctctatggaaatgtctttttaacacttcaactcaggatttttacatggatgattatgaatcttatgctaaggctaaggccaaccactccatttctggtcttcgtctgggcgacaccactcagcatctacttgcttctttttgccattttcttgttgagtcgtgagagagccataagtctccccaaaaggatttct

SEQ ID NO: 128162 - DNA, 454 bp, Arabidopsis thaliana columbia
ggatatcaaatacataaaattaaattattcacctaaccatttaccagtaatttgattcaacaatgtaattaaccgttaattaatctttctcacaagctcctcaagaacaactcttaagagctcacatttctctatttccagacctctttattcatagatcatttaatttctccggtgtaatctttttcttcagtgtgttgtgtgaatcataggcccaagaggacgtagtacaaaatagttactggtaaagatactatcatcccaaagataacgaatgtactgagtagggtctggatgcaaattgtactccctcgcaaacacaaatggtactatcccttgcggtagagcagcctgtacgatagcagcatgtaacctagaacctcttaatccgacaagaagggaagcaccagccatgaaaagaggacctgagatgaacctgatcaacatccccatt

SEQ ID NO: 128163 - DNA, 436 bp, Arabidopsis thaliana columbia
ttctttttttttttttttttttttttttttaggcaaagaaattcatatactattccagctaaggcagattcagcaaatacatatcattgtttcagcttggttacaacagaatttataaggaatcttaagatactatattttagaaaagacatatagtttggttgaagttggcaccttcatgccacagcaggcatatccttgagccatgaatcaagcggtttaccaatggagtagacgatgaaaccgatctcacgcagcttcactgcatcaacaacattcctaccatcgaacacaaaagctggtttctgcatattgtcaaagattttcttgaagtccaaggatttaaactcatcccattcggttaagacacataggccgtgcgcatctttagttgcctcgtaagcatctgagacgacattcacttgctctgagatac

SEQ ID NO: 128164 - DNA, 522 bp, Arabidopsis thaliana columbia
aataaggaagacacttttcttaatgatccaagtatatatcagaacaaaaggacaacaatttacttttttactttttaaggataaatggttacgaatcagccaagaagtgaattaattcatgagattcagatttggataagtttttcatccacataaatggaaaaagcagatttagctccaaggatcatcccaaccactgggtccttctcttttgacaaaaccaatgatggcttgaacagcttcatgaactctattggagagagaatgattcccatgctctatctccactttctctgctcctcccattgctttacttaatctattgaccaatgcttttttgtcgacataatctggtacatactcatcacccatggagaaaatcacctgcaaggtgtgttagccatatggccaagtctagttttaactgatcatcactaaggtcagaactaaacatatcgtcatctcccatgtaagcgcagagggagtgatatctataagcagagattggagcacaggatcagc

SEQ ID NO: 128165 - DNA, 477 bp, Arabidopsis thaliana columbia
gtcagtttttcaaaatgcttgacagcttacatgcaccggggggtttattaaaagatataccgagtcccaacctgaaacatctaactctgctgaacaaagaacacaaaccggcaactaaaagcatagactcacaggatgaaaagttagaccaaggcattaaagtcatgaagattcaaactgtccactcaagcaagacatgcatcctcgaatattacaagttctatgagaatcttcaaaagatcatccaagaacggaaaagcaaacacctgcagatcaaaaaacagacattgttggacaatgcagacaaaggtgtaatgtcaaaaattaatcttgtgaaacctcaagagtctactacagcctcagaagatgcagcagcactaggagttgcggctgaagtgactaaagaatcgaaagtggtgaaagagaccaagttacctgtatagaaaaatgctgaagctactgcctgctgaaccaacc

SEQ ID NO: 128166 - DNA, 505 bp, Arabidopsis thaliana columbia
gttctgttctttttatttttttaaagaatggcttcaatttctgcaactttgccttcgccattgttactcacacagagaaaatccaatctcacatcgattcaaaaactcccattttctctaactcgaggtacgaatgatctttctccattatctcttactcgaaaccctagcagcatcagtctgatggtgaaagctagtggagaaagctcagattcatcgactgatctcgacgttgttagtacgattcagaatgtttgggataagtctgaagataggttaggtcttattggtttgggttttgctggtattgtagctctttgggcatcattgaatctcatcacggcaatcgacaaattgcccgttatctcgagcggattcgaactagttggtatcttgttctccacggtaagtaataaggcttggtatcatctcaataagtataaatgttatgatccctgattcttctagcatttgatatctccatttctgcagtggttcacatatc

SEQ ID NO: 128167 - DNA, 164 bp, Arabidopsis thaliana columbia
tgttctcactgacgcgtggggaaacatgtaggagtagttaaaagaataaatgcaaaaaataccacgccatagatggttgctataaaacagagactaaaaaggctgttcaaacaagaaaataaataattgcacatgaacactaaaccagaacgataacaggaaac

SEQ ID NO: 128168 - DNA, 248 bp, Arabidopsis thaliana columbia
aaaaacaaggaacacctcacccattggcaacatgactctacaggggaaaaacaagaccaaaactctcatcaaagagacaaaacgaacataatgaacggtgagctaatcaataacaagagccaagccccactaccgggcatccctgctagaccagttcccaaaccaaacacaactgcaaaaaccgcaataatgccaaaccctagacatacggggaaaaccggcaagcaatttcttctccatccactcaa

SEQ ID NO: 128169 - DNA, 241 bp, Arabidopsis thaliana columbia
ctcggcctttctttttttctcccaatttctcggccggaggtacaaccacgccttactttggaaggtcaggtacaccgtgtatcatcaacacctactgacttctagaacttaacatcaccttacgttcaactgctgatgatctatatactatattcgcatagaatggtaaggacgatgatgtgtatatccccacagaccgaatgactggtgatccacgaggttttgcgtttgttcagcataa

SEQ ID NO: 128170 - DNA, 269 bp, Arabidopsis thaliana columbia
gggaaaaaacatgatttgccttttggacaactggttttcaaacccccagggcccttggattttaaaagggccacccagaaaaaaggacccaggttttaacgaaaatttagatttgagaagacatcatcatttgcaagtccaagtcccaaaccttttagctcaaaaagagtcttttcacgttccacattccattttatttactcccccactgtttgggaccagaaacccatttaggacacttggggctgaaggcactttcaacaaccctt

SEQ ID NO: 128171 - DNA, 368 bp, Arabidopsis thaliana columbia
caccccaaaaacagatttataaaaattgggactttcatagaaccagaaccaagttccacgaaacttgttacaggtacctactttaaaactcaaaggaacagggagaatctaacttagacacaacaaagaccaaacctttaaactttcaaagggcattttcacccctaaaatactttccaatatcaggctggtgaagcacaacaataccctttggatccaatttcctacaatcctgggtactctttggaggaatcccaaaccctaacgggacatcagacattgagaacacaacaaccccatttgcaggaacaatactatgaggaatcctccctaatccacctttaaagacatgggtcccataaagaaac

SEQ ID NO: 128172 - DNA, 212 bp, Arabidopsis thaliana columbia
ttcctttttttttttttttttttggggcagcagagtttgattttataacggaggggggcaacccctacatatgctggatctttcttatgacttatgagatcaaattacagaagaaaacgtcaattgctcacacatggactaatgtagggcgccttaaatattggtgagaacagcaacaacctttctagttaccaccataagcagttctcctc

SEQ ID NO: 128173 - DNA, 171 bp, Arabidopsis thaliana columbia
gggggggcccaactcaaacttgtatttgattgaagaaaaagattttgaagccaagatccaaattttgttggtgcatgcaaaaaattttattctacagagagggcttcaaagacttgacgatgttttcttcaatacaggcttaatccaaagaactggctgacaataattgcc

SEQ ID NO: 128174 - DNA, 356 bp, Arabidopsis thaliana columbia
aactcaggatctgacatcatggaagctggagatgacttagatccttcaatccggttagcaatcacccaataacacatagtccctagtgttgaaaccatgatcaaagctccaatggcggttactccaaccgccaaaggcttctctttctctcccacgacaacaaaagacagtgatacgaacgctactgagatcataatgcaagccatccacatgagcttgttgattatagccatcatttgcttctttgctctcctctctataaccaccactgatgtctgaaccacaaccaccgctaaagagatgaaaagcgcgaaagaatcaaacacgacgaatatcaagaactcgggtcttggagc

SEQ ID NO: 128175 - DNA, 377 bp, Arabidopsis thaliana columbia
gggaaaggctgcagattgcaatggcttgacattgtttctatccaatgaacaagattcttttgtttctacagggatccatgacataacaagctgaaaaggagaggcaccttataacttgcagtcatataatggccaaaagagtactcagggtataacaatctagcggcgtttgcaattggttgaaccagtcaaggaaagtttggggatgtgtctccagaccatggatcagagaagatgctgagactgctcagaagttgacctgagaatatgaggtttgctgaccacgaatagaccccccgaatcttgaaaatagtgagccaaaacagctctgtatactgtgaggtacagtggcccagtaatccatattcgggattaca

SEQ ID NO: 128176 - DNA, 418 bp, Arabidopsis thaliana columbia
gcataaccaaacagctttgattgagaaactataatttcatgattttccaaaaataggaaaacatgaagaatatcaaagttagcctaaaatgttaccaatgtttgcataagcagaagataggtcttacaaaaggaagaataagtctcatacatgtaaccaaagataatacaacagttcctacttcatgaccccttgggtcttgaatcttgatttaccagttgagtcaatcaacgaccatgttctttggcttctcttcttctttggcttcttccatttttacatcaacacttccactagcttcagcaatgttctcctctccctccaccacattcagatcgacgacgccacctcttaacggttttgtttcttcggccgtgtccttcatctcaacattgtttaggtctggcttggtgtcgtc

SEQ ID NO: 128177 - DNA, 317 bp, Arabidopsis thaliana columbia
cctctgggaatcctcgtaattaactttaatctcaagattcccaaaccttccaaagtaccaaaacccaaaacacgtgaaacaacaacgcgttacaagctctaacaaatactaatagggaaagaaatccaaatcttaaatttctgctgccggggattttaaatacgccctttaatccagttggcaacgacttttccagatttcttaccttacctagtccgggtacccgtaaaaaactaaaaaacccaatttagaccagcccagtgtcagaccccccccccatttaaaatacccatatctctcacttcttcttcttcttc

SEQ ID NO: 128178 - DNA, 381 bp, Arabidopsis thaliana columbia
ttctttttttttttttttttttttttttttttttttttaagaagaagcaactgattccttcttatatcaaccaagtcataaaacaaatcatacaaatcagggaaccacagaagaagaaaaaaaactaaagctggagatcatcagacttatagcacaaactcaaacacaaacctttcccaatttaccaacacaaagaatctggttcccaatcctaaactttgaaacaagccattgaaaaaacaatctatgcaaaagacagaaaatctatgaggcagtctctaaataagaaacagattctcccacgcacctagattttaagaaaagaacctctgcatccctgggtcaggagagcccatgctgcagtcagcggttagggaaaga

SEQ ID NO: 128179 - DNA, 268 bp, Arabidopsis thaliana columbia
aacctaataatgcaatctcaacaccgatacttcatttttagggaatgcaaaacacaaccccaatacaacaaaaattattctttctttttttataaaaaatttcttaaaagatttctttaaattaacttaattggatggtcactttctctcttcatctcttggggagatagtaatcgattgtacagcaggtaaatttagagtccacgttttcataccctggtttgtttttttaacctccaattcccagtcagttttgtaaataacataa

SEQ ID NO: 128180 - DNA, 392 bp, Arabidopsis thaliana columbia
gagagaaaaaggatataatggacggcaaacattttgtgtgtgtgcaaacattttctcttctaacaatctcataggaagccagtaaaacagtgtctgacatagcacaaatctttctttgtgatcaaactcaacttcttggagttgctactcgtgcttgtatccagacgccttcccgcttctcccaactatataaggctccggcaaagtattctcactatttatctccaaaccgcgataaactcggttaaggaaatactcaggtcctgattttgcagcggtttgtttagtcaatgagttatgatcattgcctcgcaactgcaatgctttctctgcagcttgtaccaatgtcattgtctctcctgtgtcttcttctccattcttagcttgatcat

SEQ ID NO: 128181 - DNA, 264 bp, Arabidopsis thaliana columbia
gcaaattagattgtgtatatatattaggggggggtttacatagatctacactggcagaaaacagagctgtgcaacagtaaaagattgttaagaagttgacctgatgtcaaattattgaacaggaagtgacctactgtcaaaccgataaatggccgaggaaaaaaacgaaaaaaatgtgcgaagcttgtccgaaagaagagacaagaaacaaaaagaaaaaggacttgaatcatggggaaagaattctcagcatttgggcaagtc

SEQ ID NO: 128182 - DNA, 216 bp, Arabidopsis thaliana columbia
ggatggaactgttttttctatgggtattacttttttatagggttatttgaaaatttacataatacagggttcgaagcaaactgttggggataaatctggctacggagttatgtccacattgtctaaatcagtaaggcaggccctttaactcgaagtagcaatatgcaataataaaatcttatgcagtttaaccaaatttatttacatagactgggt

SEQ ID NO: 128183 - DNA, 329 bp, Arabidopsis thaliana columbia
aacgtatacaaaaggaaacaactctgtctccaagtaatttacacattctcattccaaccaaagaatagtagaatacaaaaaacgaaaagttgacactgcatatacaatagcaacgaacctagttatgtaaggtaagccaaaaaaaagaagagtttgatagaaatttaccttacacaattagttttcatcatcttttagttgtttttttaccggcgtggttcattcatagactttccttcaaacaacttacccaacaatctttcaagatcttcagctgtatactttatgtatttctgaggattcttcccacttttaaccaaaggcccaaa

SEQ ID NO: 128184 - DNA, 276 bp, Arabidopsis thaliana columbia
gtgtacgaaactggttctttcaatagataagggaatatgcaaagaaagaaaagggaaaaagatacaaagatcacttcataacataagggggaagaagtttcattttgggaaatgttcaggggagcagctaatcatagaacgggggcataaatggaatttcccatttccttgccattcctgatataatggaacaaagaaaaaggataacaagaccggtaatacccgagttctcgaccaaatcaaattagccaaattaatcagatttagcagaatcca

SEQ ID NO: 128185 - DNA, 330 bp, Arabidopsis thaliana columbia
ggggaaggtttatattttattgatcactggttgggtgggggaaacattttacttttcgccaagcctccaaattaaacttttttaactcaaacatttcaacatgagaacgtgttaaagcttttaaaaacattttttagggggtattttcataaaaatcaaaaacaaataccgagggtttgggtttggtatacagcaccggtttttctcatagtagaggttcagggggttccatctggttcgcacttttttggcccgactcaattttttgactttccacaaaatcaatcccgagaaggtgccatggccaacacgcatatttagctttgtttg

SEQ ID NO: 128186 - DNA, 217 bp, Arabidopsis thaliana columbia
gcaaaagacaatttctgttggaatcagacgttttttgctggaaacaacacaacttggggttttagtcaaagaacagaagaagaaaaccccttttggaaagaatctactgttgaaagttggtcgttgaacaaacattttaggaaggggtgttagagccatctttttcatttgaatcttcttttttatcccaagaagactccgcagttttttcaaattc

SEQ ID NO: 128187 - DNA, 332 bp, Arabidopsis thaliana columbia
ggcctaaaagggggcttaaaaaaatcttatttggaaaaatcccaaaacccaaaaaggccaaaacaaaggggggggcccccaccaaaaaaacaaaacgtttcaaattttgctaaagcttaagcgggccctactaatacggcccacgttgttttaaccattgggggcccccccccaccctggctgcctgggaagttatccctagggggggacccgtggggcccctttcctcctccctccatttttttttgggggggggtggccccacttttgcctaaaatggaggcccactttttaacacgtgccctttttaatgggcccacgtgctttttttc

SEQ ID NO: 128188 - DNA, 220 bp, Arabidopsis thaliana columbia
gggggactaaaaaaccttttggtgttaaaatttgccagacaccagggggaatgtttttaacaaaagcccccgggggctaaaaacccaagaaaaaatggcggggtccaacgttgtttccaattaatgggtcccgacgaggggaatagggggggacttttaaaccgggggttttaccgctaacccaatgccttgggggggatcgggccgggtgtttctgaaa

SEQ ID NO: 128189 - DNA, 262 bp, Arabidopsis thaliana columbia
gcaaaaaacaatttttgttggaatcaaacgtcttctggtgtaaacaacacaactgggggtttaagtcaacgaacagaagaggaaacccccctttggaaagaatctactgttgaaagttggtcgttgaacaaacatcttaggaaggggggttagagacatcttcttcatttgaattttcttttttatccgaagaagactccgcagttttctaaaattccaccattttctcaagggcctctatgtctccagcttcagcaagagc

SEQ ID NO: 128190 - DNA, 197 bp, Arabidopsis thaliana columbia
ctgttcgcaccactaccttatctccgccagatgaaaccgaaacacatgtctattgccggcgaaccgccgaagaaaaaatcggagactgtcacggcgcccacaccggcagcgaataagaattcgagcgtggaggaggaaacagatgaggaagtacaggaagatatgccgtgagtgcaagagaaggcgttcgacctagg

SEQ ID NO: 128191 - DNA, 311 bp, Arabidopsis thaliana columbia
aagaatagtttttattgcttaatggaagtggagagaaagtatagtagatatgattagtattatagagtagagatattcaaaggtgaatgtggggttttgcttcttacaacttcactacctatatatatacttgttgaagaacccacaagaaatgaccctttgtaaaaggttatcttggccccgaggggtaatcgttttcgataagggaattggaataggggatgagccagtcagtgccagcatgaggataggcttgatagttaaaatcatgtataggcatctcctccttttgccattcttcccatctctca

SEQ ID NO: 128192 - DNA, 316 bp, Arabidopsis thaliana columbia
aaacaaattgtaatttgatttctatactacaataaagaattctacagtttggttaccaatcggctagttttaggaatttactcatttgagtaaaaacaatgggatgcctttatttataaaaatcaatagagattacaaaaggatttaaatgaaaatgcaaagggttggcattttctttcagtatcataaaacatggtttaagttatgtgtcaggggaccaatgttcttcactgtccaaaagtaatcttctaaatcgtaaagccgcctgaaatatttacacccaacaacacaacaattttaaacttggaaggtgaaa

SEQ ID NO: 128193 - DNA, 414 bp, Arabidopsis thaliana columbia
aacataactcatacatgaataacaaaagttataacaacacaaaaccacacccctccctctgtttgtatacccaatgaaagccacaccaaaaaaagaaatgtgaaactaaaaaacagatataaaacttgaaattaaactgttgagttctctgaccccatgagaaacccaaattaatccaaatataccctcctaatcccaatgaaaagaaacaccaacccatgtggtggaccttagaattacacagatgggaaagagaaaaggaaaaagatcaaagtcaggaccatattatgtacatacacatatcatttacctcgagtaaacttaacaagagaccatagtaaaccttgaaccaatcttgaaccctttttgttttttgttgaactacgcgaaggaagatgattgagatggtgagat

SEQ ID NO: 128194 - DNA, 229 bp, Arabidopsis thaliana columbia
ggtggggaaaaacaattggtgcatttgttttcaccaaaacaccctcttttacatttttaatttagggggtagcaattttaaagaaccaacccccaaaaaaaagctttggagaccaaatcgaaatgattgctctagcctaaaggctgagaataattaaaggcaacgcgttgtttccctccgtaggacatttttgtttcgggcatgggactttggtttatcccaccctttt

SEQ ID NO: 128195 - DNA, 372 bp, Arabidopsis thaliana columbia
ttttcttttttttttttttttttttttttattttttttttttttttttgaaacaaatcaaaggacttgttgccatataaacaagtaatagaattgttatctgctacatcttctagagagaattgttagactcaacctttatttttattgaatcataatgggagtatggggacaagtaccttgttgggaggaatttcttctttggtggtctcaatattcacctaggaattatcatctccaaatctatttgaaccaaacaaaagagactattgttatcctccctacacacattacagattttacttgcagcccaagaacctttggaacatccaaatctggcaggtctcaacgaatgttggaaagttctgagctg

SEQ ID NO: 128196 - DNA, 407 bp, Arabidopsis thaliana columbia
  unsure (1)..(407): unsure at all n locations
cataanctgnttgcttaaaagagctgtaagttcaacaattaacaccatgtacttggtaagcaaataaaagagcgataggaaacaagaatccagaatactaatacatcatcgtaaaaatctaaacttgaattaggtaaataaaagcttaagcacgttctccacgaattcttctagccaattgaatgtccttaggcatgatcgtaaccctcttggcgtgaatagcgcagagattagtatcctcgaaaagtccaactaggtatgcctcagccgcctcttgaagagctaacaccgcgtgactctgaaacctcagatccgtctgcaaaatttaacctaattagtatacctaattccataacataacctaattgataagttttaatccgccgctaatgagtataaattttacc

SEQ ID NO: 128197 - DNA, 222 bp, Arabidopsis thaliana columbia
ggaaaaaaaaatttggtttctgccaaaggttttggccatggccctttcaaattctatttcctggggttggcccccccccgcttttagtttgcataaaatttaaaatctgacctggacggggaaacccttttgttccaggtaaaagaaatggcccctgacctcggttgatttgggggctgaaatactgttgaagctcattagtcgttggcggggggcttttcg

SEQ ID NO: 128198 - DNA, 258 bp, Arabidopsis thaliana columbia
gactctaaaaaattaactaatagcttgatgacagaatcagaatctcataacacaaaacaaaagagacaggtttgcttgacatagaacgaggaagactaatgtgatgggaattgaagggcaaaaaatatggcttggggaaagagaggatacacatcttgacccgagaacagtgatgactccaacttctccatgtgaggccatatttcgctcgcatattgccttggggacgccgtgagatagccaagtgttgataaacac

SEQ ID NO: 128199 - DNA, 198 bp, Arabidopsis thaliana columbia
ggggaacaaaggagcctttgttttattcattttatcaagaaaaccgggatcccacaattttatgaaagcctttttgggaaaaaaattgcctagatcaaattgaaatcctttaggggaccccctttccgggaacaccatgctaaaaggggggcttaaaaagcttatacttaaaaaccccaggtccagctttttttttta

SEQ ID NO: 128200 - DNA, 151 bp, Arabidopsis thaliana columbia
cttcaaacttgggttgatagctgaaaacttgcggttttaagagtgttaacaacaaccgcaccttaatagcattttaactttgaactttggaacaacaggggagactgatggatgtgcaaaaaacgactaacaccttgaggctttccttttg

SEQ ID NO: 128201 - DNA, 316 bp, Arabidopsis thaliana columbia
cattagcagagagaaagtggagggagcggtgagggaagtgatggaaggagatttatagggacacaccgggattgaccgaactttgcgcaggatatatctcaaggccttgtggagcagtaattgtgaacaggcccgacgaactgttagaagtctgatatcggtactggggctggcttgtttgaggtcaagaaatttgcgagatgatttcttttttttcattgttgattgcaaaagaacccaatgcactgtactgtactcttaaggggaccaagtgaaagatttcatcaatgaagtggaaaggaaatttacaggatgc

SEQ ID NO: 128202 - DNA, 438 bp, Arabidopsis thaliana columbia
cggccttcctttttttttttcattttagcatttacatggtcaatcatagtcccagggtacactctctaaaacaaatacttgcgcttacaaccaaaatcctactttgcattccctaacaaatctaattttcatacattttcctgacaccaatttagaagaaactcactattgcatcttctgagcaacctctttgtcagccgagcacattggttcttcttaaatccagagtcctttgggcttcatgaccacagaatcctgagtaacatacagcttttctctcatccctgtggcattggatgatcatgcgaatattgttggatctccatccatttcgccatccgaagtatcagcaagccttgcaatggcagcaatgagtgcctgttcatgttccttgagcattttcttggccttgacgagctcgagtggatcaggatgcgt

SEQ ID NO: 128203 - DNA, 227 bp, Arabidopsis thaliana columbia
gggagttaaaaggatgtttaaagccaggtccttggagtgaagttataaaaatgcaacatatggttgaaggtcttatcagattctatctcattaatataaggcacactctaagatcataatcactctctgaaaacccaaaaaaaaaaaaaaaacttgattggtaaaaagccacaaacaatagactcagagcgccctattgttattgttggctttggaggacctggttt

SEQ ID NO: 128204 - DNA, 366 bp, Arabidopsis thaliana columbia
ggggagaatctacagatctgattatgacttagtcgaatacttacaggggtgactcgtaacattacgatccgaaacagagatactgagatcacacgaagaagacgattggactttaatcttaaagattttaagaacgggtactttaccagtgactttaacaaaagtattaagcggaatgacgccagccatgacgtcagataaaagctgcgtttcagagagtaaccgatccgccattagcgtcaacgttatattcaacggtaccgttttccgcgccgggattcggttagccggaagaggagcttcaccgatcacttggcctctgtaattcaacaacgccgacgacgaatcgtagctaaacccgatgcg

SEQ ID NO: 128205 - DNA, 263 bp, Arabidopsis thaliana columbia
caacatatgcttttgaagctgatgggagatcgtcgaggggacgtatcaagtgagggaattaacttgtcatgaaaagtaaatcgacaagctatcaagtaaacttttcatgcaaaagttgtcttaaaaccgcaacttgcttggagctaattgatgtcgacacttcaatatacggaatccccctttataagtagaaaaagttggttttgcgttaacgtgtgatattattttgggaatttcatctgcaagaaaataatgtagaggac

SEQ ID NO: 128206 - DNA, 162 bp, Arabidopsis thaliana columbia
gagagaaaattgaggatgattaatgacaaatcatacaaagtctggcacatttacatatgaaagcatcaatccataatgtacaaccttattcttctacttatgtcactcactcgaatgaaaaagactgagagaaaagcaaaatacacactgctaaaacttggc

SEQ ID NO: 128207 - DNA, 367 bp, Arabidopsis thaliana columbia
aagttagtcaccaaaaaaaaaaaaaaacacaaaaagtttcaatggccgcctccacaatggctctctcctcccctgccttcgccggaaaggctgaaaacctttcccccgaggcatttgaagtcctcggaagcggccgtgtgacaatgaggaagactgttgccaagccaaaggggtccatcaggcaaccccatggtacggaatccgaccgagtcaagtacttggggtccattctctggcgagtcaccgagcctacctttaccggagagttccccggagactacggatgggacaccgctggaacttttcagctgatcccgagacattcgcaaggaaaccgtgagctagaagttatccacagcaggtgggc

SEQ ID NO: 128208 - DNA, 422 bp, Arabidopsis thaliana columbia
ttttcgtccgggcggtgatgaagaggaaggaaaggtttctgacagaggggatgaagatgaagaggaagaggcgtcacggaaaagtagacttggacttaatagaaagagtaatgatgatgatgatgaagaaggtccaaggggtggtgatcttgacatggatgatgatgacattgagaagggggatgactgggagcacgaggaaattttcacggatgatgatgaagcagtcggtaatgatcctgaggaacgtgaagaccttctggctcctgaaattcctgctcctccagaaataaagcaggatgaggatgatgaagaaaatgaagaagaggagggaggtttgagcaaatctgtgaaagagttgaagaaactgcttggtaaggctaatggtttggacgaatctgatgaagacgatgatgatgatt

SEQ ID NO: 128209 - DNA, 337 bp, Arabidopsis thaliana columbia
ggccatcaaattcctctttttgcacaatgagaaaaatttcgttatgatgggtcagattacaaagttgcaaactttggatcaaaaacgcttcaagacaaagatccaagggatcatttaatcatcatgatttttttgaagatccaaagcccccaaatcccatcatttttgcaacctcaggatccatcttaggctttttttccaccaccttccctttcttcttctctttctttttctctctacgctgcctttttagttcttcctcttcttcttgctgttttcggatgcgttcgtccagatctgttcccagatcaggaccaaaattcagttatcccaaatc

SEQ ID NO: 128210 - DNA, 197 bp, Arabidopsis thaliana columbia
  unsure (1)..(197): unsure at all n locations
atgcgatnattgacacacaacgaacaagggatcttttattagtaacgttgtcagcccaattcacaaagttggaaaatggtttgtttgttcttggtactggccaaaacagagagggagagagagggttacaaacaatgaagctgattcaattttgccatttgaacaaggattgaagatattcaagagttttgtctttg

SEQ ID NO: 128211 - DNA, 422 bp, Arabidopsis thaliana columbia
  unsure (1)..(422): unsure at all n locations
cattattaatcngaactaatctcgggttaattccggtacggtacaatgttgggtaagtatctcggattcggtgaacaaacagagaaactcagtgaaaatttactaaaaagctttgaacttatttcataaacatcttcacaaatattgaatcatattcttttttcgctgtataataagagttgttatagaaccaaagttgtaaagaaaaaaaaaatctagattctgtaaaatgggaactcacggaaccagataaagaaatttcaccggcggtcttacgtccccggcgggatatatatttcatctcttcctcctttcttccccgtatcgccaacacaagttggatgatttgattccaaaatgtgaggcattggaacaaaaaaattaaaaaagtggagaaaaacctgtgtctatgttcttcttct

SEQ ID NO: 128212 - DNA, 249 bp, Arabidopsis thaliana columbia
gttcgtgacacccacaaggaagaaatcgatgggtgattatcgagttctccgaaacttccgcgacattgtcggaatactctagctacatctctttacgatcgcctctctggtcccatccgatgaacttcagaccgatgtgggtgaacgcggggagcttcaagtgactcctagtgaccaggtaaaaggttctcctggatcgaagccagatagaacctctctgtgcgagaggagtcatatgcatgcacttgg

SEQ ID NO: 128213 - DNA, 342 bp, Arabidopsis thaliana columbia
gaaaccaattactatacttatatgtgtgtatataacagttaaatcaatctgtcagacacattttcacatctctagagaaagcataacaaatgaatatgtgaaaaattccctatgcaatttgtaccaataatctatcttctctttttcttcatgctgtctctgaagccgcgtggtttacatatattgaatctactttgtatctccttacacagcttcaggaccgtcttgcggtagaatgaattgacgcattggccttggcgacttggtacactcgtggcgtctgagagtgagtgggatcccttcttgctcaaacccattactatcttccaattgtttaggaag

SEQ ID NO: 128214 - DNA, 304 bp, Arabidopsis thaliana columbia
aaaaaaaaaatctgctctctatagcctaataaactaggaattaaaaactaaacaaaatggggtggggggatatatatttcccttgaaaaggtttttttaaatggccaaaagaaaaacaaatttttgcttggggggggctagaccgagcccagaaactgtttttttcaccaaaaacaaatttagctccgaatccaagacgggtccaaaccaaaaagcttatctccacggttttgagcccctgatgtccggggcgggggtgcatgtccagtaatcggaagaacccattcgtttttttccctttccg

SEQ ID NO: 128215 - DNA, 307 bp, Arabidopsis thaliana columbia
aggttcgccaaatatgataaattttatcgaacaaaacaagttttacaaaaataatcaacaaactttatacatggatcatgcaactgagaagaagaaacttccaagtgaaaaaaaaaaatccaacttacaaaactcttgcaaggaaatgaaaactttggcttccttcaaagccaagacctgaaagcaaagcagcgagctttacgttttctctgcaagctcgagttcttacctttgtttaacatgccctgattttggcccggaaccccttctctcttctcttcttcactgaaatcgcttgatgactctt

SEQ ID NO: 128216 - DNA, 168 bp, Arabidopsis thaliana columbia
ggggggggaataaaaaatagttcaggccgtcacacaaaattacaaattgtcaagaagaaaccatcaaaaatttgagcctgggatggctgccaccattagtaggggaaaaaagaacccgtgttcccgggctgccccaccgtagtaaggttttatcataatcggaaattt

SEQ ID NO: 128217 - DNA, 164 bp, Arabidopsis thaliana columbia
acatcaaataattggataaaaaccttgggtcatttgatggaaaacaagattctggtcggaaactacaaaaaggatcgagcgaacaaacatattataaagatttgcaaaaatcaaagtgcggtttttttttggatgtggcctcgctcttttttctctaagaagaa

SEQ ID NO: 128218 - DNA, 368 bp, Arabidopsis thaliana columbia
ggggacaaggatatattaagcttcaaatagatgacccatacaaaatgttttaattgcccaacctaaacacatactgagttgaagtaccatatgttttttcaaataggccacacgagcagcaattttagtcagacataataaactaagacacatgagcgttgcagcaacctgaaagcaaaatgttaaagaaaaggagaggttgcagaataagacctttttaagacaaatgtactttgcaatccaaaggggcaatttcacgtttgtttcatgtcaccgttttttttaagggtctttagtcttttgtaccccttggcaggaccaaagatccagtccatatacacaaaagttgaagagtagtttccggactt

SEQ ID NO: 128219 - DNA, 317 bp, Arabidopsis thaliana columbia
acttaagagtgtttttctcattatcaaaatgcctggggaaagatttacaaaatctcatttgtttagcttagtgtagtttcttatctacactgattacaacaaaaggatttggtttttaaaattctgatctctctcaatctaaattatcacagacaggattgatcatcagagtctttctctgtcactatcttcttcttcttctttttataacttaaaaagtggaagcatagggacctatttagaaaggcaaaaaaaagttgtgaaataagttagaagagaagggaaagagctaaagaaactaacatgtcttttgtttt

SEQ ID NO: 128220 - DNA, 286 bp, Arabidopsis thaliana columbia
ccccacaaaaccgttttttatttaggatgggaacggcccgtttgaaaaaaactggaacccctagaatcacccataggggggggttaaacccaaaagggtttggggaattcggattggaatctttggggggggaccacccaaaaaagggggcccagttcattttggatcgggtgggggaaaggatttccgcaggaaggggtaaatggggcgtcacccacaaaacaattaacaaacgggttttgggtttttatggggggattggggggctaaagttttacccgttttt

SEQ ID NO: 128221 - DNA, 263 bp, Arabidopsis thaliana columbia
gaggcaaaacagaaacaatcattttgagcaaaaaaaggttaaaacagcaaattgattcccgcaaaaatttgtcaatcaaagagggggattgagggggagggggtcaaagtaaaaaaaaaaactcgaacaaaagcttttcataaatgaccattgggggaaagggaagccaaaagatcacttggactcccacttttggggccttcacttccctgggaagatgggtggttcacgtttttcaacccatctaatgcctttgaaacttt

SEQ ID NO: 128222 - DNA, 163 bp, Arabidopsis thaliana columbia
ctggctatgtgtgttaaactttcagcaaagaagaaaattcaaaaaccaccggaccaatcacggaccgaaacaaaaagttaaagtccaaacaggtacaataatatgcttttaaggcaggttatggatatgactaaaaagcacatgatcacaattccaattgggt

SEQ ID NO: 128223 - DNA, 239 bp, Arabidopsis thaliana columbia
atgggtgggggaacggaaacaacatttttttataatgaaaccaaatttccataaatcccaactcccccatgatatttaaagaaaagaggttttggtaattgaaagaaaatttcgccaaaaataatttcccccgttaaacatatttcggggaaaaaaggatgtaagtagaagttttaatttttagttttacgttttaattttaattttaatagggggatattaaagaatttacaaagcgg

SEQ ID NO: 128224 - DNA, 325 bp, Arabidopsis thaliana columbia
caaaaaagaaaaaaaggggacctgcccatttattcatccacgctacatcatgttttaatacctgcctataaaactaataaattttttccattaaaaagaacatagtttattatcgaattagtcaaacataaatgcaaattagttgaaaattaaaaagcctatttacattaaaaatgtccagatgacccatctcaccaaaaagggcaccacccaacatagttttgacagagattctaatggaaaggggcttgattgattagttttggaacctgaactttcacagacaaaccatgttcgacttaatgagaatctcctccgagcaagt

SEQ ID NO: 128225 - DNA, 210 bp, Arabidopsis thaliana columbia
gaagggggccaaacacaactttaaggggaagcagccaaatccaattttgggcaaacgaatatgtatatgggtgatttaccaacaacgatttctatattgacttctttttttttctgggtgaccaaaaaatagaaaaacctcccgtttgcaaggttcaatgtggccaggcatgttctttaacttgggacttggaagaatcttttggggttt

SEQ ID NO: 128226 - DNA, 392 bp, Arabidopsis thaliana columbia
aaaacttcaattaagcgctattaagcagaccaaacgacgagattatgcagtgattaattagagcttaaacacaatttaagacaaaacaaacactaatccaaaaccttttaaaaacaataacaaggttcgtgtaagtgaagaagtcgaaaaaaacggctgctacggtagtaaaaagccgatctgagtcgcgaccaaacgacgcgtatcaatttcggagctgatcttaatcttgtcaacacaacttgttgcactctggaatcagatcttgaaactttctcagggaaactctgttctgtcgaatactggtagcttgtgagaaacaactggatcttatacatatactctccatatggtgcaccggagcagtcaccaccactagtgcttctgaacac

SEQ ID NO: 128227 - DNA, 281 bp, Arabidopsis thaliana columbia
ttgttgtagagagagagagaaagtgaatgagcgagacaaagagtttaacacacgcttataaccaaactcttcgtaactacagaggcgactgaagcgttttcagatttcgatgagtgagaagcttgtgttcagaagcactagtggaggggactactacggtgcaccatatggagagtatatggagaagagacagttgtttctgataatctaccagttttcaagaaaacagagtttcgctgcgaaagtttcaagatctgttacgagagtgaaacgagttgtgt

SEQ ID NO: 128228 - DNA, 354 bp, Arabidopsis thaliana columbia
acaataactcgagaatattttaaagttgacagaattgctccaagtcaagaaagtctacggaatgtacaaagaaacaaagctgttttcctctcttttttataagtgaaccgacacagaagagaaaaaaagaaaaagacaaaaagagtttagagatcagaaaggagccgagcttgtccgtcggagctgccgcttgggatcaggcggtggtacacttgggaggattttttccacctccttttgcttcctgagtctttcgttttcttcttctaaccgtgaaactttgatctctagctcatgagtgtaagcctgtttcctagctcgggaacgagcagcagactctctgttctttatcat

SEQ ID NO: 128229 - DNA, 356 bp, Arabidopsis thaliana columbia
gaaaaacaaaaaggatctgttatattaattgtaactattttaagatacattgcgagataactaaattaacaaaatctcagcgcagaaaaaaaaaagaaaaatacaaattacaatattagtatagtaatacatttcatttaattgatgcaattaaatacataaatatatatactatgggcaaatgattttgctcctctcacttgtaaagccaaactccatgggcgaatatcaaacctcctttgaacgcatcaaaccctaattcttgtttttaatgtctccctccgtttaatcccaaatccttcaaaatggactggatgatggaaacgtatctcacttcctcaggagcccgcttgatc

SEQ ID NO: 128230 - DNA, 152 bp, Arabidopsis thaliana columbia
aacgggggcatttaaatgaatttttcacaataagcaatgcaaacatacacaagtggggcactaaatccttaggatactttgcaaatctaattaagaatctatactcacttgaatcaatcacactatacaggtctataacactaccagacacc

SEQ ID NO: 128231 - DNA, 420 bp, Arabidopsis thaliana columbia
gaccaacttgtatcagtttctcatcaaagaattctatgtgtcagatgacccactgttcttaactccagagctacggcaagaccaatcaaaaggaggaatcgcatacggtccatttagtataccctcagccatcaatctgtacgcagcctcagtcatatgaacaccgtcccaagccacatactttgaaggatcatcacaactttcaactatatcagtcccacatttcctacctacggtatagttgtacggtcctcctgcgccgcaacaagcggacaaaggtctgttcatgaatccgaatttggctggttcttgataaaggtgaaacagcgcgttgtagtagtcagcgtatatgatgttaacatgagggtacaacttctggagtctgttgagttctgctctaagctgctcaccatggttttc

SEQ ID NO: 128232 - DNA, 121 bp, Arabidopsis thaliana columbia
  unsure (1)..(121): unsure at all n locations
atatcaangaaagggcaaaactagactgatagggttaaatatagcatacctagcagtcccaagcaccataataccaccattattatacatattagaaacagaacatgaacagatgtacaca

SEQ ID NO: 128233 - DNA, 152 bp, Arabidopsis thaliana columbia
attgacggggaagaaccagtctaatatggcaaaattttgaaaaattagaagccccaagacccaaaattccacggttattatacatattggaaacagaacaggaacaggggtccacattcataccttttaagggaatcatccattgtttaaaa

SEQ ID NO: 128234 - DNA, 438 bp, Arabidopsis thaliana columbia
gatgcagagtttttataaagagtaaatgaaactgtgctcaatgcacaacaaaacaatgaacccttttttttttgtcaaaattttgcaaagtagcttttaacaaaagaggtgagtctccggcttaagctgcccccaaaaaacttcgtagcagcaaagcaaagtaaaatcccattagcaaagcttcttctgaccaagctgatccgctagcactgcatcttcgttcttctgcatagctttcttggctagttcgtacccagcaaagttcatagcacctagaggagccacccagaagaacctcgggactgctcctttgaacaaacctagcggtccctcattacgcagaatcgatacaacaaccatagacattgagatcggtctccctggcgtggcagtcatcattctcgtcttatcacatcaaatggggttgttacaactgct

SEQ ID NO: 128235 - DNA, 411 bp, Arabidopsis thaliana columbia
ttcttttttttttttggtataacatatagattgaattttccaaaaatttgaagagaagaatctatacaatccgtaagaggagaagaggaaagggacctgaagcaggcgactttggcatctcaacctcaacgtctttgtatctgttgtctgtaagttacaacaaaaacaaagctcagtttcagaatgttaaaccatgtgagctttttctttttaagttaactcatctctccttttccctttcactttcagtgttactgaatgtgttcataaccatataattactattatatctctttaaatagtgcggattgtaattatacttccggttcttctgctgcgtcctccagtagcaggctagtgccccaaatgcgcagcttgcaagtgctatggccaatgcagctcccactggca

SEQ ID NO: 128236 - DNA, 174 bp, Arabidopsis thaliana columbia
ggaaaatgttattacgataggatctggtggcagtcaaataaatacagcggggccattacagattttactaccattttaaaggcacgtgacttttacataatctgacatcaaaagagcgaaaaataaaacaagaggtcggttcggctcggtttagccttatttgaaagtggaaac

SEQ ID NO: 128237 - DNA, 153 bp, Arabidopsis thaliana columbia
gaaccaagcatatttagaaagactatcacttacaaaaaaaactccgttttgcggctgacgtgttcacggcggcaaccatcatggacaacggtgacctcggtaacaaccaccataacttcctcgggggagctggtaatcgtttatcagccgaat

SEQ ID NO: 128238 - DNA, 220 bp, Arabidopsis thaliana columbia
tccttttttttttttattcacaaaaactttgctcataacatggaagctttggttagaggttcttactttctacctatgaatataacatgttagggtacaggacataaacaggaatctgcttatctactattacatggcatcccaaataaattatgttcatactatgaacgattcttgaatcattgctcgaactgttgatcccacaaaacacccgctccaa

SEQ ID NO: 128239 - DNA, 346 bp, Arabidopsis thaliana columbia
cacaactgctccatgcagcggaaaagaagttactgattcagacataatgtagctcgaccttacaatatataacaatgggaataaatggcactacattgaactgttcataacattttaagtattttctaacaaaaactcaggaggctgaccaaaaatgagttaatgtagtgaagagagcttttctaacaatctgtcaaagtcgtatgtactcgcatctgtttccattattcttttgccaatcccatctgagttcttacattgcagcttttccagctcctttgggcattttctttgatgcagcgtcttcaacgtccttgagctggtagtagtgaggagctaactcaat

SEQ ID NO: 128240 - DNA, 307 bp, Arabidopsis thaliana columbia
tcgctgttttttgggttatgcctttaacacttcaggctacatcgatccttgagttcgccggccggtacggggacattgccgggaatgagtcacaggggacgagagggatattggaaggagggcgaaaccattctacccgaggaatttactacggctgcggtggtggcttgtttttgagggatccggcgggtttatgaatggtttgacgacgtttacaaacaccaagaaacacgcctatggtcaagcacttcaatgactagccattcccttgcaagaattcggtcaacggtaacatgacttagttttc

SEQ ID NO: 128241 - DNA, 279 bp, Arabidopsis thaliana columbia
aagggatccaatgcttttaaagagtggcaacagttttgcttttgaacatggttttggaaaactgggaggttaccaaaggagaaccacctaaaaaattttaaaaggcccaggttcaagaatccaaatgaaaatttgcaaagccgttggtcccctttggccaaattggcatgggcagttgcaacacattgaaagggtccaaatcctccccaacaatgttcctggtaactccccaacaaattatttctaaaacatgattctttttagggcccatgtcccaaa

SEQ ID NO: 128242 - DNA, 301 bp, Arabidopsis thaliana columbia
ctaaaattggataaaagcaggtatacactctggtattagctataaatagaaagacgattctcaaataagaatcttggaatgttataagacagagcttatatatatatataagccatgagactgtattttcacaagatgttttctcatgattcgtaacttaataacacttacaaattacagatgcatagacattaatatagtgcgaaacccgcttcttgtttgatcagtccacgcattttttcggcctgtaaaatgagcaaaaaaaggggagacaggacctcgatatgtctaaacagggatc

SEQ ID NO: 128243 - DNA, 170 bp, Arabidopsis thaliana columbia
gtgcataaaagggcccaaattcgtggggcgaatttacatatgacacgaggaaagaagtggcccaaattcgctggacgaatcaacataacgtactacaaaagtaccctcagatatcatttgtaagttttgcctccaatctctgtttgctataggccctttggattggggcc

SEQ ID NO: 128244 - DNA, 380 bp, Arabidopsis thaliana columbia
ataagaagatatagttcatctgttgcatatagtcatgatatgtttgcaacaagattgaattcatcatcgctcttggcttgataatctactataacattaccacttgtaaataaataaaaagttcgaataggcttagtgaagtatatttgcataaacttagttgaagctgtccttgtatccattcgtcctcttgttggacgcgatagagatccgctgatcctgcagcatgttcaggcttggggctaatagtcttgtgtatcgatcgaagtacagaagttgcttcaacagaagtgcaaactctctcgggaacttaagaccatatgattcgctaacacgcaccaggtcgaggaaaagagcattcatctgtctctcatccataa

SEQ ID NO: 128245 - DNA, 313 bp, Arabidopsis thaliana columbia
ctaacaaataatggaccaatgcaatagttccagctctaaaagggtacaaaaatgcaaatgccaggacaaatgacgacgaatattcaatacatggggtggaacctaattctaaccctagaggtcggattgtacgctttattaattaactaatgtgacacggacaaaaaataaaaatatgtttttcttattacgttaccattacacaatcaaataaacccgaacccactagattgttgacccgagttcccaattccgataaccgggtcaacactaaaaccctgattagccgagacgtccgagttattattaaacc

SEQ ID NO: 128246 - DNA, 100 bp, Arabidopsis thaliana columbia
cagtatccagccaaaaccaggtctctcggcctttgagttcagggcacttgcaatgactacagtgagatcccttttgatgttttatttgcctcttttggag

SEQ ID NO: 128247 - DNA, 246 bp, Arabidopsis thaliana columbia
gaaggaagaaaaacattttattcatttattaccatgggcctccttcaaaccaaaagacataaacaaaggaaaccttggcaatgtctagaaaagggagcctcacaaataaaagacaatccagggggggttttatgttaaaggctatagacatacaagcaacctttccttgggctttgcagtttcttcctttgggctttaccaaaagaaaaggtgttttacgcagttaagactccaacaacaaaattt

SEQ ID NO: 128248 - DNA, 169 bp, Arabidopsis thaliana columbia
aaaataaaaggaaaaacttaattggggggcttgataaaccatacaagggggaacaacactcaaactcatttcttttggtctcgactgtttcaaacaagcaacataacctatccacataactttatctaccatggtccgtgtaaaacaaaacacattcaaacgaactttc

SEQ ID NO: 128249 - DNA, 400 bp, Arabidopsis thaliana columbia
atatcacaaactctatttcttgtaatggttgggtacatacaattttgatgaagagaaagaaaatgtaaaaagcctgaagacattcctcttgtttcaccagttacaaactgtgaacaatctacaaaactcataaagcatataaccaacacacaaaaactattgtttcaatctcgcaaaccgaaagaaaagagaggttaacctcccagggaaaatacaggtaaaagaaagacacgaatgaatcaaatcctccatgaatctgataaattacagtatatgaaccagttaactctctggatagtatgtagtatataatatgcaaatgttacctatgtagaagtcttcatctttctatatagtgagggatgcatgcaggagaatatggatggctttgctctctttt

SEQ ID NO: 128250 - DNA, 415 bp, Arabidopsis thaliana columbia
ctaacaggggagtttatcaaaagaaaaatggaaaacaacaaaatgttgcaaattcgagaaatatacaaaaggaattaaagttgaaagagaaatggagggtagtttcttttttcttcttataacctcactctttcttggataacaagtttaaaaaatgggttttaaattttaacactttacagccctagggcttgggattcccatgtatgccaagcgtggagacaccctcactttaggactaggccttggagatggaattggtccgtaagaattagctggtgaaaccctaggagacagactgacttgctccagtgcttgggcttgtagctccattggataatctttaacacacccaattctgggaccatatccactggtccatttacaagacagtttttttacaggatcaaacact

SEQ ID NO: 128251 - DNA, 193 bp, Arabidopsis thaliana columbia
ccctggggatttggttcaaggggcaacctttttcatttggattacccaggcttatggtcatatcatttgtaagaggtctacttcaaaccaaatcctccggttttttttgggtttctgttttaccttttattatgttacaacactcaaaatcaacacaacccaaagaaaaatgttcaaatcaaaagaaatcaca

SEQ ID NO: 128252 - DNA, 163 bp, Arabidopsis thaliana columbia
gagaaaatgtgggatgctaagaacatgatgtgtgctgctgacccaagacacggacgctacctaactgcttcagccatggaccgtggaaagatgagcaccaaggaggttgatgaacagaagctgaacgaacagaacaagaactccttctactttgtggaatgga

SEQ ID NO: 128253 - DNA, 212 bp, Arabidopsis thaliana columbia
aggaagaacttacaaagaaggagttaataagataacacctcttttttgtgttccactttcactcaaaaaaaaaataacaggattaaatagacgaccccacctttttttatatctacattgcaacaccttccaaaagaataacatgatgtatgtaaatccttgttttcttttggggttcaatctaacaaggatcttaacacagtaaacaaaca

SEQ ID NO: 128254 - DNA, 339 bp, Arabidopsis thaliana columbia
ctgaattgaattatcatattatcgatagaggagattacaagttacaaacatcatatgcataatcactgggccaaaaatacaagcatataggggaaattacaacaatgtgccttcgtgtctaaaagttggaatcagaccttctcctttgtttctcagggattccaatttttggcgtattagaggctcgaactcgatccctgcacttttttcaccaaaggagattatgtcacgatacatttggttcgagggttgaataccagcaccactcatccattctaaaacctcaatgtattttctccagtttccaacagctaaaagatgttccaacagtattgcata

SEQ ID NO: 128255 - DNA, 153 bp, Arabidopsis thaliana columbia
gcgcccacgcgtagggcttgcgagaaaaattgattgtcatatggagtgagagtgtgtgaatgagagacattatgatattgatggttatgcatctgtataaaaaaaagattcaaaaatgtatgctaggtttagttgaattatgggatgattaac

SEQ ID NO: 128256 - DNA, 374 bp, Arabidopsis thaliana columbia
caaactggaataatgtctgataattgagcacatactgatattgatggttccaaaaacactaatttccgaatccaaaatcaaaaaagagcggccgcccttttttttttttttttagaaaaaaatgaaggtaaggcaggacaaagatacaagaaatcttcttatactctatacacattttggagtaaaggagggacaatacatgaagtcctactagacacaatccaattcactgggggggaaaatcaatcaaattcccccaattttctggatttgggtttctgtaaaagaatcaactttttaaaactcaatgtaggggccctttcgggttcagagcccagttgaaaccaaaccatgcaaggttacaattccaatca

SEQ ID NO: 128257 - DNA, 282 bp, Arabidopsis thaliana columbia
tttttttttttttttttttgtttttttttttttttttttttttttttttttttttttttttttttttttttttttttaatgggggaaaacttcaataataggaaacaaaccaccttttggtaaacaaggtccctaattttattttgggatttcgtcattccccatttaaaatttgaaaacatgagctcaaaaactggaactcaaatatcacaaactttccaaaacccataaaccacaaacccattgccattgtaagggaacaaaattaggggtttttttttt

SEQ ID NO: 128258 - DNA, 307 bp, Arabidopsis thaliana columbia
gattgaacatgccattatcatatatggcccatatcaacatcgatccactatttcaacaacatgcttcgttcgccttctgcttactttattgcttttaccattagcaaagttccaaaaaagataagaaaaccaaagattcttcttcttttccacgtcaaatgttttcctcaaagccgtccgtacaatgacaaaagatctctgagtctgtcagattcagtttcaagattatcaaagctcgttgaacttggaatcctccaaccccaattccccacctcaggggctggagggttcatcctggcagaacttc

SEQ ID NO: 128259 - DNA, 303 bp, Arabidopsis thaliana columbia
gtggactgaattttgagtagtagataaattcgggaatgtttgttactacatatgttaaaataattcacgattgagcacgacgcgtaaactatttttacacgggatagaggccatacagctattaactaaagtctgttgagaggaaccctgagactgggttggggaggagttctgtttgttgtcctgtccacatgagatataacttgcggcattgtcatccccaccgatactatgatctctattccttctcggatcgataaatttggccttatgatttttttgctacttaccagaaacacattt

SEQ ID NO: 128260 - DNA, 210 bp, Arabidopsis thaliana columbia
gactccagagcatggcgccctcctttttttttttttatggggttttttggagaaaagaactatactttatttgataggataaagggaacaattcgcattttacatcaaaatagaagagaaacagagcaatttatactgtacacacgacaggggctgataaaaatttctcctattgcttattctcaacactcatgaattaatcccactctt

SEQ ID NO: 128261 - DNA, 201 bp, Arabidopsis thaliana columbia
ctagttctaagatcgcgagccggccgcccttttttttttttttttgcaagattgataaatatatcgtctgattgataatttcgatctgcatgactatatgaattggttatgtttgttttgatagttaatatctgttattttcatttttgtataacaaataatgttatgtttgcgaatgaattaagtttccattttcttact

SEQ ID NO: 128262 - DNA, 347 bp, Arabidopsis thaliana columbia
  unsure (1)..(347): unsure at all n locations
tcgttcgnccttcttttttttttttttttttttttttttttttttttttttttttttgaaaaatctttcgaatttttaaaatcaaccaaatcttgagagatacattagtgattggggcatgtgggattccaaagattttacctagttttagttggttttcacaggtaatgaattttatgggctagaccattgaacatgggattgaaattttgatacaacacgacacttatacacaaaagaagtacgccttaacgcatcccaggactactccttgagatattgccacgtggccttttgtggccctttggattattggtacagtcatagttaacgccatttccaccaac

SEQ ID NO: 128263 - DNA, 298 bp, Arabidopsis thaliana columbia
gggagcaaaaacctggggtgttccactttgaataaaccccaatagtgcagaaacaagacattctgataccctttttctgtggggttaaaagggagtcaggagatttataacatccattttttccgcgtgtgtaatatgcacaacccaaacgcaggaatccaggaaaaattgggttttgacctttaaaacctccctcattctggattcctttggggcagttgggactccaacaacaacattggtcaccaacttcccgttttcataaacggacatggggttttctacaacaaccgtttgg

SEQ ID NO: 128264 - DNA, 236 bp, Arabidopsis thaliana columbia
gagcctaataggtggttttataacgttatttcaaaattatcattacaagcgatagagagttacatatatgcgaatatagtcaagttacaagacaacatgatttatttgactacagatttattcatcttcttcaacaacaacaacaaagagacgaatctcagttgaactcaattgggttttctttataatgaacatgaccatgtgcaaagaccacactccattgttttgctgtgagc

SEQ ID NO: 128265 - DNA, 219 bp, Arabidopsis thaliana columbia
cgcactgcgccgacaaaaaaccggggtgaaaccctttcctcctcgcgccgtcatgcaagccaccatcttctctccacgcgccactgtctgcccctgtaaacctatcctccctacccacaatgtcaactctcgccgatccctcaatcatctcctgctccgcccaatccgaaaccgactgatccttcaccacctaacacctgacaccaaataaagctcaac

SEQ ID NO: 128266 - DNA, 220 bp, Arabidopsis thaliana columbia
cccacgcgtccgaaaatcagtgactctacgatcgtttcatatcccaattgagtacaacgacaccaaatccgactcacggactcgtcacctggcgagacccttcccggcggcaaggtgttcaagcaccagagacgtacctaagctggaactcttcagacgcggaaaagaccaccggaagtactaaagaaccgccacttattgaaaaagccgaatgcgaact

SEQ ID NO: 128267 - DNA, 348 bp, Arabidopsis thaliana columbia
ccgaaaacttttcttgcaaaacatgtgaaactacatttgatccaaacatatgacacatttctgggtttctgccaccatatctgattttcctgatctttaaggcccagggatcaaaataggttcaaactaacatcacatctttgtggctgcatgcacaaagtcgaattttcatcctcgtgatgtttcaggtatggctaaaaaaaaaaatagattcgtcattcctcatcaagaatcacaggtctcgggggaatcctttccaatgctttgaaagattctttttcgtaagggggaggcaacaaacgttgtacatctgcaaatagatcttcacgtccagtcgcctttttgaca

SEQ ID NO: 128268 - DNA, 446 bp, Arabidopsis thaliana columbia
aaaaacaactgaatttaacacattccttacatatgactggaaacaaatgaaatagcagaagagctagataaagaacaagataagtaagaaaactagagacatttccataaaagattcttctatgtggattcccagttgttatcactatgatttagaataaaacccgtcatggttcttagcagaaagccgtttcaagaactcgtaggtagtgatcatagttgttgcagacattgacattgaagcacatcttggtcccaatcctctataacaagccgtccatccaccttgtctaaccaagtttcttacagtctgtccaatactcggtccacgcttgccgttgttactactatcttccccatcaagaacctgcaatctcgtcttgattgtgtcgagtggcattgtaatcaaagcagaaacacttccagcaatcgcagcactaactcctt

SEQ ID NO: 128269 - DNA, 472 bp, Arabidopsis thaliana columbia
attaaaagcttctctcgttggggacgttaattaaaattctctaatcaggcgaagtagactgatacgagagggatatcaacgtcagcatcattatcatcttcacaagcgactacaacatccacgtgacgtctataagcaggcaattcaaccccagccacgtctcttgcaagatccaccactcttctgttcatcctctctttatgccttgagaacatactgttgtacagtaaactgcttccgcaagatatgctgtatgcgtttagccctttctcttttagccagtctagcaactcccttagggtcgggtttcccctcatcacccaccggtcccaaacagtccagctttggtcttggtgcttcaccactttaggtggaaccggctcagccatggagaagagcggaagtgctaagttagcaaatgtgtttctgtagtcttctactttgtgtgacccgtctaagaccttgtacatct

SEQ ID NO: 128270 - DNA, 200 bp, Arabidopsis thaliana columbia
agaaagtacacgctatggcgtttttaaactgtattgataagtttattacaaaacgtctcaagtctctctcaatagggtctgttgatcatatgcatccatacaaggacttagtcaacgagcttaaacaacagacgaatttatcgttctctaaaaccatgaccagaaacacacttttaggttttatgattttacccaggcaa

SEQ ID NO: 128271 - DNA, 247 bp, Arabidopsis thaliana columbia
ataggggcaaaccatttttttaagatttagggaccttactatttatttcaataaagcacaagacagtacaacattttacaagtttattctgcaaaaaaaagctaaatcacacccccggtaagaaaattgagtttatctcaaggaaatgggtcctcgcgaactccctttgtaatggcagcctcctccatgttgctgaaccccaggaaaagagggggtcgatgctcctcgggaaagaactcctttgggg

SEQ ID NO: 128272 - DNA, 130 bp, Arabidopsis thaliana columbia
cccacttttccgctcatctatttgtaccgctccgttgcgcctctctctgcttaccttcctctatctagcggaggaactacgtcgaccgccgacgggtaaaccggcgacagtggattctctaaactcttaa

SEQ ID NO: 128273 - DNA, 158 bp, Arabidopsis thaliana columbia
attctcggaaattaggtgcatatattaatatcaaggaactttaaaaagaaagtactccatcattaataaaggataaaacactacatactggtgaaacactacttttttttcctgcttgcatctcctattacctgtacaaagaatgaccaatcttggga

SEQ ID NO: 128274 - DNA, 218 bp, Arabidopsis thaliana columbia
ccaaataaattagaacttttttttttgagtttttacatgtcaaaacacacaattattgaatattgatacaaacaagtgaaaaaagaagataacattattgatgatacattgcaagagcttcgattgtggacagagtaatcagaatgtaattattttgtttcccctagagcgtttctgaggttagagtacttggtttcgagctcataccatgaatccaa

SEQ ID NO: 128275 - DNA, 341 bp, Arabidopsis thaliana columbia
cttggttgtctcccttttttttgtttatggaaaaagggtcctactccattaaaactaatgccattccaaactcctaaacatgatcaagacgctaaagcccacccttattgcttgtttctttcactacctaaagcaagctggatgctttttctagtttttgcctgccccctttgggctgactccgccgggctcatatcctcctccaccgatttcaacaccaccaccggcgacacctgggccgggtccaccaccaccatatgccgggcctccaccgtcggagccacccgttgggagttcacccttaaatccggttacctgtgggatactctttccaatctcac

SEQ ID NO: 128276 - DNA, 245 bp, Arabidopsis thaliana columbia
aagcaaggaagtcacatgaaactttttccttgggagaaccgggtttgggcaaaaaagcctgggaaaaccaaagggaaaagaaaagaaaaaaacccaacatttcactttattagctagctgaacaacacagatcaacccctaatccttttacaaggacaaatacccaaatctttactcttttaaaaatctggttacttcaccatcattttttcaggctcttgaagggacccctctctttttttttc

SEQ ID NO: 128277 - DNA, 241 bp, Arabidopsis thaliana columbia
aatatgcgaaatcggcaacgagagaaacaaaaagaagaaaaaaatgaagacatttatgataatcaagctggcgaattggagcatcttgattgtaggacgagtcgaggctaacgataacaagagaaaatagctactactcgatccaagcttgcgtcctaatgctccaccaggatgtcatcgtcagccatataaaccccgaactccggctaacgaatatagacgcggttgcaccacaatcaac

SEQ ID NO: 128278 - DNA, 399 bp, Arabidopsis thaliana columbia
agattaaacatctgaatttataattaaaatgtttaagaacaaaaactttgttcaactttctcttcacctatgttctcattacatagatcatggtcaatacatatgcaacaataaaacaagaagtggaaacaaacaatgatcagaaagaagaatccacaagtgcatgatcatgttaaatgaacaatcttctcttcctcaagacacattcctaactttctacaagagtataaaaattagacgtttagtggtattcatctgcacaattgggaacacaactgctgaatcccagacggtatatcgttagagagcttgtacatctctgttttcccattcgtgatacatgtcaagttcatctgctgcccaatttggctcgactcacagtagacattttgagattta

SEQ ID NO: 128279 - DNA, 484 bp, Arabidopsis thaliana columbia
gaaacccaaaaaactgtctttagcatttcagaagcaatctaagtaagtacaagtcagagggagagagatgtgggaatcaatctttttaataagtgtttaaatagacaaaagcagagaatcctaatgtaactacttacacacaagatttacatttggttcttttcttttcttgtcttttcgaatattcttgatcttaaatcaattttcttcctccaagttggtaggctcgcttagaacatacttaggtagctcatacttagcacctctctcgtcatagcagactgtgagatctgtgttctgaacaatgactcctgcactgtccacaattgcttgtgcaagagatatgtcagcttctgcagcagcgcgaagtgcgtcccatatctctgcgattaccaagtgtaaaacacaacatgttgacactaagatcagatgcaaccagccaaaacacataacaaagcatatcatctgacactaaagttatatg

SEQ ID NO: 128280 - DNA, 436 bp, Arabidopsis thaliana columbia
acctcttctagtcgcacttgatgtttctgtagatcctccttacaaacagatttgatcccaggtagccaacagctcctgcaaaattttcacataacgaaggtttagtcaaatcaataacaccactcgctagtttgaagagagtgaagagagtgagctcaccgcaaaggattccaaggccaagacagaacatcatggtgtatccaaagtagaagcttgtctggaagaatccggacatcttggtctttacgtagtagtaatagatggagtataagtacacatagacagccgtcgaagcagcagagaaaaatgaagtccactgccagtgatagttctctgcattcagcaggaaatatgtacccacgattgtcacacacaccgtcactatgacgagaatcacaaaaaccagtaacatgaatccatacacatagtagacctt

SEQ ID NO: 128281 - DNA, 356 bp, Arabidopsis thaliana columbia
gctgccacgaattggcttattatagattgatacgacaaagctcctcctcgcgcacgttagctaaaggaatgactgagactctttttgatgatgttgttgattttttgaacaaagaaagaaactaatcaaaaagactaataggaagaagaagctcaccgtttctatctctcattttaaccactgatcttctgcgattgcgccttgcttctcgtcgattgcttccaatctctgtctggattttctcaattttgtacggagtacgttaattgtgtataaaggagtttagcagatcattgatgtgtacattagggatgatgacgcgaactgttgctttaccattgtcccatgatctgaat

SEQ ID NO: 128282 - DNA, 105 bp, Arabidopsis thaliana columbia
cttgaaaaagtactaactaacatttacgtatttggtctccctacttggtgtagaacttaaatacatgatttgtatcattctttgggaaatgaatttccaaaacaa

SEQ ID NO: 128283 - DNA, 419 bp, Arabidopsis thaliana columbia
aacgaacaatgtaatatatatttagtttgaagaaattaagaaggtttaaaattgtacatgagatgacagacaaaaaatgaacatatgaatataaatctttatgatggatttttaaagaatggttgagaagctttcaataggatcagactcttcaagcatagaagcagcttggaagcaatcagtagcatcagctatacgtccatcagatttatgaaccattcctaagtaataccaagcttttcggtttgttggatcgatcctcaatgcatcagagagcaaacttctagccacggggagagttggctgatgatctttccctctttcggacaataacgctccaaccgctactttgcaaggaaccgatgatccgtctagtaataaaccgtccaagaaagctgctagcgcgggtttgaactcct

SEQ ID NO: 128284 - DNA, 278 bp, Arabidopsis thaliana columbia
tttgtttttttttttttaatttacgcttcgtgattaaaaattaaccagagactcatttacatgcatatagatcgcaaacacatgcatgtgtctcatatataaatagatatcttataagttattgtaataataaagcaaaggaacattaaagaaaggaagtaattaaaagaagatgagagaaactagcaaatatattaaaagctcaacacccaaccaactcttgttcttccatccattactcttcactggtacggcttttcctcctactgtcccatctt

SEQ ID NO: 128285 - DNA, 294 bp, Arabidopsis thaliana columbia
acgaaccgtgaacgtacctgaacttaaagccgatactaatcagttattagttattacattctcccaaaactacccaatgaactgagttaaagctacaagtctaaggagttttaacgatttgggatcattttgggacttttctcagtgctacgtatttgccaaacacatttttctcctgccacatgtgcgggatgaagaacgatctatacttagctggcgacagctttttgtccaaataagggaacaccgcaatagccttccatgtagataagtcgctgcctcgatactgatacg

SEQ ID NO: 128286 - DNA, 276 bp, Arabidopsis thaliana columbia
gggcccaaggaaatatatcccaaatttttggtaattcatatccaaaaaagggccataataaggaagcttttttttggtctccatggaccaaaagcttttcaaatatacatataaaatggacctataataacttatttttaaaactcaccggaaaaaaaccagaggggccaactcacctagttggaaatagggttgggaccactgggaacctgatgggcattatttccaaactctttccttttaaaagggcggctgcgtcgggtgctaacctttgga

SEQ ID NO: 128287 - DNA, 362 bp, Arabidopsis thaliana columbia
aaagatcttgcggggaccaaaaatacttatcaagtaaccaaaactagtaagctgtcactgcagattttgcacatatatactataagtatgtgggttatgaagacataaaggcaaacaaacaaaagaaagagatcaaaatgttgcatctgtcttattcagtatgacatcttacaagaagaaggatgatgctgtgttgttcaatataagttacatcatattcaatgatttgggaaaggtaacccaaagagtgcggttttgtcgaatgttcttcaagattccgaggatgtatatttgagaatagctgcgtcgatcctctccttggctctagttgcaaatgattctaagagaactccgtttttgta

SEQ ID NO: 128288 - DNA, 380 bp, Arabidopsis thaliana columbia
cgcattgctcttcttcaagcaaaataagcgaaaagttcaaacaagagactgaaacatgacacagattctcatattgatagagaatttgtgtaaaattgagagttgtttgaagcagtaatgttaaaccactttgattcaagaaagaagaaataaaagatcagcgtatgaaaaatgaatatgctgctctcagggactgtgttacctcaaaagactttaaaaactcccaaaatcaaggattttgccttgagagatctaaggtttcaggagagaggagacccatctgttgagtcagattatccatatgcttagttttgtcccatccattttgatcctgctctgtaatattgtccactggtgttgaatccatattatctggaacc

SEQ ID NO: 128289 - DNA, 458 bp, Arabidopsis thaliana columbia
attataaccttgtatatatataaccatcaaatatcataagagaccattacaagccttgaaaaagagaaaattgacagaagtgtaattctctctttgagttgaaatgattatttaaaagtgtatggaacatgctaagaaataggagctatatcgattagaagaatctgttgaggtatctatccaaaagctttgcaactataattctgtaagctttttcagtaggatgaaaactgtcccaaaacacataatcagatcttatgggacatacagaagctgtatagttgttgcatagcgcagtaacttctattaatccggttccgcaacatcctttattggccaccttaaatccatattgatgagggtttaaaatgagatcaagaagaggactatagatgtcaatatagattattgttgggtcttgtagagtccttgacaagacatcaatatttgcagagagc

SEQ ID NO: 128290 - DNA, 332 bp, Arabidopsis thaliana columbia
cccacgcgtccgatgaatactcgcgagtatcaaacccttatgttgtaatatatattgtcggaatctagactcgaccctcgattcttgctacagatacttaacgtgagcacataacttgaatccaccaaaacgtcgtctgccggagcatttatggcgtcagcggtgacggcgtcaggcaaggtggagaaaggacatcagctatatagagacggcaagtataagggggcgcttctcttctataccgaggctcttactgctgctaaagctaaaccacagaagatcgctcttcacagcaaccgcgccgcttgttacttgaaattgcacgatttcat

SEQ ID NO: 128291 - DNA, 348 bp, Arabidopsis thaliana columbia
gaaacaacatatattgacaaaacgtggtcgttggggatggtccaaccagggtcacctgtataatttcttgtacgctagacagaacacaatctcggttttgattctattcaggtgaccaaatttcaaaatttttaaaaccttagcaaatgcgaggctacaatcttagtttaatcaacttagaggatgtattcaaagacgctgaatctattctgtgtcaacatgaaaacaagatctgacttcattttgcttgagatttatcggtggctgaggactctgaatcctggatttgatctcccatgttggcatgttgagtcacattcgtattttcacgtgcccgagcgagtttct

SEQ ID NO: 128292 - DNA, 350 bp, Arabidopsis thaliana columbia
accattgttttttatgaacctgtgtttaccttttctggtagaagagagaagaaggagagtcgactcgccagctcatcgaggctgtatttgtctatagttctcttgacgtgtaatcttttggtgttcttgaaaccactttttcttttgataattcctctgtttccttggaattgctttctgctttttcaagaagaaaaaaacgatgaatgtggtgcggagattaacgagtattgcctctggacgtaatttcggttcttctgatgacgaaggagaaactgagacgccgagatcaaagcctaaccagaatcgtgaagaaacagagtctacggaaactacgtcgtacgagaaag

SEQ ID NO: 128293 - DNA, 531 bp, Arabidopsis thaliana columbia
ggttcacaacttgattcggatcgaaggcaccgttaagaagaagccgatcaatcatgtctagacaagtggcaaggcttatcggatctctgtcatcaaaagctcgccgttgttctaccggcggctcagaggtttttccgtcatgccagtctctcacttcgttgacccaatctcgctccttcgcgtcggatcctcatcctcctgcggcggttttcgttgacaaaaacacacgagtcctctgtcaaggcatcaccggaaagaacggcactttccacactgaacaagccattgagtacggcaccaaaatggtggcaggagtgacaccgaagaagggtggaacagaacacttgggtctcccagttttcaactctgttgctgaagctaaggctgacaccaaagccaatgcctctgtgatttatgttcctgctccttttgctgctgctgctattatggagggtattgaggctgagttagatcttattggtgtatcaccgaaggaatccctcaacatgacatggtacgtgtaaagcatgc

SEQ ID NO: 128294 - DNA, 110 bp, Arabidopsis thaliana columbia
cggacgctagtttcggacgcgtgggtgctgccgctactcgttggatatcttcgtctccggctcgagccgccaagccgagtatgcagcaatgactaaaaagaagaatccta

SEQ ID NO: 128295 - DNA, 99 bp, Arabidopsis thaliana columbia
acagttaaagcggcataacagtagttattaggtgagaatcctgtaaacaagcattgacttgccagatagatgtagtttggagactataatttacctaaa

SEQ ID NO: 128296 - DNA, 457 bp, Arabidopsis thaliana columbia
atcaaaaagtaacacgatactttctttaggtaaatgatagtaaaccttcgatgtcgtatcagtaaaccttcgatgtctcacacacaatgccacaactctttcaaggcgtttatcacgtactcctaatgaaagggaaaaaaagaaaagaaaggaaaatgattttgtggactaggacatgtttctttcgcgcattaaagattcaatcttttcgacatcatcgggtgtgtcaactccatgagcttcatgatctacctttataaccttcattttgtagccattctcaagaactttgagctgttctagatcctcttcttgctgcaatggcgttggttgaagctctgaatataccttcagaaacttcgaatcaaagctctgaattccaagatgaagcatgtacggaaaatctggattgactttaccactcttgttataaggaatcaaaccccttgagaaatag

SEQ ID NO: 128297 - DNA, 222 bp, Arabidopsis thaliana columbia
gtttctttcttttgatctcagattattctcttccacgcagagaataagatctaaagatggcgtcattatcatattacacaagcgatattccttcatcattatcctatgctcagcctatcttgatcaccagctacggcaccggagattacgactttaaccggaaagctacttttatgtcaatgatacaacaacctaactgctcaggtccaccacccaagaaac

SEQ ID NO: 128298 - DNA, 443 bp, Arabidopsis thaliana columbia
gtagacaaagaatttgaagtttttttattcacttgacacaattaaaatcataaagacttaagattactacaacacataacatacatagaattttaaagtaaaagccaaaccagtttatccacagacacatttgcaggtctattctcagcgaacaatggcagagacttcattcttgcaaagacggtctttctctggttcaaagatgaaaatcgattctagttcagctgcacaaccgtacggtgcaagcaacagtttgtgcccaatatttgagtctagcttttacatcatctggatcatcaccagggctagagatcttccaatttgcaattggagcggtcgtggtcggtggtggcgacgaatcatcttcctcctgggacttgtggtggttttgttgcttatcatctaagaacttctggctcatggagtaacaaagctctaacgca

SEQ ID NO: 128299 - DNA, 222 bp, Arabidopsis thaliana columbia
gagataaaacaagttccatcccataaaattaagaagaccaagatttgtcctaaaaaccaaatgtacaatgaaaactgaagcccaaaagtgtataaacgtatccaacttcttcctctcagtcctcaattgtctgaatctctcccatcatgatccggttactaaccacattaaatcccagaaccgatgcgctcaagctaaccttcttccctttcttcgcctttt

SEQ ID NO: 128300 - DNA, 452 bp, Arabidopsis thaliana columbia
aaaagaattctagtgttgacatataatttttcaaatcaatgcaaagtacgcaaaatgttgtcgttaacaaaagtgacggtttacataaccaaacaagattggttcaaccagaaccggttttcatgatagagaaacttggaccagagatgagctgatgttatcatttttcttctaatcttgataggtactaggatgttgttaccttgagtacaaagttgcctttaaaaaccattttatgaagaagaagaagagctctgcatccgttgttttaaccatgactccagatactgcagctcctcattactgattgagtgtccaagacccggataagccttgaattcacaagtcacacccgcttgttgaagaaaaggaagagctgcttgaccagcttcgaatagtacagttcttgtcatcaatgccatgagaccacaagattggtgtcttttagcatc

SEQ ID NO: 128301 - DNA, 345 bp, Arabidopsis thaliana columbia
aaacgaaatacacaaatttcatacaagaccccaccagagatcagtcgactttacattggaaaaccgcaacactttttttctttttttggctgatatcccaaaagtttcttcctttcttatcctttcctgatatatctcacctgccatttgcagcaagaaacgcttgagtctggctgttatcgcctttattcggtttcttatccacccgagctttgggaaccggtaactgaatctgcctttcatgttctttcaacatttcatctaagtttcctcctgcagaaaccaaaggccctgagcagggcattctttttttttttttaccggtaaccggtatagattctttgg

SEQ ID NO: 128302 - DNA, 371 bp, Arabidopsis thaliana columbia
tgctgcttgaccataacaacaatctcaaaattggagatttcggtcttgccaatttttaccaaggtcaccagaagcagcctctcactagccgcgttgtaactttgtggtatcgtccacctgaactattacttggttcaacagactatggtgttacagtagatctgtggagcacaggatgcatactagctgaactctttactgggaaacctatcatgcccggtagaaccgaggtagaacaactacacaagatcttcaaactctgtggatcaccttctgaagagtattggaaaatatcaaaattgccacatgccaccatctttaaacctcaacaaccttacaagcggtgtgtagctgaaacatttaagagtctt

SEQ ID NO: 128303 - DNA, 396 bp, Arabidopsis thaliana columbia
gttaaaataccatatgagagattatgaagatgggccttacataagaatatttgggtttatattagcctaaagagagattacacacataaacgatgaaagtagtagagtcgctacatatacaaacacatggcatatttgatcaaaagttgacgaagctctctaagcagctggtgtctctatgactctctccatgtctcataccctcattactattttaaaacgccctttttgagaatctaacaccaataattgttttgtattcatacattaacaaaaggatgttttgcaataacttaaaaagaaataaggaaaaatgagaaagatgactcactcattcattcactcactgtcttcctttcttagtgcagcaagaagggcatttgtattgcttgatgc

SEQ ID NO: 128304 - DNA, 491 bp, Arabidopsis thaliana columbia
  unsure (1)..(491): unsure at all n locations
aggacaacggtttttatcacattttatgtaacaaataacaaagaatgcaacaaacaagtaaagacgagagcaacacagagctgaaacgattataaggtagttctttagaatccttcgctcgttgcacagcatatggaccgaactaaagatcccatgcagaccatnccgtccttagcaaagtttttnccccaaaaccatttcaaagaaatgaacccaggccccatnngctgtttacccatttcgcttttcattgatcctcaatccattcccactgttattttctctattatcgtcttcctcctctgcagcacgcttgcagctatcgcgtaaagcaacaaatcttctgtcggtggtgctcgtaaccggattctcccccatgtcgccttcgcaatcccagttcgtattgcagcttgatccgcccacattacttcccagagacacaacgtctgctcaaaggttagttctcgtctgaacagaactacaaccatacg

SEQ ID NO: 128305 - DNA, 241 bp, Arabidopsis thaliana columbia
gaaagaaactaaccatttttatcatccatcctattttcacacaagagttttaagaaaacaacttacaagggtggaccccttcctaagggtcatttgatttagtcaaaaccaaaggggggcattacaaactagattggccttaaccctaaaatgctgtttttgtttcacaggatttgatagaataacctggcaagatcaacccacccaatgttttaagaacttatgaacttgggtttttggg

SEQ ID NO: 128306 - DNA, 309 bp, Arabidopsis thaliana columbia
gggaagcaagatttgggactttgtataacttattcaacgggaattgcttgaatagctgaacacgatcgcaaaacaaagagggggccttactggggaaaagcccaccaagtttgggggtgggggcaaaatggttccacccccatcatacaaacgggttctttggtaactggttttaccacaaacgttctttggattcctggctcccattgcttcagaacaaggtttttccatagatcagacccataaggccgctcccaagaagatttggttatccccatcaaagcccctttagatgctaatccccggaaa

SEQ ID NO: 128307 - DNA, 261 bp, Arabidopsis thaliana columbia
ggaaacttaaaaacctttaaaaaacacagattttactccatctgtttttacaaaacccttttacacaagagccctttggaaggccaatgaaaaacctctaaccttggcaactttgtccttgtttttacatacactgatttagcctttgactaccagaacgggggaaattttaagattaaattatgagaccttgtaaagccgcacaaactttagctggcttcttctgttttttcatccatggggcagactggaatttcccag

SEQ ID NO: 128308 - DNA, 415 bp, Arabidopsis thaliana columbia
gggggattgcacatgttagtggaggcactcggcataggcttaaagagagtcactactcaaatctcttgatcattaaccgaaccgcaagtcctcttgcatgggtcgttgagtgcaaagatagaagcaatcgtagcgctgtcatgcttccttattcatttctccctaatatggcagctgcaaaattgagaaacgccgcagaaaagataaaagcacaacttggggattatgatgccatccacgttcgtcgtggggacaaactgaaaaccagaaaagacagatttggagttgaaaggattcagtttcctcatctagacagagatacgcgccctgagtttatccttcgcaggatagagaagcggatcccaagaggaaggactctatctattggttctaatgagaggaagcctggtttttt

SEQ ID NO: 128309 - DNA, 413 bp, Arabidopsis thaliana columbia
atacttaacagggtttaatgtatatttcttagcggaagacaacaatatttcataggtacataacagctatatggtcaccaaaaccaccaaatgaacaacaagaagcaagaatggacatgtatcaatctgggttcaactctgggcaccgatgttttgagcctggaatcacaccccataactgttatatactagaggctaattacatacatataaacactcatttacctttggattagaaatccaggatcatactttgcttaaagcctagttaagaccagcctgcctctcccacctgagatcagccgagaactcagacaatgcggatctaggatcaccttcagcgatagccaagtagtatagagcagttccatcatcaacttgcatgcttctccttagagattcaattagcctac

SEQ ID NO: 128310 - DNA, 223 bp, Arabidopsis thaliana columbia
  unsure (1)..(223): unsure at all n locations
attctacctctctcnaggcaaaaagttaaatggtgtaccttttaaagattttgggcagaagttacagaaaatacaagaacggattatagcacactacagaaaattaaaaacaacattactactcaaaaaacttcggattgcagctgagtaattatgactaagttgcgaagggaaacaccgatttcaagtccgtgaaacttggaaaattgtgtgattgccacaa

SEQ ID NO: 128311 - DNA, 272 bp, Arabidopsis thaliana columbia
aatggcataacggatagcattaagggtatgggtttatttgatgttgacacaaggttcacagggaaacactgatgattttgatagagtggaaatatacaaacaacccgctttgccaacatccattgatgaaagatcacaggatccaggaaacattcagcctagatggaaaaattgcaagaagcagcatatataatacaaaagagcattgtccataaggaaccgacgctattatgagacaaagaaatgtctccaagggcgttcatttgaatacc

SEQ ID NO: 128312 - DNA, 131 bp, Arabidopsis thaliana columbia
gggaaaaaaacccaaaccaatggggtctgttgtttgatgattggaaagaacaactgttttttttacccaatacaatttcattcacatatatgggtgggggggagaacatgaattttgatcattgggggaaa

SEQ ID NO: 128313 - DNA, 138 bp, Arabidopsis thaliana columbia
accccgagtattcctttctacattaggggggcccatgaaacaaaagtctgcccacgggggaaagggggatatactgaaaacaacgccggggtgagaaatataactggctttcaaaaggatttacaatctgaaccaaaa

SEQ ID NO: 128314 - DNA, 122 bp, Arabidopsis thaliana columbia
  unsure (1)..(122): unsure at all n locations
aagaacacaaggaccatgttcataacaaatccagtaggaaaattcttatcggagaacagatgttcagattcgttntctatatgcaaagggatgatattctagctattcaaacggnaaaagat

SEQ ID NO: 128315 - DNA, 248 bp, Arabidopsis thaliana columbia
gtaaaagctccgtaagcttctacgtcttgaggtccgattcgtacctccgttaatctgccgttacctattcaggtacaaatggttcaaaaccggtaaaaccgctagccagttcactttcgccggctatccttccaacagtgtttaattgacgccggcgtcgaattggggaatccggatagttccggagaggaaggcgtttgtgattgagcgattcggtaaatacgctacgacgttgccgtcggggattc

SEQ ID NO: 128316 - DNA, 100 bp, Arabidopsis thaliana columbia
agattggactttcaacagaactgagtcagctcattttacagaacaacagattttccggcaagattcctcgggagctcggaagattgactaatatagagag

SEQ ID NO: 128317 - DNA, 481 bp, Arabidopsis thaliana columbia
atccgaaaactacaatcttaaataacttgtatagatgacaggggaataagcaatacctacaatattcacataaatagagaagagcaagcaaaggagaagaaaaagacagaaaaaagaaaagaaaaactcttacatgatatctgtaatttgttgatatatattatatatgattgcgagatcctgcaaaggcatatgcttcaatgaaaaaactagctagcagatgcagtagtagtaggcagcaaaacttgtttcttgattcatcaaaacttcgattttatttcattctctgcttctccccattatatgcttttaattgtaatttcctgaattcgccacagggttgccagttctctcagattccgactgaaaccattcaagctagaacgagttcatttcaagacagtaagtccttcttttaaccagcatcttagcagccgtctcataaggctcctcaaaagccgaagacacccaagagatatca

SEQ ID NO: 128318 - DNA, 144 bp, Arabidopsis thaliana columbia
cacattttcaggatgtacttggggaagagcaaacttgatcatgagccatcatatgactctcaaaggcttgctgttttcacttccgggtttgtaggagctgacattgggaatgtctgcaacgaagcagctcttattgctgctaga

SEQ ID NO: 128319 - DNA, 131 bp, Arabidopsis thaliana columbia
cggtcgcgtgggtacactataacttcttgccttttatctctctctcaacgaccaccaccatgcccggagttgccttatactgtgttcctgacttcgatctgggaatcttcatctgcgaatccaccaccttt

SEQ ID NO: 128320 - DNA, 243 bp, Arabidopsis thaliana columbia
ggccaaacttttcttaaatttacatgggaaaagaaaacattgggcgaagcaatgggggtttacaatggcatattattggtcaacaaataacagtttccatgtatcaccccccaaagcaaaggggtaaaactaaaaaagcccaaaaagaggggggggcaaaacaaagggggtctttttttttaaggggaagcaaaaagcaaaccggggggagattttttttggttaaccaacaggggggccaag

SEQ ID NO: 128321 - DNA, 110 bp, Arabidopsis thaliana columbia
cccattcgtacgaaagacaagggtatcaagattgcggatcatgagcgagagaagctgcatcagcggcttgctgctcataccaactgccctactggagctgacatagcaac

SEQ ID NO: 128322 - DNA, 110 bp, Arabidopsis thaliana columbia
ccctttcgtccgaaagaaaagggtatcaagattgcgaataaagattgggagaagctgcatctgcacatagcttctcataacaacttccctactgctgctggcttagcatc

SEQ ID NO: 128323 - DNA, 323 bp, Arabidopsis thaliana columbia
aaaagggggggagagcacctttatgtttcaaggaatttatgaatttggggggagagattcaaaatttttccaaaacagaactaaccaaaaggaacaagaaccgaaacccaataactttggttttcagggaagaaaaaaaaaagaacttaaacaagctttgcattggccaatgcccaagaaaaacaaaaacatgttctccattcttcaatggctggacaaggccaaacagttttctaaaacctggtttttccctcacattacacaacaatttggggaaaactcgagcatgtccggagacatttggcccaaactagcgaaaccaa

SEQ ID NO: 128324 - DNA, 376 bp, Arabidopsis thaliana columbia
caatagtcatttttttttttcattgaatgaaacaaacaagacattcaaaatagaacaaaagttctacagagatagagagagaaagagagcttttcttcatgggtggttctacaagcaaggatgagagaaacagtagtaagagacgcatcaaggtgaaagcaaatgaacagagaaggagagaaacaagaagagagcttgatgagaaagagagagtgattttggcgttgaagatggcagagacagagtggaggaaagagaggaagagactgagagaggaagtgaagaggctgagacagaagatggaagagaaggaagaaggaaaggcgaaacaacacgagtgggaatgggtcgtggaacagatgtgtttagagagagc

SEQ ID NO: 128325 - DNA, 375 bp, Arabidopsis thaliana columbia
  unsure (1)..(375): unsure at all n locations
cccacgcgtccgagttagtcaccaaaaaaaaaaaaaaaaaacacaaaaagtttcaatggccgcctccacaatggctctctcctcccctgccttcgccggaaaggctgtgaacctttcccccgcggcatctgaagtcctcggaagcggccgtgtgacaatgaggaagactgttgccaagccaaagggtccatcaggcagtcccatggtacggatccgaccgagntcaagtacttgggttccattcttctggcgagtcaccgagctaccttaccggtagagtttccccggtagactacggatgggacaccgttggacttttagctgatcccgagacattcgcaaggaaccgtgagctagattatccacagcaggtgg

SEQ ID NO: 128326 - DNA, 308 bp, Arabidopsis thaliana columbia
aaaggaaaataatgaaccatgtcgtgaaaggttacagagagcctcttgtaaaataaaatacaatcaccataaagacaaattcacaagaatgtggtttttaaaacaaattaaaggaaaatttgatcagctaaaatgtttcaaaacggattcttttccctttacttttgacctgatgcgttttgcttctttgattcaggcaattccttgggggatgggggaatcacaattgacatacacgatgaaactaaatgtgcattacacgagtgttagttcgtactcaccagccatggttatgtatctcacccatg

SEQ ID NO: 128327 - DNA, 432 bp, Arabidopsis thaliana columbia
ttgttttgccacttatatgggtggaagcacaaatagaaagtcattcaagaagtcgtgttgagatgctcataaaagctagaagtcagttcaaggaacgaagcaccgcaacgaacgttgagattgagttgcctgtaccaaccgatgcatgtaaccccaccgttaggacatctctagggtctgcctcttatgctcctgaaaaagatgcgttagtctggaaaatcaaatctttcccggggaacaaggagtacatgttaagggcagagttccatcttccaagtatcactgcagaggaagcaactcctgagcgaaaggctcctatccgtgtcaaatttgagatcccttatttcactgtttcagggattcaggttcggcacctaaagattattgagaagagtgggttccaagcactttcatgggtgagatacataacca

SEQ ID NO: 128328 - DNA, 354 bp, Arabidopsis thaliana columbia
gaaagagacaaaggcttctctttttgttttctcatttcatcatctcctttgacacaaaggttacagctttaacttaaattgcacacacaaacgtgatgattctatctcaatctaagcgcgtttttgccatgcatactgaattcttcgatcatttctcgcttttcggtttatttacaaagagactgatgtaatcatggataccggggttgttttctttcactggcgatgaccttctggtaaagctaccactttgtggaaaggtactgttctttgaggcaatgctccatcttcctcatcatcgtcgaattcaagcaaatactcgtcagacttcctctttcgtggggtacttactac

SEQ ID NO: 128329 - DNA, 381 bp, Arabidopsis thaliana columbia
acctgataaagaaatttattaagagacacatgcaggttccaaggaatacagattcggttccatgcatcttctaaatacattttatagataaagaatagtgaacacatcagacttgcacttaactcaaaccaagactatgggctccatcttttcttctttgaccttagcatctttaagataaactcgaggaacagcagcagggtctagctcaaaagagccagctgggactccttctttctcatctccagtcattttgaaagatggaactctatgagaaaacctaagcatttcatcacatgatatcatgatttcgacaagaccattttgcgcagcacgttcatacactgatgtgaatccttccactctccctagataagccac

SEQ ID NO: 128330 - DNA, 184 bp, Arabidopsis thaliana columbia
cggaaggaagttttttctggggctttatatatgtatcgagggatttggatccctttgaccaaaaattcaaccgttttaaaattgcccacggaacccttcagggccaagaaagaacataacgcccaaaaacgaataagtccctagggggagagcttaaaaaccgggaggaagggttggggttgct

SEQ ID NO: 128331 - DNA, 290 bp, Arabidopsis thaliana columbia
aaaaaacatggacttggcttattggggggtacccaaaaaacggtagagccaaggactcactacagtcataccatttgatgataggcaggggcataacaccagattacattacctttatcgggttactatttgcttgcagtcatgcaggtcttttaaaagatgctcaacgctactttgattcgatgagaacagtttatggaatcacaccaggaccggaacactatgcctgtatgattgatctttttggcagatctggggatttccgaaaagtagagcaattgctgcatcaa

SEQ ID NO: 128332 - DNA, 233 bp, Arabidopsis thaliana columbia
ggaagaaaccgccggccatgttatgcgtagggaaaatagccgttcatacaaagtttttgtagaagggcaagccccattaagccccttttaaaaaaaaaacgtccgaagaacgtaaaaaaaaaggggggggggggggggaccattcatatgcccccttttagggggggggctcaggggcaattcctttgcgagaattaggaacgtcaaacaagacccttaagttctgcgggggg

SEQ ID NO: 128333 - DNA, 215 bp, Arabidopsis thaliana columbia
tcttttttttaaagactcagtgacgaccctctactaaaggaacactcataaataaactcggtggagacgccggatccaaaaacagagttctaatggagaagaaagaaaatggtctctatggaaagcaattgggacggctcattaacggacccactaatccgatggacacacctctgcttaacgacctttaccaatttcatcatggcttatgctta

SEQ ID NO: 128334 - DNA, 351 bp, Arabidopsis thaliana columbia
tctttttttttttttttttttctttttttttttttttttttttaggagaaagaattttaattcctcaaaattataaacaatctaacgttatccaatagataaaaaaagggactataaaaatccccaactaaacttagagcatcaaatttagattatatcactttacagaaccttttgccagaacgagtcttcccatttgtccacttgccggatgagagatcaatttcttcctatggaacttctcaagaccattggaatcaaaagggggaggacagggaacacgggccagaagcatgaggcctactaactaacgagcctatcataaatttgttataaaccccattaacatct

SEQ ID NO: 128335 - DNA, 444 bp, Arabidopsis thaliana columbia
ctcaactcatacaattcaacagtttcagatcaaaatgagctcccctagaaccatgttactttacttacttcgctaacaaataaatcaagacgttgaaattttttaaatagcttgacagaaacgtaagtggaatagtaggttagggtttaggagcttgtcacaatctcaacgtctcctatgagatatatatattactcatcagctgaggtaggaggagaaggcggtggtggaccggtttcatgatttgacccaaccgtaaaatggtcgatgcatctcaattcttcatcatctccctctcttgatttcctctgttttcttccttttgagcctttcctctcataaacattgtacactgcccattctccagacaccttagccgacgcaaatcccgcaagacaatactctgtcatgctccatctagttttgttgcaataagaagaagac

SEQ ID NO: 128336 - DNA, 387 bp, Arabidopsis thaliana columbia
gctctaatacttgattgacgatattaattaatttatgagcatgacgtgggacaaacaccgtacttagtacgtaatacaagtagttataacgtgggaacaaactagtaagtaacacatttaaataaggaaatagtaatagttgccgtagaagccaagcaagcataataatcatatcttctttgtgactgtgactttaagaccatgtttcatacggagaaggatagaaggaattggttcgaccttgtgaccttcaatgaccttaaagtcatagtttcgtatgatctccagagctaccatcttcatctgcaagagagctagatttttacccaagcaagttctcggaccagaattaaaagccatgaacttgtatgaaggttcatgtcttag

SEQ ID NO: 128337 - DNA, 425 bp, Arabidopsis thaliana columbia
gaataatgtgataaagagaatcagcaaagattcctaaatacaaaaggtgaaaagagagaaagactgctcggccggagcactgatcaatacttgactgtgtttcttattgttctctaaatctatatctctaaatttgagttcttctagttgtagatgcactgcgggaaagaaaagatcgaagctttctattttcattcaccggctagctaaaatgctttttaatctcagattgttgctcggtggacttactttcaagctctccattcatattacagtaccatcttgaattgtcgccttttcgactatcacagtgattcctgatcgaatgtagaatccttcctctggcctatctgcttcttgtacatcgcctttgttcatgatgatcacgtttttaccgatcttagcattcttgtcaatgatgcatt

SEQ ID NO: 128338 - DNA, 333 bp, Arabidopsis thaliana columbia
aggaaaactgtgattatacaaagattgattctaaaacctaaacataactctatctatctcctaaacactctgaaagctataaaaacattacatcttctgattaatgccaagttaatgaatgataagccgtatgcgtcgtgcaagtaattaagagttgcctcgaaggtgtctatgctctaccagaagaaacgtgtccaagattgttcaccggttgaatctgattcactacccaattcgtcatcatagctactatcagggggaagcaacttgattctgtcagcatgctcaactaaccaatcactaaatcctggagaagctgcaagtcctgccatt

SEQ ID NO: 128339 - DNA, 390 bp, Arabidopsis thaliana columbia
gggcttcattttacatttgtttgatgactggatatgtccaagtgaagttacattttgactcatataacttgggtaagttcttaatttctgattgcattcttgtgcagctcacttttttatttgaagactgcactgttgtacaatatactttgggtaatgcacaaagtcttaagagtcttgttgcagaaacctgaagaattttaaagctgtcctgctgtcttcctcactcaaaactttcagctggaactgctcccggtcagtaactcatgatctcccatgatttcttcagttaactcaaagataggtttatcagcactgttcggaaccatagctgcaaacacaactggttccagcccagtttctgggaatgcatcaatgaacatcatcatc

SEQ ID NO: 128340 - DNA, 101 bp, Arabidopsis thaliana columbia
ggttatttggccgtgaccagaacatcccctgtgcacattctatgctgttcaatgtgctgattatcatgaggcagttctactagtatacctccagacatttg

SEQ ID NO: 128341 - DNA, 321 bp, Arabidopsis thaliana columbia
gggcaaaggccaaattatgtttatgcaatgataatagttttagccaattccaagttctaaaatccaaactacaaagccattacatagggagagagagacctcaaaacagaaaacatttgttgcttgcagacacatgaacattgaacaacaacttctgtatggtctgatatcaaattgggattcaacgcatgttctttttttttcggacatatctggtcttggcggggaacttgggttaatcattggttctctgggtcgttaactcaaggatctttctctgtctctctgggggacgttgaactatttctccattcacaaaca

SEQ ID NO: 128342 - DNA, 317 bp, Arabidopsis thaliana columbia
gtaatgatgtgactttattttgacggggggcattgtggagaacattcagaaattatacagagggagaagcaacgagatgttggctcatcaaacttggagacgttcatagcataattacaagcattcttcaccacaacttagtaaaccatatttgataaaaccatcatctatcattttacatttcttcacatcttcgacattgagtagcccatcgcttccacgagaaaatctgcatcgtccttggtgaagcagagaggtggtgtgattctaaagacatttccaaagtagcctccttttccaatcaacacacccaattc

SEQ ID NO: 128343 - DNA, 279 bp, Arabidopsis thaliana columbia
atgagaaaacgcgttgaaaacgatttattgtactaagaaagatccgattaaatcagccattgtccataacagagactatacaatgcacaaatttttcttatttctatcccattcagggcaaccggggcttaactcgttttccactcggggaacaagcattggcaaatatttcttttcgatgtccagatactataacagagtgtttacttagcctcgccacatactgcaataggtccgtttggaaagatgggcaactgtttttcagataatcaaacccat

SEQ ID NO: 128344 - DNA, 308 bp, Arabidopsis thaliana columbia
ggaaacaggaccaaaaattagggggggttacaaaaaccccttgtaaagagttaaagaccgtttttttaaggaacatttttatcgcccctaacgaaggggggggggggaacaaaacaaacccctggggcactagttttcgggaccataataataaaggggaaaatttcctaaaaccccgggaaaaacaaacaaaacccttccctcccggatcaccctttgaattttttcccccaggtttggggattaaccaaaaaaatttccgggaaaggcaagcttttcctttttggggggctaaaaaatttttgggg

SEQ ID NO: 128345 - DNA, 224 bp, Arabidopsis thaliana columbia
gaagcgaaagggcaaattcaataagctcgcaaggcattttgagcataagataactctcatgaactacaaagaaggtcgggagccaattgctaactccagtccatgatataagagtaaactgtagtagtggcgaaatgacaaaacttaaaatctcaaagcaactaaagcaatagaacatatgaaacgtaaaatgaaaggagacaactaatcgaacaagccgaaac

SEQ ID NO: 128346 - DNA, 433 bp, Arabidopsis thaliana columbia
tctccctttttttttttttttttttttagacaacaaagttgctgctgtgaagaaacatgtatcatgttacattatgtatttggagactggaagtaacttacatatatgactttgacaaaatggattgatccatctttctcccctctattaaagtttaaagctcaaacactaagctttgggcagaaatctgaatttgcaaaaggagctgaaaactcgtcgaaacaagccatcctgatacgctctggagtggctggagtctccagagggaaccagttggtgagacctacctcgcttctagccgctttgattgcttcctttattgcaaagaaggctgatgctgcaagaaagaacggtggctcacccactgctttagatgaatgtattgcctttgcatttggattacccttgagaagagaaacattcagttggaacg

SEQ ID NO: 128347 - DNA, 315 bp, Arabidopsis thaliana columbia
catcaaataaaaagtaagaaagttaccggcttcaattgaaagattacaacatgggagacattttccacaaagatatcaaaacttatgtcaatttttcaagaagaattaataattattcattgaaaataaaagacaaaatgaactaagcagagattgggactgtctcaaattgggtagttgttgctgttaggatcctcaagatcatagcctttcagctttgcagctgattcaaccttccccttcaatggctgaagctttctcattcttgcaatttctgcacgccttttagcttcctcagccatattggtaagttcc

SEQ ID NO: 128348 - DNA, 230 bp, Arabidopsis thaliana columbia
gaaaaaacaaaacattttggttttggaatttgaataccacaaaaatctttatcattttttactgggggggttcagctagaaaggggttgaatgtcaaaacaactccaagggccaaaaccccatttagtttaaagaatcccatttgggggccaggggaaaaagcacccccctggcgtttttcgcttcacaaaaaaaagattccgggtggtgggggacctatgggtttgaaa

SEQ ID NO: 128349 - DNA, 235 bp, Arabidopsis thaliana columbia
cttaaagaaaaaaccccgcctaccattcaagaaggaatttcaatgtttttggcctaaagccaaaaacaaaaaaccaagggggccgggggcaaactctttttattagaaacgcccccaaagatacctgggggggtttacccccttttttaaaaacggaggagggtctcaagttttctacccccctacttcaaacagggggggctcaaacccagagggggccccaaatccagggggg

SEQ ID NO: 128350 - DNA, 301 bp, Arabidopsis thaliana columbia
attattacttcattttttttttttaggggctgggttgtttttaaccaaaggagtaacataatccttttattcttcattggaaatgggcaaaactgaggacactaacacagccgccatggaatcacaaagataaaaacccaaaactaaatttagtaatcaggtttctagtcataagctgaactgcgaaatcttttgataggagaatcattaagtatgtcaagcataacagaattgggcgtacacctaggagtcttaaactggtttaagccaccgtattttccaacgcaccttttcgccactt

SEQ ID NO: 128351 - DNA, 134 bp, Arabidopsis thaliana columbia
gaattggtttcctttctacaagaaatattgtatagggcgttgagctatcgaatgggatttctgacataaaatgaactacttgcagaattaagatcattcggaatttgttagggagcggcaagccatgtagagag

SEQ ID NO: 128352 - DNA, 319 bp, Arabidopsis thaliana columbia
ttctctttcgtattttttctagcccatgatattatagagccctccgggtcactcactctcatgacacacagaaaaaagccatcaactctctctctatctgtcacatatccgcaggcgagaacggttgtgactagaaatacaaatacccccacccaaaaaatgaaagaaagagaagaagcgtcagagaactaatagaatgatacaaacgtagatgacgctgggacaaaatcaataaaaatggagagagatggacaaggagcgctagctagggctccattggatcaagaagcatctacatatacaggggagagagaggttt

SEQ ID NO: 128353 - DNA, 308 bp, Arabidopsis thaliana columbia
ttgttgccgcccgaaacatcggcagggtcgaagaacaagcctgcgtcgctcaagcacttgactttggttgatccagggaataagttcctaaactcatcgcagcgcaagattgctgctaaaccaccagcagagcatccggagagaagtgcctgattggcgtatcgcattccattcgccttcaaatcatctattgcggctctccagatacgctctcctctaaactgaagttgtgcagcctgattctggccatctccactgaaagaagcgccatcgcagtaacgaagcttaactctattccagttgaaaaa

SEQ ID NO: 128354 - DNA, 238 bp, Arabidopsis thaliana columbia
ggcaattcaattttttggttatgactctctcaagcaccaattgttattacagtgactgagttttattgaaatgttgtttttcggagtgctctcaagctatcataacggtcttgtttagatgtacttagagaggatagattcaacaactccctgagctatggggtgataagtttctcgagcttttgcaaacacctgttttgccagctgcttctcttctgttccaccagattgtgccaga

SEQ ID NO: 128355 - DNA, 226 bp, Arabidopsis thaliana columbia
aagttcggaattaacatgaacaagaaggtggttctctttactttagttagagataacaacacaacacaacacatcagaagaagaagaagcaacatgtttatgtattgacttaaacagctgtttcagctctggaagggatcttccttatgactgagatggtatcaccaactttgattgttttctttccttcgccttcagggttggttaagttccaattccaaaccat

SEQ ID NO: 128356 - DNA, 346 bp, Arabidopsis thaliana columbia
ggggaaagattgcatttcatttcaaggcccatcatattgaatacaatcttttaaataaacaaaagagttgttttttaaataatcatctgacagttttctttccagttctgggtcgattcaaccttaaatttaaaaccaaatttcgatctttgcaataataattcacatgctaaaaaacaggcaattgcattatcaaaaattcgaaatttgcagagtacacttgttggtctatttaatggatcaggaagaaacctgattatcagagccaatcctgctgttgaagtttcaggggcaagtaaacttccgataagtactggaaaccaaaagagctcaacgcctgaatttt

SEQ ID NO: 128357 - DNA, 289 bp, Arabidopsis thaliana columbia
aacttcagtaatatagcagaaaatggattcaaaacttacaatttcaagcatctatagagagagacaaacagtttggatcgatatgaaattgagaactaaagtctaaattgaggatttcagatatttaaagatagaaaccaaaatccttgatcagccttgtgatctatgaagcacgatagatagccatcaactcagtctccagctgcttgtcctcatgcctcttcacatacctgtttaagaacacctgatcggtacatacgaagacacgcgatatcgaagggagttcact

SEQ ID NO: 128358 - DNA, 263 bp, Arabidopsis thaliana columbia
aatagtgaagactatttgaaattttaactttttcagagacctaacaccaaaagtctgatgttggtgttttgttataggaaagaggtgattacacatttgaacgagccaagagaactggttacttttaaataccaaatgctgacttaactcaagtctatgaacaatgttgggtttgaatttgaaaagccatgggttttggggggtgtactggcatattgtacaaagaaaaagctttttgggagttactctttgctggaatcagg

SEQ ID NO: 128359 - DNA, 144 bp, Arabidopsis thaliana columbia
agagagaccagtcatcaccaaaaaatgattggcctgagagagtaaatcgaacagaacataaaaacagagagtacattgcttgtttgagcctaaatcaccgtcacaacaaacttataaagggattaaaatggagcaagaaaaaca

SEQ ID NO: 128360 - DNA, 355 bp, Arabidopsis thaliana columbia
caagcaaccagttgttactactgaaggggatgaaaaagaaatagaagctacaatttggctgacaacaaaccgtcttcacatacatattcctcctttcttttcttcgcccaaagacaaaaatttctcaaacttggtgttacaccattataggctacagcagaaaacaacattcaacccaaaaccaaaaacagaaaaataaatctgaacttttctttcacattttcgaaaactactttaaaatcttgttctaattatcacgtctcggttgccttttgcgtggtgccgcggttacttcctttttctccgcctaatccccactttttgaactctccgctacttctggtttcttcttttc

SEQ ID NO: 128361 - DNA, 215 bp, Arabidopsis thaliana columbia
ggccattcttgggtaaagaaacaacaaattctagcgttacacaccgccccacatctttgtccttattagaatcatccttccttcaacaaaagatctaacaaaaattcatggatatttgatactttctcacaattacatcccgtggtgttttttattgttcccccatgccccaaaaggtcccttaaaacggaatcgacccctcacaatattggttt

SEQ ID NO: 128362 - DNA, 257 bp, Arabidopsis thaliana columbia
caggaggaataacggggaaggggttattaagaagacacctctcttgtgtggacaactttcactcaaaaaaaaaatatcaagtttgagatcaccaccccaccttttcctgtatttacattccagcaccttccgaaagaataacattaggtatctaaacccttcttttctttttgggttcaacctaacaaggatcttaacacaggaaacaaacaaaggggggagcgacactttcctttttacttacctatgtggaaaat

SEQ ID NO: 128363 - DNA, 162 bp, Arabidopsis thaliana columbia
agcgaacttaaaccagatttaggggtgtgaatttaaagttgcaaacggggtgcatcaaacgggggaagaaacattaaaacattacaacactaaaaacaacatcaagttcggatgagtacgagaatcaattctgactcccaaattttatttgaaaatcccaac

SEQ ID NO: 128364 - DNA, 416 bp, Arabidopsis thaliana columbia
ctctatagacgcggccgcttttttttttttttttttttagttttcacgcaaagaaaaagaaatagatgggtgaattttttaacataacatggggggttaaagaacattacattctaaaaattaaaacttctttatttttttccaagggatcattggatcatcatattatcacttccacatgaagtttctctaaagcaaatgatttctcttctcttttttaggtggctttcgaataaaacacctttttaaccaaaaagggcaagcaaaaagcagctgagtgaatctcagcgttttaataccttaagggacaatgtgatttgatagagctttcatcagtatcgattagactcactggctttttgaaatcgacttgtggtcctttaaatgaacaaagcatgaatccaatgactccactc

SEQ ID NO: 128365 - DNA, 139 bp, Arabidopsis thaliana columbia
ggggccgaatgatttatgaacgtggaagataaaagatacgtggcgcgagaatctgaaaaataagcgtgtggatctaaacaatgacaaggagactattgactaaaagatgctgatggtctccttattttagaatggaaca

SEQ ID NO: 128366 - DNA, 191 bp, Arabidopsis thaliana columbia
atgaacgtgaagatgactggcaaatgctctgaccatgatcatcgtcaaacattttaacaatctcaagctacaatttttttctttccttttgttaaccagttctttgttttttatatgtgttggtgtatattacattagatcagaacacaatgttgtactataaaattttttgggatttttaaacatagatt

SEQ ID NO: 128367 - DNA, 313 bp, Arabidopsis thaliana columbia
agaagttttgtccgttaggcaagtactacaagggccatcagctgttccccgctcttgagccaccaatttaatgccttcacaagtaaccctaatttctgatttaggagtttttagagctcccatctttactttcaccttcgagttcaaaacaatcttaatcgccactgcttttattcgccttcagatctactttcagcttacccgtcgagatctaatcgagttcatgcggaggacttccgatcgtacttctaagcgtagtcgtgttcttcttcccgtgagaaaacgccgcgaatcgttcctttaccaatgacta

SEQ ID NO: 128368 - DNA, 157 bp, Arabidopsis thaliana columbia
attataaatcatattatatagcttaagttgaatgtgttatttttataacaatgtcacagtcaaccaaaaaacaatttatagtaaccggaatttcttactggatactacaaccataacatatatattttacaaacaacttttcatctttgatattaaa

SEQ ID NO: 128369 - DNA, 196 bp, Arabidopsis thaliana columbia
aatcaaaaatgacttttgtatgtgaaaatatttcagacacaacctgcaaaccctgtggttgcttttacttttttgtttgctttgctctcgcaaagaaacacttcttgtggtgcttctgaggactcaatgtccgcattttctgactaaagccataaaaccaattccagcttctattggttccctagccttaacttcc

SEQ ID NO: 128370 - DNA, 107 bp, Arabidopsis thaliana columbia
ggatcataatgccaccatatttactccattgccggttaattttcataagaatctgggggtcataattacagaagaaggtatcaaagatttaaacaataaagctccat

SEQ ID NO: 128371 - DNA, 285 bp, Arabidopsis thaliana columbia
aacagtataaattggatttcttgatttatgtattctggaaccaattgaaccaaatggttacacagatgaggcgtatcgtaattatacaactctgtactagagtatagacaaaatcggatgctttgtgttgctttccataaaaaacacaggcaacaaaagagatgtggatgaaggaatgttacaaaacagaagaggttttattcactttcaggtgaagagtcctgatcaagattcgttcccacaacaggaaccgtgtctggcgcacgcccatgaaccctgaaccgg

SEQ ID NO: 128372 - DNA, 182 bp, Arabidopsis thaliana columbia
gaattcagacacgggacgcgtcttctcatcctaccggcaattcaatattcgacgacaatatgccggactgacactcgacgaacaacaatgatcttgcgtatactcacttacgactagatgactacgtgaggttatggaactcatagagagagagattggggagagactcgatcaaacccttt

SEQ ID NO: 128373 - DNA, 194 bp, Arabidopsis thaliana columbia
tctattttttttttgttttttttttatttgatgttttttttttttggatcgcgaccataagtattatataactgctgttacccaccgggccttgatgacaaacatgcatataccccttttgtggatttttggcagccgggcccttttggcgaattattgaagccgtacccttgggtgggtttttcgcagccgta

SEQ ID NO: 128374 - DNA, 185 bp, Arabidopsis thaliana columbia
gggggcacaactgtgcctcgatttatgtaacgggtacattagaaattcaaacggttggatcttactatatgtaaaaagaagtcgcatactctaaccagagacatgccagaccaacgcatcacgaggattcttgctttattagtaaagctgcgattggagattaaggcttaatagcatatgtaaaa

SEQ ID NO: 128375 - DNA, 274 bp, Arabidopsis thaliana columbia
ctgttccgggggttttgaacattggtttccgaatttggaaatgggttattaaatctaagagagaccgttcttgcataaggttgtgtcacaagatattttgtagcttttaaaaaacatggacactttttttaattggtttcttgaactggaacagagttgttattgtagcccgtctttgtagtattttcctctgacactttgaagaaagtgtaagacactatcaagttgttgattccgtccattcttggaccagtctcaaactcaggatcaatgt

SEQ ID NO: 128376 - DNA, 295 bp, Arabidopsis thaliana columbia
  unsure (1)..(295): unsure at all n locations
tntactttttctcttttttttttttttttttttttttttttttttttttttaaatttttttgtgtgtttttaaaaaaaaaaaaccccttttttaataatcgggaatcggaaaactaatgattttcccatacaaaaaacaaacatgctggatttctttttattaccaacggggctgggcccaaataacccaaaaaattagcgggccccaaacgaattaaacccccctcaaaatcaaggggggaacttgaaaattgttattttcccaacaactgaaaaactttcttttccccccccc

SEQ ID NO: 128377 - DNA, 327 bp, Arabidopsis thaliana columbia
ccctctattcacgcagccgcaccattgcgtttcttcatcgaggaaaaaaaaaccaaatcaatctcactcttgtagctcactattctccagaaatttctaagatttagctttctctaaagctcgatcgaactatctgggttttggtttaaaaggagatgatgagttcgtatcgcagcttacacggctgcgatgttttcgatttgggtttgtgatggatggtttgaagatttcttgtcctgtggatgtttcgttgccggctaagcttatgggatctgaagggtgtggtggtggagttagggttttcgtcgaataaagcagataacaact

SEQ ID NO: 128378 - DNA, 181 bp, Arabidopsis thaliana columbia
aaaaaaaaaaaaaccaggcattggattttgcccttggttggccaaatttctgaaaaaaccacccatgggataggtaacctaaccccggggggggtcattcctcttgacccattttacgggcctttttcccagctcttggccccggccccagcttaagggtgccccctttttggggcaaccc

SEQ ID NO: 128379 - DNA, 264 bp, Arabidopsis thaliana columbia
aaaaattaacccccattaaacccaatttggaagaacaaaagcctcggccatatattggatttggttatctaacccacaggggccaaaattttttcaacaaacagggggttgttacatttttatttttaaaagaccaagaagcttctcataacaaaaacccaagaccttaatcaattttgaaaatattagggggtttaaccaaaacccaaagtctaaacaggggcttgattaaaattggtctttttcaactttttaaaaactttc

SEQ ID NO: 128380 - DNA, 178 bp, Arabidopsis thaliana columbia
cccgaaattatgttttcaaagggtcaaataccgggataacaaaatgggacatttggttttggtcccaggtttgaaaaagggcaaaacttgttccaagaaaaattttgaaacaccttaaggggccaagagacttaaaaattcttacctttgggggggcaatttttctaagcccaacccc

SEQ ID NO: 128381 - DNA, 271 bp, Arabidopsis thaliana columbia
ggcttccctaaaactgaaaactttgcataatcacaatcaaactattccagattacatacacattatgttcagagacatcaatgatccaaacacaacaaagaagaactcatacctaagatccaatttcatatctcccatcattctgcaaaatcatatcatacacctgagaagaagaagaccctccatttctcaatctcccaccattaccacgattttcagtcctccttttacctccatcattacctttttttcttaccctacgaccacgtaa

SEQ ID NO: 128382 - DNA, 291 bp, Arabidopsis thaliana columbia
gaaatgagaggcactgattttattagaaagaaatttaggtccaaaaaccagtgttttacagacaacaaggaaacctaaaactacaaactcaaacaacaaaaatcttcctttaattcagaaaggtcaatgaaaagagtttctctcccaaactaacgggataacttaaaacaccagaaaaggcgacaaatcaagatcacaatctattttgtttgtttgtatattgttcctcaacgcatgaaaggggctaaccaacgcatctctgctccatttccatttgccagatagtatatc

SEQ ID NO: 128383 - DNA, 122 bp, Arabidopsis thaliana columbia
agtacattagacccccatattcaacagttaatggaatacattgaacggttgggggcaagaaacccattccattttgctacggtggcctagtcaacctaaagcgagttttatatgctaaaagg

SEQ ID NO: 128384 - DNA, 348 bp, Arabidopsis thaliana columbia
gatcaaccacaacttttattcaaagagatctatacaaacagaactcaccaatcttatctctttccttgtccaccttgctttccaatctcaagctttaactctccctgaaaatgatgataaacgcaaagaagctcatgaaaatcgcctattactggaagcagacatcatccctcaagaaaaaatgaagttcatttcacagatcaagtattactactagcagccaaacagctgcagaaaagggttgcttcgtgggtcacacggctgataagagccgtttttcatttaccttaagtcacctaagcaacactattgagcaagagctcttgaaaatatctgaagaagagttcg

SEQ ID NO: 128385 - DNA, 347 bp, Arabidopsis thaliana columbia
cgaattcccatttgtaataattgtattcacattattcatattctccagctacaaggtgtctttgagtgtagatgtcaaacaaagacctaatctgtgtctgtctctgttttaagtgccagacgccataagatcttggcccagggaagactcgtcgtcctcaaccaccatccacggcaatataggtcccttcccttcccttatgaccttgggatatggtcctgtcatatccaccatggtggatggttcagccactcgtatacctccggctaccacaaaatccagaccctctggtccatatatgtcacctactggggttgggtcgaccatccattcattttctttaggcc

SEQ ID NO: 128386 - DNA, 459 bp, Arabidopsis thaliana columbia
gaccaagactaaggggagaatttcacatgaacggaaatggagagttacagtaccatttgtaataggaattagaataggaaaaatgtttcaagcagatgttccagactggtcaggtccaacaatgagtgatacttcttttgtgggtgaaccattggaaattggccagtcagaatacatgcatgatctcaagaaggccaagaatagtaagaaacaatgttctgcagtgaattggcttcaatgcagagaagaagatactaatggagttatctgcggaaagtggcgtagggcccctcgttcagaggtacaaaccaaagactgggaatgcttctgctgcttctcttgggatccatcacgtgctgactgtgccgtccctcaggaactggagacaagtgaggtccttaaacaactcaagtacatcaagatgcttagacctcgatcagacgccaaaaagcgaaaact

SEQ ID NO: 128387 - DNA, 391 bp, Arabidopsis thaliana columbia
gtccagaagtgtaaaatgattgacacaaacagtttggttcagagttcaggcctttataattctcactggtaaaaaagttcacgggatgacttggaattcataaactctgcttgaaacacaatgcataattctagaattttgcatacggtatgtaatgatcctaagacactgctcgcacttcttttcgtgttctcctcctcaattgcctcacatttgtagtgtcacaccctaatacactgctcgcacttcttttcttgtttgattgtccactcgtcgagctcttatctgctgctgcaacagtgttcagcaactcagataacaaagtgggacagctttgtttcaagtgcttgaacccttcggactttcattacagttcccaagtttgctggag

SEQ ID NO: 128388 - DNA, 205 bp, Arabidopsis thaliana columbia
ttctttttttttttttttttgacatgaagaaggcgtttcaatttggaaacacccaccacacacgctcgacggcaagaggctactttctccacaagctaaacatactttgggggggaaaagaaattaaactagagctaaacaaggttacaaattaactaatattagaacaaacaaagcgcgaaacaaattcaaacttaccaaccct

SEQ ID NO: 128389 - DNA, 283 bp, Arabidopsis thaliana columbia
tctttttttttttttttttttttttttttcttctgtaaattctctttattagtttcatttagatcataaattcatttgaagatgaggagagatgcaaagagaggaaacgttattgcacagttttttgtttgcactctttgcttctgtcttcttcctcccatcctaagcagttgcggatacatcatgacaccaattacaaaacctttttgttaaaccaaaccgaaatccaaacaaatctgggccaagttcacacctaaagtttcactgtacacacttttcctgc

SEQ ID NO: 128390 - DNA, 260 bp, Arabidopsis thaliana columbia
gggggaacaaagttttttttgattaatgacaaatcatacaaagtttttgaaaattaacatgtgaaagttttttccatccaccaaaaacacaagccttttttttttcctcctgtttttcactgaagttcaaaagattgaaagaaaagtaatttccaaccagatagaacttggttaattttcggggaacaaagttgggggaaagggcccaagggtttttggtgactggaccgcccaaatggtcaggagggttttttttgggc

SEQ ID NO: 128391 - DNA, 362 bp, Arabidopsis thaliana columbia
gacccatttcttggcttacaacaacaaatcttaaacgttttactttgtgctgcactactcaacctcaatggccgcctcaacaatggctctctcctcccctgccttcgccggtaaggccgtcaagctttcccccgcggcatctgaagtccttggaagcggccgtgtgacaatgaggaagactgttgccaagccaaagggcccatcaggcagcccatggtacggatctgaccgtgtcaagtacttgggtccattctctggcgaatcaccgagctaccttaccggagagttccccggagactacggatgggacaccgccggactttcagctgaccccgagacattcgcaaggaaccgtgaactag

SEQ ID NO: 128392 - DNA, 133 bp, Arabidopsis thaliana columbia
aaaaacgggccaaaattatgtacaaaaaaccaaccgaaaattaatacacttcaaaaccacacaaggggggttttataacagaaaacattacacgggactcggttttagttttattgccacataccaaaaggac

SEQ ID NO: 128393 - DNA, 306 bp, Arabidopsis thaliana columbia
cgactcagcgcaaagcttctccaaagattcccccagaaaccatccaacttcctcccatttccacctcatcctcccgctgaagctgtactcttaagctgaagcatcgtcgtcctttcttccttgtctttgtaataattgtactctttctaataaacaatccacacggcacaatgcagcgcgcaatgagctcccgcgtgcgagcttcggctctgaacgcggctaccaagtaccgcaccggtgccggtcttggacagcaggttccgctttgctcacaaggagctcaaggtcggtgttgagggccgcgct

SEQ ID NO: 128394 - DNA, 228 bp, Arabidopsis thaliana columbia
ggatactgatcattattctttcttaagtacataaaacacacaatgtatgcatacatagatccaaaaatccgtagacattgatcacaaaatgtttcaagttgcattttgaaatattcttatcattctttctctgcttcttcacaacaaactccatagatcatatttatatcaagcttccattaacaaccaaaagtcggggtttatttacaaacgcggtaaggacggatt

SEQ ID NO: 128395 - DNA, 237 bp, Arabidopsis thaliana columbia
aaggtaaatgagatcttacaatacttgagaaggatcagctccaaattttttaaattgtgacgaaattgaagaatacaacacaacaatgcatctttagatctaacacttacagatcttcatcgaatctatacttaaaacataactaaaaaccctgagaatccaggtttcgtttgttctctaggatcagaatcatcaaattcgagctttttaaacttgtcctgtaacaacagaagcagc

SEQ ID NO: 128396 - DNA, 327 bp, Arabidopsis thaliana columbia
gcaaaagtgagttatgtttattgagagattcacaaatcacaacaatacaattggattgagaaacatagagaacataagtcatgactcatgagtatctctaatggaaaaatgaaaacacataaatataacttcatctttacattcactttttttccaatctagccaggatcgactctgcgaaactctgttgcttgcgttcactatgcttggggcttggtctcgaatacttcaagtatccatcccaagggacctttttgagacccgcccgaagagatattatgtctctgaccctttttgcaaattcaattcctgtttcaccgggcctta

SEQ ID NO: 128397 - DNA, 278 bp, Arabidopsis thaliana columbia
tctttttgattatgctgcgccagactatcccgtagttaaaatcgaaaacttacgtgagagctaacatttttggaagctttcctgataaagacggtttaccagcaatcaagcaaaataatgattgtcacatacacaacttacagacaatgctgtaactgggacctgtccactcacactcacatttgggtcaattccagatggtgagggcagttttggcttcatatgagttggcggattgtgcttgagtttcgtgagcgcttgacgcatacgagacagat

SEQ ID NO: 128398 - DNA, 284 bp, Arabidopsis thaliana columbia
cttcttctgcaatgcctcttgcctcgcgttatgaaggtccttgaatgcttcctctgctgccttttgcctaccactctcagttttgttccgcgcctgcgagctgagtctgtatcgtcctactaagccgatgtaatatggaattagcgccaccaaccggacaatatcatccatatgtttagcatcaggtaaagaaaacttgaaaagcatcatcttcttttgcatagtttttgcagcctttttcttcgtcatagcaaacacaacatgatccatagtttcttcattca

SEQ ID NO: 128399 - DNA, 356 bp, Arabidopsis thaliana columbia
aagagaatccgacaggttttattaatatatgaacaatttgctaaagtagcagtttacaagccaactcacagcacatattttcccatgtttttatgcaataaaatctagaataaaaagcgaaatacagttagctaaatcgatttcctcactagctcaagaagagagaaaacacaacaacgacgaaaacaatgagtaacaatatcctcaagtgatggtcttgatgtccttgtcgacccgtgtgccgctggtaactatgcatatgcgagtgtcctccatgaaacggattcgagaaaccgtgagggaagccgccagaagcagcagctccatacatggctgcatcagggaaaccatggaaa

SEQ ID NO: 128400 - DNA, 160 bp, Arabidopsis thaliana columbia
gtggaaaaaaatgggataattaaaaaccttgggagttactggagcaacgccatggaatctcaaatggaaacaaatagaattatcattttaagctgcacccataaggggggacaattggcttaaagattttacaaaacaactacccgttttgaattggggg

SEQ ID NO: 128401 - DNA, 139 bp, Arabidopsis thaliana columbia
agaaagaaaagacgtgttaactagttatttctcataaaacgtgagaaaagagacaaaagcgatgatgttattggaggcaaaaacgatgatgttattgttgggggtagaaagagacaactgaatcaatgaactttaaata

SEQ ID NO: 128402 - DNA, 208 bp, Arabidopsis thaliana columbia
agagactaatgccgaatattattcccttatatgatgttcttctcaaaataagtaagaaatacatattatgaatttaactttcttagcccaagaagcccatataaatagttgtataaatccccagctgcttagcttttttcttcaagggtgaaaacaaaatgaataaacccatctcacaggcgaaactaaagaggcacaaggcgcctaa

SEQ ID NO: 128403 - DNA, 304 bp, Arabidopsis thaliana columbia
cacatataattttttattttcttcttcacagaaggaaaaaaagatgaattttgttacaccatgaatgaaagtaaatggaagctgcacattaatacactggataagttggcactgttcttgaaactccccaccttaaagcgggatggtaagattaaaaagccttactcttttctctctgtgacaacatactttatgtacttattgacaaaaaaatttcgtaaaatccaattcgttttcgtcaacctcatgcactcttttcttgtgtttcttcttcttcttcttcatcaccattttattttactat

SEQ ID NO: 128404 - DNA, 209 bp, Arabidopsis thaliana columbia
ttttttttttttttttttttttttttttttttttttttttttttttgttttttaggaaaaaaatggaaacttaattcattcgcaaacataacattttttggtttcccaaaatgaaaataaccgattttaacttttaaaacaaacataacccattcatattgtcatgccgatcgaaattatcaatcagaccatttatttatcaatcttgc

SEQ ID NO: 128405 - DNA, 203 bp, Arabidopsis thaliana columbia
tttgttttagattttttgcaatcaaaaattcaattaacatatataaaacatatgactacctgttggatgcacatacaagtgaagatagattgactattgtttgaagataccgaccaatacattgcataatgtaccacaaaagctaatgaaagggctctaaatgaaaacaaagccacttgatatattgatcaacatactatgga

SEQ ID NO: 128406 - DNA, 203 bp, Arabidopsis thaliana columbia
aaaaaaaaaaaaattggaatttcccccgaaattgggccccattttataagagtctgaattttggggtaaaagccccaaaaaaaaaaacttggaattttttagagcgaaaaacaaagagtttgaaatgataagagtttgggaccaaagaacaaaagattgaggggagaagacaagactttcctcgtttaaaaaccaaacccccc

SEQ ID NO: 128407 - DNA, 108 bp, Arabidopsis thaliana columbia
cggggctaagcgacctgccgaagctgggggatgtcaaaatgcatcggtaggggagcgttccgccttagggggaagcaaccgcgcgagcggcgagcggacgaagctctc

SEQ ID NO: 128408 - DNA, 216 bp, Arabidopsis thaliana columbia
ggagggaaaaactttggaccctttgtttcaaaggggcatttccaaaatagcggccacaacagtttgggaccatatagctaactattactactggattttacgaaaaattgggtgaacaaaagggaaaaaagaatcaagttacggggtaaattacaaattgtgggttttttgtttaatacagggaaacaaagcattttcaaaaatcgggttgaacca

SEQ ID NO: 128409 - DNA, 341 bp, Arabidopsis thaliana columbia
tttttgccgccctttttttttttttttttgtaggtggatcatctaaaatgacagaggagagctaattatttataaacttacaaaataaaaattgttctttttttgaccaccaaccctcccaggatacctttaagaaaaagaaccctagatttacagtaatttcttgtaaataagttttgagatagagagacagagaattacacagttaacaaaaatataatttaagaaggaagaaccttcttgacaatgtcttcactaagagcagcaatctgagaatccaaagctttaatggtttcttctttctgactctccaagctcgccaaagcttcttttagctcttc

SEQ ID NO: 128410 - DNA, 138 bp, Arabidopsis thaliana columbia
ggaaaaaaccaattccatattaatattaacggtccagtcttccccggttgggtttaaaaccatgggggggatcctctatagaaaggggtgtttattatagggggggtgaagctcatgaaaaaccttttcctcaagctg

SEQ ID NO: 128411 - DNA, 206 bp, Arabidopsis thaliana columbia
ttttggccgccctttttttttttttttttttgggggacaaaccaaaaactttggggtcaataatacaagaaaaaagaaacagagggatttgattattggtccatggtagatgtttaaagtgaaaagacagatgaaacataaaatcaagtttaagcttgaggtttgtcccacttgagtggcttcacgaccttccaggtgaagtcagg

SEQ ID NO: 128412 - DNA, 237 bp, Arabidopsis thaliana columbia
ctaaaaaaggttttgatattccataggtaataaaagggaccctcattgggatatgaattttatcaggaacccacacctgaggaaggcgcccatattactttgggacatggcctgcttaaccaaatcatcccgccattttttttgccgattttattatttggatgattcaagagaatccaaaaaggtggcaaataagatttcatatcctgccgtctgtcggccattttttttgggttg

SEQ ID NO: 128413 - DNA, 306 bp, Arabidopsis thaliana columbia
tgtgtcgcccttttttttttttttttttttttttggcggaaaagtgtatcacaaaacacaaaatgtaaacaagtttgaatagtttatgatcttttcttacaaaatgactcttctattatacagcacttgaccgatcttcattgtaccgtagcgttaacgaagagtttgacttaacttggggtgaacacagaggcaaaatcttcagtggaggaaaaatgttgtcactctcactagaccgggtttccgggtcgggttttaaatccaagaaagaatatttgttcggaagaatcgacttgcagcttaaac

SEQ ID NO: 128414 - DNA, 369 bp, Arabidopsis thaliana columbia
agtaataattttctgatttcactgaatccaagtaaatgcctagaggaacaacaacgacgattctttccagctggaatattaatccgaagcacgaggcactgtaacggtccaaaaattccagctggattgcataactactcttaaaggcgcactctaacctactcctacttcactctactgttaacctacgcctctgtcagcgtactctagcatgacagttataatttcatcggcggcgaggttttattcgattttatctgcctttcgatcagttataacagaaacgcgactcgcaatattttaattggaagtaaacaaatcgacatgcgatgcgacgaataaaaattaagattgcgattgctagaagtc

SEQ ID NO: 128415 - DNA, 143 bp, Arabidopsis thaliana columbia
cacgagctcttttaacttaaacaattggggatctttagaatataatctatccatgggaccgcaacaccacgggaatgaccatacagacagaacggcaaacgatctactaaaacatatgaaccgatgtaactaatagcatatag

SEQ ID NO: 128416 - DNA, 250 bp, Arabidopsis thaliana columbia
ctaaattaagtaaacaaatcctaaacacaaacactctcacattgtcaccatacacaaaaatttcaaaacacttaagaaaaaacaaatttaaacagaagaatatatatcacaaaaccaaataaacattcagtctttaaatttcccacggcggagataaacaatctccgatactcttttcatcaatgccgatagcgaaaccgatcaaccaaaacactactgttccatatccaccacaacattacagtaaacc

SEQ ID NO: 128417 - DNA, 244 bp, Arabidopsis thaliana columbia
tttccgcccttttttttttttttttttttgtttggttttttttttttttttgtgtgtttttttttaagaaaaaacttgggagaagagctttattttcaaatgggattcaacccatccgtttctcaacgaatcaagaaagagttaacattggtcaaaaacagacacataaaactcttacttgaacaaacacacttatgacaaattaaattaccaatcggcaaaacatttaatcagtatgtatttt

SEQ ID NO: 128418 - DNA, 110 bp, Arabidopsis thaliana columbia
atataggtttgactcgttgatcaacgggggttttaaaaagaggtgaaagatgacggcgacgatagatcggaggttatcaacgctgaatccaaacgcgccggtgtttgatc

SEQ ID NO: 128419 - DNA, 218 bp, Arabidopsis thaliana columbia
ggggaaacaaaagatatctaggggtgaaagaataccccagcccttaactttaagctaaggaagacttcaaagttaaaaacatgtttttttaaacttcgccactgggaagcttaagtggccccgttggtttgggggccctcaaaagggccctgaaaaccaaagggttccagctttacggggggggaaaccaggggggtcacagttttttcccttgaaaa

SEQ ID NO: 128420 - DNA, 402 bp, Arabidopsis thaliana columbia
cctcttggtttgaagctaaccacaaagtcagttaaagagtttccttttttttctcagttgcaaaatcaaaccaattatacagagaaataggcccaagctgttatggccaataacgagctaaaagactagccaaataaagacagatcgagggtagtgagagttgtcactacaggctattctctacaatacaacatttttaagctcgagctcttttgttgctgcatgaagggcacttgtattgtttgatatgctcagctctagctggagtgatcttcacacacttgccatggaaccacttctcacaaaggtcacagcagatccagaattcatcagcaccatcactgtctccacaggctgcacaaagggtttccccggggtcatcctcatcatcttcatctattt

SEQ ID NO: 128421 - DNA, 289 bp, Arabidopsis thaliana columbia
tttccgcccttttttttttttttttaaggcaaaggctttaaaagataattgtgagaagtatatgataacccaaaggtttagcaatctcgagagttaaagaaagaaaccattatacaatcctcttaaaacgaacaacaaagttgcttactacaaaatattaaaaagcagattgattcataggtaaaacggtgcgactttagatttactcttcgccattaccgtctgcatcaccgcctcctgaggcttttttggaggcagacttctcgttccttctctttactcttccctt

SEQ ID NO: 128422 - DNA, 442 bp, Arabidopsis thaliana columbia
gacccaataatatggtcatgtaaaaatgtgccaatgggctttacaaaagagttttatcaattcatattttctctatatatatccttacaccttaatttcaaatcctctttgaataataatcatttagtagcttttagagatgcgaggcattgctctattgctttgtctctcatcgtaaagccttaaaaccactggcgcagtttcctcaattgcactctctgtcacttcaatcactggccaagtcggattctctgcaaagattttcttggcaagctcaagctcttctttaacagaacctaactcagagtacttagtcttaaaactcgaaccaagtccaagactcttggctctagcctctcttatcccttgcaacaccaatggattaatcatcaaaccaaaaacctttctcgggtcgatctcaaacaaagtcttgggaagatca

SEQ ID NO: 128423 - DNA, 105 bp, Arabidopsis thaliana columbia
tgttttttgctcagagaagcaggagagacggtgacagtaaccatgtgccgtctctctggtcactgccttcaccgttctctcactctgtttacacacttcaacatc

SEQ ID NO: 128424 - DNA, 298 bp, Arabidopsis thaliana columbia
agggaaaagatcgttcttttcaatcaaaagggttacaaattggctgaattcgaaatagagaaaaccccgaccgaccttttttcccattacaaagggtaaaaccgcttggggccaacaaataagcccccaagagccacccagacttgtgggggggtcaaataaataaaataaaccaaagggttaagatgaccaccagacccccagaaccaaccaattgcagaatcccgtaaatcagatttggtgggagagttttggcccaatcatgtaacataatttacgaggttgacctttttcattg

SEQ ID NO: 128425 - DNA, 350 bp, Arabidopsis thaliana columbia
aagattatctatatttacgtataattatgatataacctcagattcatgaataacaatacaaggttcataatcgctatactgctaaataacaaacaaactccaaaagagcagaatatacaaaaccttcattcttctgcttggactccaaaatagatgtggagccgatcacaagctattatttacttgtttcagacttatggagctgcagaagtaatgaatttgaaacgacaaagatcgagctcaatgccattagtccaccagataacgaaggtgtcatggcgaaatcatactgaggaagcaagacacctgcagctatagggattgagatgacattatacgcaattgcccac

SEQ ID NO: 128426 - DNA, 154 bp, Arabidopsis thaliana columbia
tcttttacctttaccaaaggtgggcttctatactctttttcatcgcacagagataatggagttggatcttacacctaaactgcccaagaaggttcacggaggagatgggggatcttactctggctgctgcccagaggagtggccaatgctcaaa

SEQ ID NO: 128427 - DNA, 321 bp, Arabidopsis thaliana columbia
aaagtcttagcatatagttgactaaaaagtcaaaacaaagtttagagaacaagttgtttaaagagacgtgagagatacaatcattacatgttggttgacacgagtcagttctgagatcaagctaaaacgtgctaccaaaaacacacaaaaaaataactagattgatacaagtagacactgagattcaagaagcttacgaatctttcaaagcctgtgtatgaacacttgaggagcttcttccttctctttagcatcttggtaagtgtggcttgatgcaatggccaagagttctccagtgtggtcaaatgctaaagacgcgat

SEQ ID NO: 128428 - DNA, 289 bp, Arabidopsis thaliana columbia
cttaaaaaaacagagctcactcaaattacataaaaattgtagaagcagagattatcaagaacatgatctcataagctcttctaagtattcagcacctaaatcctcaagaaccacaagtgttgtattactttcttgcgtcataacaacactttgttttctacttctggacgacaaagaagaagaagacgaagaagatgaataggaggaggaggaagaaggagaagaatgtcaacgtcgaagaagaagaagatttcttctttcctctaggacggtttttcatggagtgttt

SEQ ID NO: 128429 - DNA, 274 bp, Arabidopsis thaliana columbia
caaaccaaaaggttaaacctttggagggattataggtgacttacatacaacgacttaatacgaggaaatacaggggttataatgatccagtttattatgaaacatgaacaaatgcttgtaccaaaaactctaaatcttttgttttttccaatgcgataagttcaaaagcagctctgttgagggataatcagtgtttccggttgggcgtggaccgttttaaaagacatgaccaaaaggggggttccaaaccggaaagacaactttttggctaggc

SEQ ID NO: 128430 - DNA, 457 bp, Arabidopsis thaliana columbia
aggagttagagcaaatgctctttgaaatactaatccgaccctttccattgatcgcattgacaagtcacatgctaaatggaagcgagctgacattcttgtctttaacactggacattggtgggttcatggaaagaccgccagaggtgcaggaaaaactactacaaagaaggtgactacatctacccgaaatttgatgctactgaagcatacagaaggtcgttgaagacttgggcaaaatggatcgatcagaatgtgaatcccaaaaagcagcttgtattttatcgcggatactcctctgcccattttcggggaggtgagtgggactcgggagggtcatgcaacggggaggtagaacctgtgaagaagggttcaatcatcgattcctatcctttgaaaatgaagatagtccaggaagccataaaggagatgcaagttcctgtgattctttaaacgtgac

SEQ ID NO: 128431 - DNA, 178 bp, Arabidopsis thaliana columbia
aggaaatcaacattattttttgctcactttataacatcaaattacaaccaaccatctattccgcaataatgatcttttaaactcaaaaacttgtgcatttgataaagaagaaaaaggctatttgtaattaacggtacataatcgagctggtgcatcattctctcaagcaaaaaacatg

SEQ ID NO: 128432 - DNA, 169 bp, Arabidopsis thaliana columbia
attattaaagtggggagtgagagccagtcatatttatcaaccttaaaaattgtcgcatagattatccaaaatccaaagggaaataaaatcctaactgtgtaaatatatgaccaaaacaacataagatcacctggtccagaaagaaagtacctccattaccactatatat

SEQ ID NO: 128433 - DNA, 265 bp, Arabidopsis thaliana columbia
  unsure (1)..(265): unsure at all n locations
taatagtatatatatagttgccaaactataaatttagtgtaacaagaatcacatgatgagaggatccgaacacaattttgtaacatatcatacaaacccaaatagcatcagaaaatgaatagccgatcggtatctaattatctatgccatggacctctttgcttctgaataaaagttgatcaactatgcccttgtaatgttggaggaagctgtggccttttcagcttgaaagttggagtaatanagatctctttcaatatcaaaa

SEQ ID NO: 128434 - DNA, 373 bp, Arabidopsis thaliana columbia
gttctcaaagagtatctgtatatattccaaccatataacaaaagagagttaaaaaaataacaagaagttttccctcatgtattgtactatcgttatgatttattcatctagaacgcatttatttgtgataatgtttatttgtagtactgtgttctaatttggtccttagctagggtccttggtcaaaaggccttattgtcattagactttccggacatcacagagctcatccacaccgcctcctctctcaaacacagcggctgctcccattcccgaacctatacacattgacactacgccaaaacgacagtctttaccacgtcgtttcatctcatgcagcagcgtcgcaacgcatctggctcctgtagcgccc

SEQ ID NO: 128435 - DNA, 376 bp, Arabidopsis thaliana columbia
gaagaaactgaaaattgattggttttattccgtgttctagttctatggtacaaagtacaaacattaaacatattacaggcgtgtgaaaaaacaaatgaaaaaatttctctatggactatagaagtctgacttactatcctgcaggataactagtaagtagtaaaatcctttggtggcagaaatgtacaaaaggaacataaaaaaggaacaactggtttccttttttcttcagggcataaacgaatcgaaaaatgaggtctcctcgtttggttcttcctttgctctagagaatccaccaccaacaaagttttgttgcgtttgaaggttgctgttgttgttattgttgttcatggcgtaaccaaaaggcccggtatta

SEQ ID NO: 128436 - DNA, 535 bp, Arabidopsis thaliana columbia
gggagaggctgtcgggaaggattcttatgagtgggtaagatcgagaccaagactaatcaaatctctagctgcaaagggtcgtctgatggacgatataactgatttcgagagcgacatgagtaatgggtttgctgcaaatgcgatcaactattatatgaagcaattcgtagttaccaaagaagaagctattctagagtgtcaaaaaatggtcgtagacatcaataagatagtaaatgaggagctactaaaaacaaccaccgtgccacgtcgagttctcaagcaagccctcaattttggacgcttattggaagtcctctacaccaagtccgatgatatatacaattgtagtgaaggaaaattgaaggagtatatagtcaccttactcatagatcccatacatctttgaagagtttggatttgcatggttaatgaatcaataagaagatatgtttgtgttgcttacagtaaatgcaacgatattttaacatttcagtaacagagaatgtcaaatacatatgtaagacaagacatcaat

SEQ ID NO: 128437 - DNA, 100 bp, Arabidopsis thaliana columbia
atcgtacttgtcgtacttcttacagatcgagttatctctagtcagaatatcgatcacagtcatcttcttccaaatctatcacaagaagctcccagatctg

SEQ ID NO: 128438 - DNA, 117 bp, Arabidopsis thaliana columbia
ggaaaaccctagtttaagaggcattttcggacaccgaaaatggagaaaggactggatctgaagggcgacatgcgtgcacacactgacgtggtgacggaaatcgccaccccagtcgat

SEQ ID NO: 128439 - DNA, 242 bp, Arabidopsis thaliana columbia
cccccccggggggggaacaaaaaacatggatttcctttatgaaaataaggggggggattttttaactccaataaaaaaaaaaagaagttttttaaggcctaaaaaaattcaaactttcgaaaagagtagccaaaaggggaaaccggggccagtaaaacatgaaacaaatggggcgggttttaacccccaaaaaatcaggtcgactccggaaaaaaagtttaaatcccctaaccaaaattttt

SEQ ID NO: 128440 - DNA, 166 bp, Arabidopsis thaliana columbia
tttctttttttttttttttttttttttcccccctttccctttgaaaaaaaggggaaatatttggccaaagttgggaaaggtaaccccaaaatccaaaattttacacctttggaaaagaaaaccccatccttttttggcagaaagaaaaccctacttccaaaaaccc

SEQ ID NO: 128441 - DNA, 108 bp, Arabidopsis thaliana columbia
ataattgaaaaccataacgttaacttaatatatcaaaagccaaaaacaatgggctttcaataaaacattggactacaaactcccatcacctcacatgaatgagaatta

SEQ ID NO: 128442 - DNA, 499 bp, Arabidopsis thaliana columbia
aaaggaaacttttgaatattaagtattaatcaaaatctaaatacaatgtaactttagtgaccatttaaattcgatgtataggattaggaaccggtccaaaccaaaagaaaccgatgtttggttatgcagtgactctaagccatcaaagaagctcttgccattgctaaggcaccttcataggtttggtttgcaccaatgaaaccactcatatgcacaaaaacacagcgtggaattgagctttcctctgagagcttctccttttctaaacctctccatgctaatggcaaagctttacggctctcaaacctctctggtgaaaccgaaactgcttgtattctccagttttcgcttctatcatcctggtaaagaacatattttattggaggatcaatcttcatttcttcctcgagctcgaatatatggagtttccatgggcattgtttactgagcttcataatttctccactggagtctatatcataccgttttgtaagacact

SEQ ID NO: 128443 - DNA, 482 bp, Arabidopsis thaliana columbia
agagaggaatattaaacagcttctatatataaacttttagagatacataacttcacaagatctaacatatataagcatcattacttgagtgactgactactacaacttgttttttcttcctaatccttactccttactaggcttattcagacaaacccccttatatacaaaacgagaggtgggtgggattatattcttaacaccgcatcaaacctaactagtcctcatcatttctgcatctcctctgtttttgcaaaccttcctcggatcctcggttgactgtctgcaagtgccttcctacaagcatacttgattttacgcccgaaatttcgcttgctcttcttgttcctgtatcgagaaagcttctcacggcggtcctcagaggtgcaacttatgattattcgatccaactgagactgaacaagacccgtatttccagtccccagtgtctgtatatcgctttcactgaaggctcttctcat

SEQ ID NO: 128444 - DNA, 374 bp, Arabidopsis thaliana columbia
aaaaaaaacatttgattttattaaaaaaaaaacaaaacttgtaaaatttaacccttaaaaatattttaatttccccccaacacgagggggttaaacacagttaatcacggttaataaacccttaaggctttatttatgggtcccccaaggaaatcttttccaaacccttagaaaaccccccatttttttacttaaaatgtttttaaaaagggggattaccagggggttgcaaattttcttttgccgggtttctttctcggggaagctttcaccgccggttttttccccggggccgcccattaacctttttttttcctttaaattagggccatttgtttttgcttggcctttgggttaaaaaaagccttatttcc

SEQ ID NO: 128445 - DNA, 283 bp, Arabidopsis thaliana columbia
atctctgctacattttatccaagggaaacacagggttctgcaaaaatttcaaaaaacagaatacgggtttaaaaaaaacagagcgctgatccagagtcagcgcatcacttttttttctcggatgcaccatccccaccagaccttattttggggagaacaactagacttctcctctctctttcgttcatctctctggagagttcccaactttcgttgggcaacttaaagagctcttttgtttttaccaaccttcaaaagctcagtgatccttttttcataggga

SEQ ID NO: 128446 - DNA, 409 bp, Arabidopsis thaliana columbia
ggtaacataaaagactggtttatttatatatatggacaaatgtatccaataggctctttaaaaaataagtcgtagggatgcaattagaaaacaaaactaaaataaacgaaccaatatatgatggaatgggacaggataaaattctaagactcaaaagtcgaagtcgcacttgatcgggaaaacaatggaggtagttgtagttccgtttgagggacttaaaggaagccttagatcatcgcaatcaaccttaggcttaatcctcctaaacttcaagtccccaagcttaaacctaaccctaagcctgaacttgaactctatattggatacaccggatatcctctccgcgtttaaaggcctagactgtccggcgttaaaaataacaaggttttggccttggaacgttggtgtg

SEQ ID NO: 128447 - DNA, 261 bp, Arabidopsis thaliana columbia
aaacaacccattatagcttgtgcatgataaaaggagcaccgaactgcgggtgaatggctgaatactgtgtaaggtgcgtgaacatttgaaggacaaagctccaaggagaatttttggagtatcaatgccattgccatctttgcctcaagcaatgcagaatcctggccaacgcatatcctcggtccccactcaaatggaaagaaggaggcttggttctttgttgccttagaaagaccgtttttgaatctctctggcttgaac

SEQ ID NO: 128448 - DNA, 297 bp, Arabidopsis thaliana columbia
aagggaaacacccgccctttcccaaaaatccccatgaaaaccaagggcgggaaaattttttaaagtctaaaaccctccctactttttaaaaggaccatttttgaggggggcccccataacccccaaatttctttcccatgattctgcaagttgttgaaaaggatgttggcttctccactggttcttggcctggttttcccagcatccattcccaaatatctcctccatgattccccgggtgggtggaaaactttggcctttggtgggaacattcaaccccctgaaaacatcccaaac

SEQ ID NO: 128449 - DNA, 310 bp, Arabidopsis thaliana columbia
aaaaagacctctatcttctttcaaggggaaagtactcgcggtacaactaaaaatgttacacaacaagctcccactgtcaaaacctctaaaattgacaaacttcatcaaagtctcctaacgagcctacttagcgaggaggagagacaggcacattacctttcgtgaaactgacccgagcatcaacaccaatggctagaataacccaacccataccatgatacttggaatcactacttttcttatgcttaactgcctttgagctcggcggagctggagcttcaacgcgacccattggttgagagcctaagcc

SEQ ID NO: 128450 - DNA, 132 bp, Arabidopsis thaliana columbia
tctttttttttttttttgggttttttcgaccgcaaccataagtgttatataactcttttacccaccgagccttggggacaaacatgcttatacataatacattaatggtatgcacatatgcgtatattcatt

SEQ ID NO: 128451 - DNA, 405 bp, Arabidopsis thaliana columbia
tcgcgatctagaggttcttcccccggtggtgaccggctctgtggtgatgctgatcggattcaacctggcacccgtcgtcgcggggctgtactggccgcaggaccagtgggtggctctgatcgtcatggtggccctgatcgtcatgagtatcgcgttacgcggcttcatggcgcgcatcgcaatcttcctcgcgctgatcttcggctacgtcctctcctggatcctcgaccgggtctcgggcacgatcacctcgtacgacgcaggcaccggtcagatcaccgagcacttccgcgtcaactgggattcggtgcagtcggcgtcgtggttcgggttgccgccgttctcggacgaggccaacggaatcgtcggcatccacgccccgtcgttcagcctgacgttcatcat

SEQ ID NO: 128452 - DNA, 430 bp, Arabidopsis thaliana columbia
ataaataaatatcttataagttattgtaataataaagcaaaggaacattaaagaaaggaagtaattaaaagaagatgagagaaactagcaaatatattaaaagctcaacacccaaccaactcttctccttccatccattactcttcactggttcggcttttcctcctcctgtcccatctttatgaatttgtgtaggagatgtggagttgtagttgtcttcaatccttcctaagttctcaaactctttagccaatgttgagttacgaggtagatgcagaatcgaaatacagtcagtgatgttaggagccgtgatatgacaagcggagggaagatgagcggctagggtctgcgttaatcttgataccaagttgaggatcatctttgtctctgaccaatatgcaaacacacttctcactctttcttataactt

SEQ ID NO: 128453 - DNA, 426 bp, Arabidopsis thaliana columbia
aagctacaacatcaatttatatttttattaagcaaattagaaatacacagttacaaagaagagacgaaggaacaacaaaacaaaggaacaacaaagtaaaggagtatatacaaacttgtcgattgtacacacaaccccattttccattattttgcatcagaacgtcgtacgttcattattaacaatccaagaaagaaagaaaaaacaaacatcttagaacaacaacaagtaggtaagaaaacatgttcaagcatcggtatgattcgtttgtttcataggtatgtcataggtattcaacttacgcgcactggaaactctttggagcattcctactacaaacattgaggagtacgctgagattgataggaaggttaatattgacaattccaagaatgctagctttgagcgcagtgcagaggcaggccg

SEQ ID NO: 128454 - DNA, 386 bp, Arabidopsis thaliana columbia
aaatcgaagttacttttagaacaacctacgacgaaagcagtagaggatccgattaacaaaaaaggaacaaaagaagggaaaaaaaatcacttatttgtgaagtcctctaaatgattacttttggtactctcatcctttggtattgctttcacgcatcctttgcttttggtccaaagatgctgtgtaaggtttttcagttcacagtggaggaaacttgcctgtgtttgtttacctgagggactgaacaaatataacgaatgcttcttttttatttgcttcgtttcttggcttcgctgtagaggataactccacagacagtgagcgagtaacctaacattccagtcactgagacaggattcctgaatatcaggattgataccaccact

SEQ ID NO: 128455 - DNA, 284 bp, Arabidopsis thaliana columbia
attgactcttttatttggagttttgaacaacttatcgtttttgaacttaaacaaaaaccctatattcaaaccaatttgccggaggaaagacccgccccctttgagggggaaccgggcccccaattttaaaaaaaaaaggccccggaaaaaaatgggctattcccccccccccccgggggaaaaaatgggaaaaaaaaactcccgaaacaaaagacccccatggatcgaaaccaagggggggcccccggggggaggggaaaccgggggaaaaaaaaacggggggg

SEQ ID NO: 128456 - DNA, 338 bp, Arabidopsis thaliana columbia
ttttttttttttttttttttttttttttttttttttttttttttttttttttttttttttttttttttttttgggaaaaaaccggccctttgggttttcattggttcaccccggtttaacctccccccaaagggtcaaaacccccctgacccaggggggtttttgggggaggcaaaaaacccccccccaggggggtcacctttttccttttccactttttttttagccccccataaaaaccgggctttccacgcaagaacttttccgtttttggaaaaaattgaaccccttggtctttggaagagggggcccaaaccccgtttccatgatttttccat

SEQ ID NO: 128457 - DNA, 305 bp, Arabidopsis thaliana columbia
tttctttttttttttttttttggaaacaaaaggttattttaacaatacaacaacattgggaaaaagaaaaacaaaaaaataaaatacaaaaaacacaacaatgttttcagccgataatcccaaaaaaaaaaaagatacttgttttaaaaacccaaactttttttggctttcattggatttgattttttggggttaagaaccgtttaccttacaaaaccacatttcaagctttaacttcagtcttcttgttgggctcaaacacgaacttgatcagagactctttgatagacatcaactgagggaac

SEQ ID NO: 128458 - DNA, 440 bp, Arabidopsis thaliana columbia
acgcaaaacacatcttattttttagatatatgaataggcatacacgtgtattgtcaaaccgttccaaaaccaaccacaacagtcaccaaatcgaattccaaaacgatttacaactatagaaagaagcagagacatttttgctatatcatatgtgatcatttttacataatgatcatttttacataatgatatagacatatttttcccatctcagccgcagcaccctcctccttgcgaggttgatccatctcttccacctgatggtcctggaattcctccatatccaactttgattccatatgactcatttgacacatcaaacacaccatcttgaatcttcttgtatattgttgcagctgtcttaatgaatgcctcctcaacattctgagcagtcttggcagaggcctccatgaatataagaccgtgctcctttgcaaact

SEQ ID NO: 128459 - DNA, 285 bp, Arabidopsis thaliana columbia
cgggaagtagtttttattttttatttttttcaccgtggacggtactaaagtacaaagtggtaaaaaccccttgtaaagaaaaaaacaagagaggtcaaaacaaactacaaaaatgtaagaaaaaaaaaaagcgaatatatggttactgttatatatttttaatttttttaccttgaaaattagaaaaagaaattaaaaaaaaaactccaaaattttttatttagggcttttccttaaagagtgaagctaatccggtgacagccttaacttctctctccaccgcca

SEQ ID NO: 128460 - DNA, 407 bp, Arabidopsis thaliana columbia
gtatataaagtatggatcactattcttcatatgagcacaaaacaattaattttgacatgtacttacaagtggatgcatgaaaaagtttcaatacaaaaatctcaagcggacgcaagaatgtcgagggcaactttcttaagagaaggcatggattcttgctgatgaacacaaatgtatttgttccttgctctcctcagtacttgccatggacctggataacatctgaaaagtacacctgctttgtgacctttgaaattgaggatgtagtacactgtctacatgtttggaagaagtgtcttggtaagtgcagccagtttctgataaaagaactttggatagtaacccgatcgtatgcggtcaagttctgcattgaagatgattagttttcggtcattgttcacaacagc

SEQ ID NO: 128461 - DNA, 378 bp, Arabidopsis thaliana columbia
  unsure (1)..(378): unsure at all n locations
ggagnaatgttttttcaatatctaacgggaaaaaaagattcgagcaatttctgataagttttaaaataaaaatgataagtcgcaatgcacttcacagaaaggaagtttgtttggaaaaactaaagagctccttaagctgagagacttgtaccaccaacagagtttttatccatcttaatcttcttagttggaggttcggattcttcttctccttcttcttcagaaatgtttgatgactccgcaacttcagcctcttcctcactcttcttaaaattctctattatctccatcatctctctgttcacctgcgggttttggagaaactcggagagatcggttgtgcagcaagggcaggtcatgatgtttttctttgcacgt

SEQ ID NO: 128462 - DNA, 293 bp, Arabidopsis thaliana columbia
agataaactcgtgtttagatagtaaaaactttgttctaaaatgttttcatgagacaaccgaaaaaaggtttcagaatcaaacaacaaacagtaaagtaaagaaagtctttccatgagagattcctacttccacagcttacgcagagacatgttcttctccgtgtctttcttcattaccttggccaccgccatctcaaagtcttcttgtgtcacgtgtactctcctctcacgcagagcaaacattcccgcctccgtgcacacagccttcagctcagcacctgaagcgccattca

SEQ ID NO: 128463 - DNA, 165 bp, Arabidopsis thaliana columbia
ttctttttttttttttttatttgttcactacacaaactttctttattaattctgagttcgttatatgaaagagcactaaacagacagatagactttgaagcaaaccaaaggtgataactgctctgcagctggtgatgactagacgaaccacacgcttttgactta

SEQ ID NO: 128464 - DNA, 348 bp, Arabidopsis thaliana columbia
ccggttgttcgtgttttttaaatagcctttcaatcaaatttacagggacaaggcatcacattcatacaaattcattacaaggatcgttcacgtgcttgtttagctggaaacaactacaaaactcaacaaagtacaataaatttaggataagagagagttgatgcctttgtcttccgctggcacatgggttacataacatcagaattcgtaatgatacacgacacccatttcccatttagcaaaaaaataaatagaaagattaaataaatataataaatctccatcgaattaaaaaagaagaagaacccgaaaaagaaatatacaaagggttggtggccgaaacttttg

SEQ ID NO: 128465 - DNA, 198 bp, Arabidopsis thaliana columbia
agcggccgccctttttttttttttttgattttctaacattataattttttcatcaccatttataatcgatttacagcgaaaccacgcacttgagaccaaaaaaaaaacaacccaacagcacaggcatgtgtgacttcccatgatagattcatgattcatgcgtggacatcatgaccagcattatttattattattacc

SEQ ID NO: 128466 - DNA, 355 bp, Arabidopsis thaliana columbia
cggccgcccttttttttttttttttttttttttttttttaattttgtaactgatatttgtatattctattggttgattgtttcttctttggggacacattacattacattaaccaactggagttttatatataagcttgatttttctaccgtccctgcaacattgagatggaaacttcgttttgtgaacgtaagcttaaagatgaagagatatcaggaacgttccggttggtgaaaaaaccgggctgtgtagggtgaggaagagaacttttacttccaaacatcaagacaacagaagccatgggtggtctggcttctggtttttgttgaacacaaagcaaagcaacatgaataca

SEQ ID NO: 128467 - DNA, 316 bp, Arabidopsis thaliana columbia
aaagaccccgataatttggaaggaacttaaaaattttttagccatttacatccgttcataaggggtttccatttgaatcaaattttttcacaagattcccatcggtatggggggattatatatatcattaattcgaccgcccatgtcgcttggggattcaaaaaaatttcatgttttccttcaaggaacataccaccgattggggaaggcagaggttgccccaagcggttgcccctgggaacaaggcgtcccaaaaattcaggggggggacctttgctccatttatgaacattaggggaaagctccccccaggggg

SEQ ID NO: 128468 - DNA, 249 bp, Arabidopsis thaliana columbia
attaaagaacccaataactcgttcttttttcattagaaaaacatcaaagacttttttttgggtgtgttacctaagattcctacacttttcgaaatggaaaatcacaatgctaataatttcagactaatctcgaaaattaataataatatggctatacttagaagaatagaaatgagtgtgtgaagttcacgccaagcggatgctacagagagtgcccgtcccatccaaccaaaggacacacctccgtta

SEQ ID NO: 128469 - DNA, 134 bp, Arabidopsis thaliana columbia
aataagactgaacgatatataatgaatcatttttaatggatacaacacaatgatttaagacatcctatctagacatatgaaaataagtagttcccatcttagctaggatctacgattcaatgatatatatgtga

SEQ ID NO: 128470 - DNA, 138 bp, Arabidopsis thaliana columbia
gattctaagccctagtaatattcccaaatgttctgttaagttaaataagccagatgcagtgggggcatcttaaacattgggtttggtctattagatattaaaagctttacaccttaatatttgatcaaatgaactaca

SEQ ID NO: 128471 - DNA, 268 bp, Arabidopsis thaliana columbia
gattctaagccctttttatattcctaaatgagaggataagttaaatgaaccagatgcagtcaatacattttaaacattgggtttggactattagatattaaaagctttacaccttaatattagaggaaatgaactacacatcttacttgccttttggcacttttatgttgctatcttcggtgaccaatgaattctgactcacctcaagttctttcaacagtagcaacaggggtaccatgggattcaccgtcaagcctgactgatggat

SEQ ID NO: 128472 - DNA, 306 bp, Arabidopsis thaliana columbia
gattctaagccctattaatattcccaaatgtttttataagttaaataagtcagatgcagccaatacatattcaacattgggtttgctatattagatattaaaaggtttacaacctattattagatgaaacgaactacacatcttcattgtctgttggcacttacatgttgctctcttcggcgaccaatgaattcgtctcagcacaagttgcttcaacagtagcatcagttgtaccatcgtattcaccgtcaagcctgtctgatggattctcggaatgtttttcctccgtcttcggtagggatgaat

SEQ ID NO: 128473 - DNA, 327 bp, Arabidopsis thaliana columbia
ccatacaatcattcctgggcaaagggtttattccgaaattttggaacttccaaaaccccaatcaaaacccattccccccccggggggccaagaagaagccatttaagatttttaggggcctaccgaaaccaagactggaaccgttgcgaccggaaggtgaaaaacaaaacaggctttggggaaaccacaattggactttttttttaggggttaggaacttttgggcggggccaggccacgaacgaattggtttcaggttttttttcaggaaccattattaccggggccgatttggaattggggaaacaatacttggttacccttccc

SEQ ID NO: 128474 - DNA, 312 bp, Arabidopsis thaliana columbia
atcgggcatagactttttccatactcaaaacagtttttacaatcatgatacaacaggctttcaagaactatatatatggatcaataatactaggtcgctagactaatctcttttctcatgattcgaagaacttgaaggcatgccgatatttacctttgttgtttgatcagactgttgtctatagatagctgctgccattttattgtagagatccatattcattgtctgtgcgaaaaaggcgctgtatggatcagataatgtggctgaagaaccgttggtgcagtctctgttacccataggagggaccatcat

SEQ ID NO: 128475 - DNA, 342 bp, Arabidopsis thaliana columbia
tccaactaatctcccatccattccctctctgccgactagtctcccatctatttcgttcttctctcccccgccttctgcatctacttcgagtccttgaactatcatcacttcatgtgattgatgatgtatattttattataagattgttgtaattagttgtttcattgtggtgtgtttttgtttgtttaattacgcatacccccgtttgatgatttgtattttgtacctttaatttccttttgattattaatatgttgtattttaaatttgtttgtggtttgttaaagtgcttacttggttctttactcatagtaatatataaaaaaattggtgacgtttgat

SEQ ID NO: 128476 - DNA, 343 bp, Arabidopsis thaliana columbia
attcaaccgtacccaattttttaatatatacctttttttaaagacccaagtaggccctttaccaagcgacaaccaattttaaaatccaccatattaatattcaaaaggaaattaaaggtccaaaatacaaatcatcaaacgggggtatgcgtaattaaacaaacaaaaacacaccacattgaaacaactaattacaacaatcttataataaaatatacatcatcaatcacatgaagtgatgatagttcaaggactcgaagtagttgcagaaggcgggggagagaagaacggaatggatgggagactagtcggcagagagggaatggatgggagattagttgga

SEQ ID NO: 128477 - DNA, 510 bp, Arabidopsis thaliana columbia
  unsure (1)..(510): unsure at all n locations
ggccgccctttntttttttttttttgctttaaaggctctgattattaatacaaataacatcatcatattgggggttattcaacattaataacaataacttaaatattcaaagaaacaaaagaacatgaattttaaaaggtttttaaatttattatagtaaaaaaataaatgactggcgcttacactgcacaaatgaattacgaaatgaagggaacacataagagacaacaatctcggacacattcataagtgggaaaataattatattaaataaaatacctcagctgcctgctccgttggtcacggtaacgccgccactctccaccttagggggagctgagaaccgccgtggtttaggcaatgcaggcgaagttggatacgagagccgtttcttagctgatgccttgtctgtgaacccttcgttttcctgtgtggaaccacctaatgggctttggggcttgagcctggctcgagcctgatttagttggaaccatgtagctcgggagagct

SEQ ID NO: 128478 - DNA, 498 bp, Arabidopsis thaliana columbia
ttcaaccggagctctgatattgacccttttattctgtttcaaaatctgatatttgcaggctgtaaacttcggagctaactcagaaaatatgcaagtgttggtaactggattggacccgaacgtgatgagagtttcgggatcaaagaagacagtacttacctctaccaatgtgatggatgaaaattccttctcacagccagagaaggttgtaccacatgaaagcttgctagagttggcagaggaggatatgaccgttgttctcccgccacattccttttcttcattcgatttgttgaaggaatctgcaaagataagaatgccaatttctgattcttcttcccatcagaaaactaccactgtgtgaagagaaacaatgacaaggaagtatcaacttttatgtcaaaagtctctttgtggttcaaatctaattacattccataaatgcttataacgtacccttgtgtatatataataatagtctggtgaataaatttactt

SEQ ID NO: 128479 - DNA, 426 bp, Arabidopsis thaliana columbia
gcggccgccctttttttttttttttagtgaaacaaaggttattatctaatacgatgtggtgatatatcacaaatttatgtcacaaatttaccaaaaactattttaaaagcttttgatgggtgatcaagaaagtgcaacattatttataggatatgaaagtaacttaggcaatctgcaaaacccaatctttagtgtcttggatagaacctgtttgtattccgacaagaatagatcgaagttgctgcgtaacaatcccatctccaactttgtactcaggccttgtgttcttaaaagtgatgcttccaacagaagcaactccagcggcagttccagtgcagaaaacttcttcagcttccttcagtttttctaccggaacacttcgttcttccactttgtaaccaagatcaagggcgatttcgattatgc

SEQ ID NO: 128480 - DNA, 235 bp, Arabidopsis thaliana columbia
cctgcctctctaacagtgcacgtacacaggacataacaaggctcaaggagagaacgagcgcacgagcggccgcgaaaacagcctcttctgaacccaagcaaatggcagagcaacacaatttcttgcaatgcctttgtacataagacactaatctacctcttcatctattttacatggctcagtttcttgcatgtaactgtgaatctgaagattcatcacttgttgattattttcc

SEQ ID NO: 128481 - DNA, 150 bp, Arabidopsis thaliana columbia
atgctaattaatccatagtctaaaacaacatttccctaaactaaaacagttgtacatttcttgagcattatacatatccactagaagcacacaaaatggatttaaccaagttgaaggatggatgttaccaaaaaaagaaagatggaaact

SEQ ID NO: 128482 - DNA, 434 bp, Arabidopsis thaliana columbia
gatcgtgtgctcatcgtttctttatcgccctcgctttgaaagggcttgattatgagtatataccagtgaatttgctcaagggtgatcaattcgattcagatttcaagaagatcaatccaatgggaactgtaccagctctggtggatggagatgttgtgattaatgattcttttgcgataataatggtcagtagtaacacatccatttaacttttttttggtattgttgattaaaaagaacatttcatcgatcttcggttttgtggtgtttggattgacagtatctggatgagaagtaccctgagccacctttgttacctcgtgacctccataaacgagctgtgaattaccaggcaatgagtattgtcttgtctggcatacagcctcatcaaaatctggctgttattaggtatatcgaggaaaagataaatgtgg

SEQ ID NO: 128483 - DNA, 437 bp, Arabidopsis thaliana columbia
aaaagactaggactaccatttatccatgattttttaaatccaattactaggttttcccatcttaaattaaaattaaaaactcaaaaaaaaaaaactaaagaaagtcaagaaaaataaaattgaagtttttgtacacttggtgttttctccttgatcccatttggggaatatttttctaccaaaatcttgaacctgttttcctccatctctatctttttttcttgataaagaaagaaagaattatttattcttcttctctaggctcctctttccaaatatagaaaagctaaaggcaattctgtcattctacacttcgatctccggcttccgggccagcacaatgggcagtccgttttggggaagcgcgaatggcccatactgaatcccgtcgctcgctccaacaattgaccaactgtacttggtggtgagatgatgaa

SEQ ID NO: 128484 - DNA, 243 bp, Arabidopsis thaliana columbia
aaatcagcacggagccctataaaaagtatcttgaacaagatgtccggaactgactatgattgaaggtcctgaaatggccaacaaatatctccttctccagacaaaccatgcaagacttggtattatctgcacctatatgtctcacatcattcacttatactctcagcaccgaatataaacgttcttaaaagaacctaatagtttgacttgtctttaacccttaagtcataaaggagggaacat

SEQ ID NO: 128485 - DNA, 380 bp, Arabidopsis thaliana columbia
gttgcaacgggaaattttctcttaccttctttagagtttcacttctcataggttattcttacaggaagtttcaacatctttctgtaaataagaaactcatagacatcgtgcaacacagataagaagaaaccaaaaaccgatatgaagagacaaaacatcctaataataaagtaaacaaataaatttgttggtactatagtcacaaacggttactcttcaacttggtaccaggaaatgtaactaggtgtttcagtgtgcaggcattatttcttacggaatgctcatcactactatagctttaggctttatctggcaggaggtggagggccaagggattttgccatgccaacccaagcaacaatcccacaagcgagaattat

SEQ ID NO: 128486 - DNA, 519 bp, Arabidopsis thaliana columbia
ggccgccctttttttttttttttttttttggatagagaatcaaacttttatctaaaatatttctatatgacaagatttctaaaatattttacacccaaattgcaaaatacactatatgacaagatttctaatgtctcctacgaggaaagatcctagctagccagctcattttattttcagcttctttatcctaacaaaggagttctactttgaacatttccaaggacttatgcgaccatgtcggcttcctgtgaatcaggaacaatgatgtcaagcctcatcatggccttatagcgttgaggaacccgagctccactgtgcatacaaatctcaaccaaagcaggggctttaccataaaaccttctgaggtttccggtaagcggatttcccttaaggtctctcacatgccatacatagtttggaggaaagacttcgtccacaagagcatcttgccatccgtgcttcccatctctccattggtgcttgaactctccgcacagctttacactatgtccccat

SEQ ID NO: 128487 - DNA, 114 bp, Arabidopsis thaliana columbia
  unsure (1)..(114): unsure at all n locations
caacaagtgacgattttttttaagatgaacataacatacaancgaacgagcaaaagncccaacaacataaaacgggtttacaggagactatttttagnagtccaactgggccca

SEQ ID NO: 128488 - DNA, 368 bp, Arabidopsis thaliana columbia
caaactatagtttttgggcacgaacccaattcaagttcataaaagaaaagataagaaacatttgtctactttctttagaaatgctgcataagaagttgtaaagctagtctaaaaatataactgcttacactgcgaagcatcaatatctgttggacaataaggacacttgaacgaccttgaaccattcctcgacattctgttgatagactgcttgcaaaggacatgaccgcaagccaatctcatcggcggattatcttcgctcgagtgttctttagagacagggcagacaaagaccgagtagaagcgatactcttcagagagttccacaggtacaagaagttgctccattgtttgccactcttttcttt

SEQ ID NO: 128489 - DNA, 163 bp, Arabidopsis thaliana columbia
ctaaataaaacaaaatataattggtcaaactttaaaccgagcttaaggcttctaaaaccaaagagagggagaaaggtttaaaccaaacttacacccattaaaattggttaccccttatttaaaaaaccagattattttccaaaattgaaaagattccccaatt

SEQ ID NO: 128490 - DNA, 364 bp, Arabidopsis thaliana columbia
aaaaaaaaattttgcattgattttattatgtttacatatataaaggaaaaataaaattgatatagttatgtaaccaagtaataaaaaaaaaagattgaatataacaagtataatttaaactcagtgacgtagatgcaatatttttcaaggcttccaggctttaggaggtggtggagtcggagagtagagaggaggaacactattgaacatcgggttcttatcaatttgttggccaccactgctggttaaggaaacgagagcagctacgaggcctgcgttaccagagagagtaggctcgcttgcgttataattgtttcgcaagtcatggaactcatcgaatttgtttggtccaccaaccatagct

SEQ ID NO: 128491 - DNA, 244 bp, Arabidopsis thaliana columbia
ggggcaaaagggtcaacttgaagcgtaaaaaacatattttaatatggcattgactttcccaaattaaatcaacttgacccaaaattttttttttttttttttttttttgggaaagggcggttaggtttcccactttttttacatgggggggctttccctgaattactgcctggggccccgattttggaattttttaataggggtggatcccaaactttttttcctattttcttccttggggtgg

SEQ ID NO: 128492 - DNA, 257 bp, Arabidopsis thaliana columbia
caaaagcctttcgcaattttagggccttggaacttaatactattcaaggcacataatgggagagttgggaaaccacaaaacgaaccaagaagttttacagagcttcaaaaatctcggacaacagttgaagaaaaaaagcacgtccagagccttgacatggttggggttttaagcaaattaaactgggctggatttagcagtgaaccagtttcaagggatttcgagaaacaagactttcttttttcccatttgggttc

SEQ ID NO: 128493 - DNA, 419 bp, Arabidopsis thaliana columbia
cccaagaaacaaaatgcagttttctcctttccatttttggggatattacgcgatgacgactttgcgctgcagcgggattttgttgctttatcttcagaattttactttcggggcacaatgatgagatgttgcggggaaacatagctttctggaactagagtccattgggcctagccataccatctggttcctttaaaaagctctgagcttggtcaaaggcctcaatggctatttcagctggggtgagaactgagacacttttataaccgagcttcaaagtaatattctccaaggaaactcttgcgctggctttagggtatgcttcaccacgtgcatcccaaatcgttgaaagacggtttaaagccgctgtgtatgtgtcccctgactcatcatcatgtagcaatggtcttgaaccagtt

SEQ ID NO: 128494 - DNA, 383 bp, Arabidopsis thaliana columbia
ggccgccctttttttttttttttttttaaaagaacacagttttgtttccccgaatatatataaatagtcacaaaccaacagagaaaaatacactggaaacaaaatgatacgagggcctcacaaagtattagaagacgtctggatggtaccgccccgggatggaactgttttgctgagcttgtttcagatgaagcgtcagagcatagttattcacctctaaagttctcaactgttcctggtattgagtgactagctgcctcagatgctgcaattcctgactttggtcttccgattctctttgccgcttctgctgtgtcactaccgctcgtttcagtaaactgttttcctgtacaatagcttctaattgctgcttcagcatcatg

SEQ ID NO: 128495 - DNA, 542 bp, Arabidopsis thaliana columbia
ggccgccctttttttttttttttacacggatctaactttcctaatttataatgttacaagcaaccaaatctaacatcgattcatttattgtttttacagataatatgaaacagaggagttgtttaaacttcatagccagggttcacagtctgctgcacatctccatagctctctagctcagcaacatcctctaagctcccaagaaacagaggcaatctttggtgaagcttcacgggttgtatcgaaagtatccctctttttccatcagaggatttgccaccagcttgctccacgagaaaagccaaagggttaccttcatagactaaacgaagatggtctcttggattcatagccactccaccgtataagagagtcctgtgaagatcagctactagagaacaaatataacgcgcagagtattttttcgggttttgacctttgccttgtctcactgtgtcaatgtacttccttaaaccttctggccaatcaaagtacctcgcatcgttcactgagtagatttgtccccgagttgggatcttgat

SEQ ID NO: 128496 - DNA, 129 bp, Arabidopsis thaliana columbia
ataacatatgcggctattttgaactctcagtatatggtgttttattcagcgccgtttctctcctttttatgggaaagattctggaacctgtttggggattcacggagtttcttacggttatcgttgggg

SEQ ID NO: 128497 - DNA, 363 bp, Arabidopsis thaliana columbia
atgacatctggagataacaaactgaaatcagagttctccgtattgacagatgagttctgcgagttgacacaggagaaaaacgacctgagagaaggatagacatcgctgaaagcagatatagagagtctaaatcttcaaaaccagcagagatgaaggtcaatgtctccatggggagctgcgatggatcacacagtcatgatggatagaccaccctgctttgcataccctatgcctattgctatgcctcccgggtggatcgcaatgcatacatcaatgccagattacacatactttgggaaccagaaccctagcatgagcccagcttcatgtactacatacatgctcgacatgccttctaataca

SEQ ID NO: 128498 - DNA, 378 bp, Arabidopsis thaliana columbia
gctactggatctattgattcaaaaactgggttgcctgatgattctatgctcccggaggatgaatttcttccggtggctgcggagccgctgagtacaaatctactttcggcgaaccacatgataaagaggtgctaagtcatccaaggatatgcgccgtaaccaccactgacactactactgagcttgctcgattaaagattctactttacttggatctgtatattcttgttcttctttgtttttcggttaagctctcttcttcttcttcttcttcttcttattgggagacaatgatgattcttaagaagtcaataaaccagacattgtggtaacactcttctttcatggcggcgctataaggaaaaaagagaactcctt

SEQ ID NO: 128499 - DNA, 199 bp, Arabidopsis thaliana columbia
aatatggaagagttctatttgcgaagttccactggaaacctatttgtgggagcatgtatctgactgacgaagaggccaaggttgttggaggagccaatcacagccacgccactagggatcggcacgatgccattgcatttgcctgctaccccgcggggaaacttctcatccagaccatggatcctgcagatgaggataa

SEQ ID NO: 128500 - DNA, 230 bp, Arabidopsis thaliana columbia
cccagggccaaacccatttgttcccccaaaaaaagcccccccaaaagggccccttggaaaaccttaaaccattgaacccagggtcctttttcagatacccaccatgaaaaaatttttcccccaaatttttaatttcccccccccttttagcccaaaaaccttttagccccataacgcctaaaatttaaaaaaaccccgccccaaggggaccccccacccccttgatttgc

SEQ ID NO: 128501 - DNA, 372 bp, Arabidopsis thaliana columbia
aaggtgttcttagcctagaataatagttagccaaaagaccctggtgaccaacgggtgggaattttttagattagattcattgacctttgcaaatgaacaaagatccagcatgtttgacattgtacataagacattcagacaactgacccatgctcatcaagcccttttatgaacgtgacaagactccttttgagcttggaattgttccaccgcggcgtggatcagactctgatgctagttcgagagctcttgcaaaggcctcaaaggtcgattatattatgagatgcgagtttttaccaacaagctgttggatgtgaagagtcataccagaagtattcaccaatgactggaagaagtgattcaccaactgag

SEQ ID NO: 128502 - DNA, 397 bp, Arabidopsis thaliana columbia
aggaaacgatgatttttctattaataacaataaaacacatcggagaaaaattgtgaaattgtaaatacagagcaaaataagaagtttctctcttttaggaagtagcaacgcagaaagattcccaatttagcaatcccctgttttcccgatcgccttgaacacatcttcttgatacttgaacattctcaatgcccatcacttcatcttcatcttcatcttcttcctcttcctcctcctcctcgtattcttcggtttcttcaggctcaatagtctcttcttcgttctctacaaactcattggagtctttcaagatagagagacggagacgaccattgctacggtcagcttgaaagcatccgttacgaggaggcgcgtttgtggcggtcatgaccaatct

SEQ ID NO: 128503 - DNA, 430 bp, Arabidopsis thaliana columbia
gcagctgaaagagtttggcattgaatctctcatctatttttacggtactgcatatacaagtttcttctctaaaagagaaaacgtctcctgaaaatttgctgtttggggatacaaattgtgaggatctttataagtgttttcttctaaatgagcttcaacctcggttggtattttttccactcaaggccttctatcattttgatgcccggcacaaagaggcagcagctatcagctccattctttgtaaattccgtgtaaggattctgctttctcatttcaacagctcttctcatataacttctccttctgctcatcattatcagctccccgagtgtctgtggcgtcctcacaggaaagccaatactcatgttgtcagtttctgtagtaagcttcacttcttcatgcaacggatgagtagaaacctgaacgt

SEQ ID NO: 128504 - DNA, 148 bp, Arabidopsis thaliana columbia
ccgcccttttttttttttttttttttttttttttggagaaaatagtagaagcatcgaaaaagcaggaatgaataatacaatttgccaatgccaactgtctcacatcaagaacaagaaggatgtgattaaccacaacaaacacaggatg

SEQ ID NO: 128505 - DNA, 428 bp, Arabidopsis thaliana columbia
aacacagaacatgagctttactcattttattttattttgaactgatgagctttgctcatttttacaccatttgattaactcaaatatgaagaaaggctaacgtcataggaaacttaatcctcggattccaactctttcttcaccttctaaaatgatgcaaataatcttaaaccaaaaaagtaaaaaacaaatttacaaaaactaacaagattattgatcaagcagagagagacgggaaacaactcccagatcggagaagcgaccgtcgtgactctacgccgtcgatccccggtaaagctccacttgagcttgtctctgcggtggttctccgtggagaaccgtcgaggctccgccgtagaatcctaccaatgacggatatcggatcttcctcttcatcgggactccaagaacggaaacggtggcaaaac

SEQ ID NO: 128506 - DNA, 442 bp, Arabidopsis thaliana columbia
aatcaatgtaaatcatatagttcttatattaacattctagacaacaatttaaatacgaattcgaccaagtatatatattacaaggagaaacatatggctaactatagatctcttacggtccaaataaacaaacatacgataaaaataacttcattctcgttttatcactgacgaggcagaaccactggttcccggcgatggctgagctggcatttgcccaccgtgaataaactcacgcgccagtgcttggagctcaccgcctccgcccatattggacgatgacgggacgccgaagagatgatcagacggtcgtggttgttgctgcatggcccaagtggaggacatgaccggctcgaagatggagcagaggtcgtacaccgacggtgatattgtggggaggtccgttatggaaagagcctgtagagatcctgaagatgacacc

SEQ ID NO: 128507 - DNA, 262 bp, Arabidopsis thaliana columbia
aaatggccaaacccatagtttttttggttggaaatgggggcccattttttttcctttccacccaaattttttaaaaaaggaaacctaattcaaaggttttttttttttaacccctttaagggggatttggcttaaaaatggtaggggggaagggaccaaacccagggggtggtttttggttccaccaaaccgccggggtttgggcaactaaggcagtttaaaccggttgaaagggcccaaaaacctttgttaggggccaatt

SEQ ID NO: 128508 - DNA, 159 bp, Arabidopsis thaliana columbia
aaaagaaacacatactctgtctcaattcatataccctcacttttgatcagtgagatcacgtacaacgagtgcctggaaagagaagaaagaaacaaaaaaaagaaagagaaatgggataccttttagaagaaaccttaagctctaaccctaaaaccccaa

SEQ ID NO: 128509 - DNA, 109 bp, Arabidopsis thaliana columbia
cataacaattttctgtcacgtgcttgattagctggaaacagctagagaatcttaacaaagtacaataaatttatgataagagagagctgttgcctttgtcttccgctgg

SEQ ID NO: 128510 - DNA, 337 bp, Arabidopsis thaliana columbia
cggccgccctttttttttttttttttttttttttttttttttttttttttttttttttttttttttgggacctattaataggcacctttgatcaattgattttcacaaaatcaaaaactggaaaaatctaagcaaaattttttaaaaactggaaatatgtctgaagctcacaaaagattggggtctttacttaaaacactcaaaacaccaactatttcgggtttcgttggagacagatccatacccagcaaaagggttaaagggtcttaaaacaatggcgttggcagcactagcaatccttggccagagatccgcacactttttcccaaaagggcca

SEQ ID NO: 128511 - DNA, 348 bp, Arabidopsis thaliana columbia
agagcggccgcccttttttttttttttttcacgaacgatctatgattactaatttgtttaatctcaatcttctttaggacttgatacgacatcaacgagatactgattcaacttctgtccaaacgtcttcacagagaatgattcaacgacatggttcctggcttcagctcccattctattcgccaactcaggattctcgatgaatctagccatcgccgaactgaaatcttctggagttggttcacaaagatagcctgttactccattctttaccgtctccacggggccaccactgttgcaggctatcacgggtttgtatgcagccattgcttctaatggaacaatacc

SEQ ID NO: 128512 - DNA, 435 bp, Arabidopsis thaliana columbia
agagcggccgccctttttttttttttttttttttttaaaaaatgaacactaatttgttttccatgtgtattatagtgtaatacattcaaatcaaggaatctgaaataaattattgatattgtatggaccaaccactatagaatctgacatgtgtccaccgttccaaattaagtttgcgaattggttatatgtattttgtgtgagatgaagtgaatcccaaaaaatataatctttaggattctcacacaattgatattctttcacaattctcttccctccacagctgaatactcctctccacttcccagttccacaacaagcttcttccccctctttaacccaaatttagaaggatgctgcattctgagtctaaggcttttgttcatgtcaaatagggagaatttgaagcccttgacttgtctttgcattttaaac

SEQ ID NO: 128513 - DNA, 230 bp, Arabidopsis thaliana columbia
gtagcaccgcatcgtatctcaaattagatcgaagattaagggcagaacctttaaagggtattgtctaaatgtctaagtcatacatggaaaagggcattgtttaaatgtgaaaatcatacatggagaattataagaagaacaaggactgtgaataaataatccagaggagattccagagacttttcaatattgcaaacgattgctataaacaaacacacaaacacactcct

SEQ ID NO: 128514 - DNA, 157 bp, Arabidopsis thaliana columbia
atagcccgagattaattttttatttcaccaagattagagtatgtcaaaaggggtgaaattagaatccgaaagtgattctcctacttgatccggtttactgattacacggattccacagaggacaaaataaaagcataaacctaggatcttagataat

SEQ ID NO: 128515 - DNA, 446 bp, Arabidopsis thaliana columbia
  unsure (1)..(446): unsure at all n locations
ggcggtgctggagaacggcacggcattcgcggtgaggcgttattgagacggagagctgtgcggctgcgaaacccaaggaattcgagagggaagttcgtgccatcgctaagcttcgtcacccaaatctggtcagaattcgtgggttctgctggggagacgacgagaaacttctcatttccgattatgttcccaatggcagcctcctctgtttgttcaccgtcactaaggcaagctcaagctcatcttcttcgtcgtcattacaaaaccctcttacttttgaagcacggctcaagatagcaagaggaatggctagaggactatcttacatcaatgagaagaaacaagtgcacggtaacatcaagcccaataacattctcttgaacgctgagaatgagcccatcatcaccgatttagggctagaccgnctcatgacaccagcgcgtgaa

SEQ ID NO: 128516 - DNA, 254 bp, Arabidopsis thaliana columbia
cgcggatcatggagaatggtttctatacacaggaagttttataggcagacatttagctaacgaggatcaggagtttgaagacttgaatgaagctttaagagcaagttgcgcaacgtggtatccagttcgagttgtcaggtcttacaaggaataggtattctgcatatgcccctaaggaaggagtgagatatcatggtttatacaggttcgagaaatgctggcgataagctagattcccggattcatttaaggtc

SEQ ID NO: 128517 - DNA, 483 bp, Arabidopsis thaliana columbia
ggccgccctttttttttttttttttttttttttttttttaccattttaatttaatattattgagatggaatcctaattgaattaaacacttaattaccttcaacaagccaaatgctaaaatacttaagacaagttgttcataaagtctccaatgatacggagaacttgttccgcagcctcggaagatggatagttggagtagaaaccatgctccttgttttcgaattcaatgtaatctaccctttttcctcccatcttctttaatttatatgcatattccttggccctatctctcaagagttctgagccgccgacaatcaccaacattggctctaagctaattgattcgagtgtaggactcgttggtccaaaagggttagccatgtggtgatctcttgttgcaccgtttggtagtgacaatctccaaaacttgtcaagcaaatccaagctgagcaaagcttcagaggggccattctcggagtt

SEQ ID NO: 128518 - DNA, 192 bp, Arabidopsis thaliana columbia
  unsure (1)..(192): unsure at all n locations
aagtaacgtgagccacctaattttttgatatagagagaaaacacaagtgtgtccataaaatgaggatcagcagtaacaacgcaatcatacaaaggaagaagaaagagaaaacatgtccaacaaaagggatgagccggggnatcaggccacagcaaaactaacccgaatcaaagctttttatggagcacacaa

SEQ ID NO: 128519 - DNA, 325 bp, Arabidopsis thaliana columbia
ttgaagactgtgatgatgaagaagagacagcaaaatcaggtgttaagaaggatgatgccgttaaggaggaaggtcctgcgacagagaaggcaccagccgcagaagaaacaacatctgttaaggaagacaagtgaagacactgttctagagatgctgaaaaaccatatggtattattagcttttcaggtttatgaaaccctctgaattacttcctcttttatatgaatgttgttggtactctgttttctttctatggatttgatcttggtttaagtttcttcaaaaaaaaaaaaaaataatatttaatataaaaaaaataataaag

SEQ ID NO: 128520 - DNA, 405 bp, Arabidopsis thaliana columbia
ctaaggtgaatctcccatgaaataaatatcagagattcgcctcatgagatcgaaattacaaagcagaatacaaatgtaaagaatatataatctcgaatgaatcatgtctcttctttatggtgtgtatcaatccactcactcactatacactaaagaatcttgtgaattatcaatattcaagcagcagcagcaactttctttcccccctgcttgtagtaaccaagataccactttcacaaacttttttagaccagtctgcaaatccgtgcttggtttgtacccaaactctctctgtgccgaactgatattagcatgtgtgaagggcacatcaccattcctcggcagcttcatcatgttcctcttggctttcactttcaacaatctcttcaatatactcacaagatc

SEQ ID NO: 128521 - DNA, 253 bp, Arabidopsis thaliana columbia
aaaaagaaaaatgaatgttgaaagaacccaaagttcatgggccatatgcctgagacgttggggggccttgcatagtgcaaagtgcaaattatgcccaaggaggtattggctttgctaggccgctaacagtaagggaagcgttgtgtattggttcttaataaacatgctttgctgtgccacttgtgatcttttgacgccgattaaaggagtatcaagatgtgtcttccatgcgagaggggagcagacttgaatt

SEQ ID NO: 128522 - DNA, 253 bp, Arabidopsis thaliana columbia
cgttcgcactctaaaaggtttatttttattaattcatagaattataatacaaaccagtgcagcaataccccgagtgggaagagtatatttaatagggaataatgcaactgtaaacttcaggaatgttacggatcaccccactggacaccagatccagcagaggagaagaaaccacagatcaagatctatgaggacacaatatacgggcatagagaattaccctgtgtgtttaaaacaagaggataaattaata

SEQ ID NO: 128523 - DNA, 381 bp, Arabidopsis thaliana columbia
atgtaaagtatcgtttatttatttgtttttctattttctttcatgtagttaacctcatacaaataataaaaataatgtgacaaaataacgcaaatagacaggaaacaagaagaaaaagaatgagagtgataattagttaatgtgttagggcattaagcaatgagacttgagtgctaatcaaacccctaaacactttctcactctcacattcgatttcacggatcgaattcttcaattccatcattcttttcatcaaactctttacttcttcggtcttcttcttgcttaaaccaatcaagcttttcttttcaacttggttcaactccacgattccttcgtctagtttctcctttttttcggatcgtttcaaaaaccctataa

SEQ ID NO: 128524 - DNA, 408 bp, Arabidopsis thaliana columbia
ctcacaatatttgtcggaatttattataagaaggaaacattcttaattacaaatgggataacacatttcacacacatgtcattcacaagttttaaacataattgtcagaatttcagatggacaatgatcctcaacagcatctcagctccatcaacaaagtgagggcccggaggaatcaacggtctaacctttgaaaatacggacgcgtaattaaaccttccgggtcctgcagtcactgacagatgtgacatggcgcttcctatcctatagattccatagaaatttagattatcatcgtactctccaccttcaagcatagctgtgaaagccatcacctgcgtgcttccatctgctgagctggcaacataaacacattgagccttaccaagtggttgtgaccccaagtca

SEQ ID NO: 128525 - DNA, 415 bp, Arabidopsis thaliana columbia
gccgccctttttttttttttttatttatatctttcgcctattttactttcttaattcaaatacaaaattgtcttacaaataattttaaatcactgaaaactatttaataaatcgtataagaaaataacaatattagaaaataaatctgaggtttccaaaatacaccataagcaagacgaacttgagcgactacacacaattctcaatgtgacctttcctagtgacgacaaaaagttccgtgtcttccctaacacttcctctaccggtatccaccgtcgcttggtctaattatgctccggggtgaccagaaacgcctcctaaaaaccttatgatgaaacttggatcgagaaaacgaaatttgctacttttttctctcctcaagatctttccaacgacaccaaactcacgatctgat

SEQ ID NO: 128526 - DNA, 156 bp, Arabidopsis thaliana columbia
gagcgaacggcgccagcttttattttattctattttgcaataagtttcaacgttagaggaatgcaacaaaggcttaagatcaatcaaaaccaaacaaaataaggcttacaacaagtttggaattaacataaacaagcagagcgttctctttacttt

SEQ ID NO: 128527 - DNA, 292 bp, Arabidopsis thaliana columbia
gtctcaataatgttcaataatagataacaaaaattctacatcaatacacaacatgaaaaaaacggacaacgcaaagaaagttcagacgcgtgttaaccgccaaatcagatcagcagtttccgttttctttctttagaatccaatgagccagaataaacgctcaagctttctcataatacaacatttttcagactatacttggaggatctccagaccagctacaagcggtacgcgaccaccgagttctgatacaatccaccagtggtgcatgttggaccggttttggctgatt

SEQ ID NO: 128528 - DNA, 224 bp, Arabidopsis thaliana columbia
ggaaagggaaatgaccttttttttaaagtagtacccacattgtctgaaataaaaaacgaccaatcttggtgtttctagggaagttgtaacccacaataaccattaaatcttatttccgaaaatgccatcggtttcatgaacctagcttctaaaagggcataagggggatactctgctcgggcctaaaaaagttctcgggaccaacctttgttttaatcttcacc

SEQ ID NO: 128529 - DNA, 141 bp, Arabidopsis thaliana columbia
gagaaaaaacacaagcttttaatacatttctaaaaggggttgatccttaaaaaaacatcttttggacacaagaacaagtgatccaaactttaaaaaacagagcttatagaaatagagggagagattaaacctctttttttg

SEQ ID NO: 128530 - DNA, 228 bp, Arabidopsis thaliana columbia
gttctaaaaatggtcaataattgattacctaggtggtccttcaatacccaacatgaaatgtccggtcagcgcatttaatggtcagacgcgtgttaaccgccaaatcagatcagcagtttccgttttctttctttagaatccaatgagccagaataaacgctcaagctttctcataatacaacattcttcagactatacttggaggatctccagaccagcttcaagcgg

SEQ ID NO: 128531 - DNA, 168 bp, Arabidopsis thaliana columbia
aaagaagagaggttttttttgtttgagattcaagattacacattggcatattctgacttaattaaacatatggtctctgcccacaaataaattcaatcaccaaatatcacttttgtgaagcgtttttgaggatccccaatgtgactgaagaggaaggatagaaagctt

SEQ ID NO: 128532 - DNA, 103 bp, Arabidopsis thaliana columbia
atgaagctgggacaaatgagttccttttgggagatcgatggaatgaaatcaccatcgtccgtttactgaacctgcactcttattataggagtatgatgactta

SEQ ID NO: 128533 - DNA, 304 bp, Arabidopsis thaliana columbia
  unsure (1)..(304): unsure at all n locations
cccaaaaattaacattttttttaacccttgaaaaaaaccctggacttttttttttttacaacttttaatcactaaaaaaacttaaggtttttttctggcacatattttttttcctttcgaaagacaaatgaatttaacatgcccccttaaaagataccctttaatttatgatgagtttttaaaagcctcaggtaaagcaggggatttgcaaatagggcaagagttttttattaacaaccnntttttggggcccctcccatgggagtcatgaccaccccccttaacttcccctaacttttttttt

SEQ ID NO: 128534 - DNA, 223 bp, Arabidopsis thaliana columbia
aatatgagttcagagcttccactaaagcgctttcggtggggttgacaatacttctattttatctttgaaatgaaagaagatctaaacatgtctctaaggcaaaaaaacaacaacaataacagttagaaaaaatgaaacctcttacgaccggttatcgggttggtcctcgtcttccttttcagggtcatcttcagtttcttcttctttcttctcttcctcttct

SEQ ID NO: 128535 - DNA, 296 bp, Arabidopsis thaliana columbia
aagatcttgaacagaaagtgcagctcgcagatgctaattttaggaaacggaggcaatggatgtaggtgtcaaatctcgagacattgacttatccttttcttctccaacgaaacgtaagagcaagaagaagccagaagcatctctttcttcttcttcgtcttcgggcaatgttactactcctactcaaacagcatcaacttcacatattgctgaccatgcatggtagagggagttaccggagatgacgacggagaatatgtacggacaaccagagtgctcggagcagacgaccggag

SEQ ID NO: 128536 - DNA, 417 bp, Arabidopsis thaliana columbia
  unsure (1)..(417): unsure at all n locations
aaccaaacattggtctggcattacattatatatacttggggggttccaatgaattgccgacatcggacaaaaatttacatgagcggtgaggagagactggacttggacatatgttgctctaacttcttagtgttgatactttttccaaagcttaaagaaatatagacattatttcatagctaccaatatacagtgatttttaagtatgaggacaaaccagagagactttgatcccatatgtttcaagcaacagtggctttgcagcatacattaatgacatcatccagagatggatgatctcccgtgccttcgtcttttcgaccgtacaataatttcttgcctctgaacacaaacgtacctncctgttgcaacacactgcttctgtcttcaggagtggcttctatggtgtaatttttt

SEQ ID NO: 128537 - DNA, 154 bp, Arabidopsis thaliana columbia
ccacaaaaccattgttccattttattttttggtcttatctcttttcctaaatacgggcgtagcatgaatcacaacctacacaacttgacaaaaaaaaaaaattaaaaaacgaaagcttaaaatcggaaaaggaaatatgtcacaaagcattgat

SEQ ID NO: 128538 - DNA, 152 bp, Arabidopsis thaliana columbia
tttttggtttttcgttggttttaatattcattacccaaaaccaaaacaattgaacggaggcatatccatgggcatccacaaggttccaaattatacagttcccaacctgactcaatttcccaattctaattcaaagatggtaactttgtaac

SEQ ID NO: 128539 - DNA, 443 bp, Arabidopsis thaliana columbia
gagcggccgcccttttttttttttttttttatcacaagttttgtttgtttctttttttcattattatccttcaattttgttctgctaatgatagatatttgatggtaatgtctaaacttgaaatgatggatttctataacaaagagcagttttgttggtttccttgactgtatcaactagaaacaaacttttaaacacataaattatgtcgattgataaatgttttacccgtcgtcagtgtcccttggaccgttcacccttgagcgctttccgtctggcagccgatctaattgtctcgattagaggagcgtcctccgcgagcttatcttctctgtctgacccgccactaatagactcatcctcatcgcttccactttgctcatcaaacagtctctttcgctctgtttccggacgttttcttggccgtcccctgcgtcttacat

SEQ ID NO: 128540 - DNA, 175 bp, Arabidopsis thaliana columbia
gaaggacggagcaactaaaagcttcttctctacttaatgtgacattttcccaacttctgatattgttgttaacatatgtaaaaaacttaacgggagtagttaaaatacgtatagatgcaacggtctaagcttctcgctatgtatgaatgccaaagcaattgcaaatgattgcaga

SEQ ID NO: 128541 - DNA, 479 bp, Arabidopsis thaliana columbia
  unsure (1)..(479): unsure at all n locations
aaccaaatcaaagttttgttaatgcaccaaagtgatttagtttagaccaatcacagaagttatggccattacaacaaaaacacataatgtgagaagatagcaaggcaaaaaaacgctcacagaaaccaaaaagtttatatgtttctttaatggtaaaatcaaagacaaaaacataattcttcgcttctgttttgtggtcgaatcaatggaggttttctttttctattggctcatggcaatctccaaggaaaaacttctattggtaagtaagtaaggttaggttcttaacctgacctcttgaaaaaggtgaaagccatggctatagttgcaatggctccaaccacagcagctccaatgtaaagctcttctttgtcaagaggctggaaccatatggtacacttttttacttctttcttgattggctctggctttggagtttcgtcttggcaacacgaaacaccgnttgatccctgacaaca

SEQ ID NO: 128542 - DNA, 174 bp, Arabidopsis thaliana columbia
ttgttttttttttttttttttcaataaacgtactctacaaataagttggttgctaaagaccatacaaattccttcatacaaagggtgggcacttcggaagagttggggttaagaaaaaagaaactgtcccaaaagaccactggttgtttaaaccacaagcttattacactttta

SEQ ID NO: 128543 - DNA, 201 bp, Arabidopsis thaliana columbia
acaaaggcgaaccttgtttgttctaattgagaaccactgcttgtttttttgaagaaaatgtaagatgtagggctgataattcgtctatgtgatccaacggatttaaaatgatccttggtccttactctcctatttatctgaaggacgaaggacccactctgcacataaccggggcacttaacgtatagatcataaacaaag

SEQ ID NO: 128544 - DNA, 438 bp, Arabidopsis thaliana columbia
cgtgggactgccgtttctgataacatatccggtttcattcttagcaaacgcctttgatcttggacgtgttttcattcatttctggtctgttaacttcaaatttgttccagaacgagtttttgtgtccaaagaatttgcagtatgcttgctcattgctcacctttttctccttgtggcgttcgcaaattataagtggtgcaagcatgaaggcgggattataggcttcatgcgttctaggcatttcttcttgacacttccgtcttcactctcgttcagtgatgtatcagcctcacggattattacgaaagaacatgtcgtcacggccatgtttggtgggaatttcatcggcattgtatttgctcgctctctgcactaccagttctactcatggtacttctattcgctaccttatctactatggagaacaccgtttcccac

SEQ ID NO: 128545 - DNA, 554 bp, Arabidopsis thaliana columbia
gacaacataatcaaaaatccttctttgcagattcttatttgtggaattgagagtgtgactcttggtgatgaagaagcaaggaaaagaaaagtgcagaagacaattcttgaaagaaaaggacctccgacattcacttgtgctgtagagatgatatcgagaactgagtgtcgtgttcatcaaagactagatgttaccgttgatgctatactagctgggaaatccgctccatttgagatccgtcaaattcgtggcgaagacgatgttcctcataagttagtgactcccattcctttggagaaccttgaagaggagcctgcaccattgctcaacagagatttcgtaagtgaattgctgtctgacgatgaagatgaagattttcttcccattcggtctaataaggccagaagtaacacatacacgagcccaagaagctcaccggttcatgtgtatacttacaatgtccttgaagctgatctcctccagtagctgaagttatgggtctagacgacgaattagatgtgacagatgatgttggagaagcagatgtcattcta

SEQ ID NO: 128546 - DNA, 265 bp, Arabidopsis thaliana columbia
acttcttaagaacattcctgccattttttgggtctgctttctcagattctgttgcagtgaatatgcaaaagaacaagaatttgtctcatatttggattttttttgaataagcacgtgtctcatatttggctttgacgctttcctttctgttgctgatgttgttgctgtcttctggggatgttaagtctgaacattaagagtttgtatttgtaacactgcctttggatctttttttaataatttcaagcttcgatttggttccgta

SEQ ID NO: 128547 - DNA, 149 bp, Arabidopsis thaliana columbia
gacgaagaggaatcataaaacgcctaacgaagaagacttttacgaagaggcacaaacaaccatgggtgatgtggtttatgatggaagagaagaagtgctccaggcgtggcttctggatgctagcgaagaggatctgagtcttcctcacc

SEQ ID NO: 128548 - DNA, 396 bp, Arabidopsis thaliana columbia
gaacattctcagcttctagaaggttttctcaccatcttttaaattatgagaaaattacgaaattggctaaccaactacaaaagaatgattcaattcaccaaacgaattaaatgaagcattaaattgagagtaaatgagttttcgctagagtgaaactcacgtaagtgttgagctgacgaatgaagcttgagaaattattatgcttgaagtattgaggaagaagatctttagcaaactctgctgttttccacacgacaaaagctgttccttcttcgttccatgaaacgacgtcgtctgtgctatgatcatcaactagctgatacgttttgcttaaaaacggcgccggaactgatctttgcgccgccgtcacagccgtcatctccggcgaactttttt

SEQ ID NO: 128549 - DNA, 378 bp, Arabidopsis thaliana columbia
agagaaacaacaagaagaagtaatggcttgctttatgctctcctccaccgttaagaatacctacccagagatcaggccctgaaccttcgttcatactggaagttggatcggttctatggttggaggagtcaaactatcaacaacgttatcagattaacgaaatcttgactaatggtacacttccttatcatattgcatcgccagcggatgatgcagggaagtctgtgtttctgtatgttggttctcctccttcacagcttgagccagcttgggaagacatgaacttatggtatcaggttcagagacagactaagatattaagtataatgaaacagagaggactctctagcaaatacctgccgcagctccatgggtctg

SEQ ID NO: 128550 - DNA, 153 bp, Arabidopsis thaliana columbia
agagggttaatgctactgttattatgtttttgtctaaaggtgtggtagcagagttggagcctcatcctagaatagttactgctactccaacgatccatcgagcgattggcattactcttgagaacatgctctaccttgggggacctaatattg

SEQ ID NO: 128551 - DNA, 498 bp, Arabidopsis thaliana columbia
aacacaatctaatccacaaaatcaaattttgtttgccacaaagtttcttgtgcttctcgtgattggcgttttgtgtgccattgtcaccgcaaggcaggtcgaagatgtgtccacggagaccaaatttggcacctctcttccaaaaactactaccaaaggcattggagctcagctttctgcaactggcacaactttcagcgatagcaatgtcgttagctatgctagtggttttaacaatccgaaaggtccaggggccaatgcattcgaaagtgccaacacatttaccagcggacaagtcactgccaagggtcgcaaggcaagagtttcttctacaagtgcttctgccgctgaaggcgatgctgcagctgcagtgactcgcaaagctgctgctgcacgtgcaaagggtaaggtagcttccgcatcaagggtgaagggttcctctgagaagaagaagaaggaccgcacaggaaaaaaggattgagcgtgaggtgatctcat

SEQ ID NO: 128552 - DNA, 329 bp, Arabidopsis thaliana columbia
ttgtttttttttttttttttttttttttttatgttgaaccaaatctaaataatttacttaattacatgttccttataaaaggggcatataagaaacaataaatgaaaacctattacaaaacctggtctctcgtttttgtaaaacttgtatagcaatgaagatatctctagtttttggttcatgaatcaagtttcttcgattcttgtgtgggaatcataaaccgacggcaggaaattcgggttgaaaatgacggtttagtcttaaaactggttgatcatcacttggacctggtgtttgtgaaagaagagagtaaaccagctgcttgagcc

SEQ ID NO: 128553 - DNA, 478 bp, Arabidopsis thaliana columbia
acagaagcaatgttgaaggtggaaccttaagtcgatacattacactgacaagagaaatccttttctgtcatctgtgcttgaagaatattattaaacacttttagaaacgcttcatataaaaataagaaaccttacttcccaaacaaagatgtcctcaagtcaaaacacaaacgaatgtttgtgtagacagcgttgatcaccatttcatggtccctggttcaccaaccaactggtttgagtggatcttgtcagcttgcttcatgaaactcggctggctcgtcgaagacaaaagcctcgcccacattctgtcagtgatcaccaccttggtctgtttctccgtgatcctattgaagggaatgtaagtatgccttccattgacaaggccaacagtgaaaccattgtaaccagccatcactccatgaaccgcgctttgagctaaaagcgtgcagcatacattgtctgatgcattgctcggaac

SEQ ID NO: 128554 - DNA, 133 bp, Arabidopsis thaliana columbia
  unsure (1)..(133): unsure at all n locations
cgccaatgggtactggttggcgactagcattttgcaccaccgcccaatgnataacagcgacgcaacagncgccagactctggttgatgcaatcgtcaccggctataatgcttaccccaaagctcctagcccaa

SEQ ID NO: 128555 - DNA, 424 bp, Arabidopsis thaliana columbia
gagcacaagaagagaagaactggggaaagccaggcagcaaaatgccagcacgaaccgtgtggtttggacgcactggcgagtgcagcagtcttaggagacacaataggcgagccagaggtagcgaccacgaccagacatccaaggcacagggctggatgctcttgcatcgtgtgcattcagccaccaagtgggaaaggtaggcacaagcctacatgtggctgcactgtgtgtagcaccgtgaagagaaggttcaagacgcttatgatgaggaggaagaagaagcagttggagcgcgatgtaacagcagcagaagataagaagaagaaggacatggaactggctgagtctgataagagctaggaggagaaggaagtgaacacagcgtgaatagacctgaacagtgatccatacaataaagaagatg

SEQ ID NO: 128556 - DNA, 564 bp, Arabidopsis thaliana columbia
ggccgcccttttttttttttttttttaaattggaataccaacgtttattatgtggtttttttatgtgtgtatatgatatacaaatcaaacaacatatataaggagaagagatattgaatgttgattcttaatttacaggaacatgaagctcgggtctttccggcaatgccatcaatatccgaggcggtgcagtttcttcgtcagacgagaaaccagagagtctagtatccctctcttgcctgcaacgttgtataacaatgaatgacttgaaaaatacataagcaatcaacaagatgcctaatgttctcactaatggtaacatgagcaaagttatcgagaaatcatcgactccacctagtaaaactggaagagaatggcgcaggaagagcagaaggacgaatagcaaggcaattagacggcaacaaatcaagcttgtggggctatgaaatgagtaaagatcatgatcatcatccgcatccccccaggttaggaaataaggattacgaagatctagtccctcgattccccaatcactaccgaagtttatagaaatgcctgtgtagt

SEQ ID NO: 128557 - DNA, 153 bp, Arabidopsis thaliana columbia
ggcctgtctcgcatctccaattcgaaatcgctttttgcctctcttcggtaatcgtctccatctctgactccggcaagtaggtgaaagatttggcgtgttagagccagagaccgcgaagaaatcttctcgtcaagtcattgagaagtactactc

SEQ ID NO: 128558 - DNA, 537 bp, Arabidopsis thaliana columbia
catgtgcttgaaaatagttttaaattttattcttataaagctatattgttcaattataataattcaaaataaaaaagcagtgttttttagtatgagggaaatgtatcatggaatgaaaaagcattaagtataaaaaaataatggattaatatacagaattttttttaaaataaaaagtaacaaaaaatgacattttaaagctaattgtttaaaaaaagtctagttttcatcaacttcttgttcttgttcttcatcaaattcagcttcctcatcagcggtagcttcttggtattgttggtattcagatactaaatcattcatgttggattcggcttcagtgaattccatctcatccataccttcaccagtataccaatgcaagaaagccttacgcctgaacatagcagtgaattgttcactgattctcttgaacaactcttggatagctgtagagttaccaataaatgtagcagacattttaagacctcttggaggaatatcacacactgcagctttaacattgttgggaatccattc

SEQ ID NO: 128559 - DNA, 138 bp, Arabidopsis thaliana columbia
gatttctgcccttctgtaaattgctcttactaaaaatctggaggtaactataccctgggaaatttccctatctgtgttaaggatgttccgcgtggatactacatgttctgccgaggcagcaagaacgatactcgcgga

SEQ ID NO: 128560 - DNA, 155 bp, Arabidopsis thaliana columbia
caacatgaagcagtaagtcaagctacgacaacagagcacttgtctgatgcttgcgacggcgaagaagttggtaatggagggactgttgtgagagagaaagatgagaatgagcctgatcccaagagaagaagtacagaagttcggatttcagaacc

SEQ ID NO: 128561 - DNA, 397 bp, Arabidopsis thaliana columbia
ggaagggttgagaaagtagatttgtatgataatgggactatagcaattgtggaggccgcttctcctgagttgggtaactggattcagtgtgtacgtgtgcagctacctggattgagtcaggagcttctccagaagttgagggctaagaatattgatttcgcagcacataatgctcaggaggaccaaggttctccaatactcaacttgattgggaatcttgcattccctgttattttgattggcggtttgttccttctctcgagaagatcctctggtggaatgggtggccctggtggtcctggcttcccactccaaattggtcagtcgaaagcaaagtttcagatggaaccaaacactggtgtaacttttgatgatgttgctggagtcgatgaagcca

SEQ ID NO: 128562 - DNA, 335 bp, Arabidopsis thaliana columbia
aaaccaagtctttatttatatattaatggaagtaataaaaagggtgctggggaataaaaccagcggcaccaccaaacaaaaaaacagctgagaaaaaacaaaccacatagatcctattgtctatatgtagttactaccatactttaagttgtgcacacactttctctatttccttggcgatggctttactttactatataaaatctgaaccgccgggaaaatgctcgaggtctggatgcccacctcctggccctcttggaggttgtcttgtgaaccggcctggctcaaaacctggaacaccgggtggaccataaggatcaaaacgcgcaccagga

SEQ ID NO: 128563 - DNA, 205 bp, Arabidopsis thaliana columbia
ataaaatcccaactttatttctagttcaggtttgacactttatcacacgtataaatatcgtcgtgtggccttagaaatttacacacgaaaaggttgttaagcagcaacaaaaaaaaaacctggagaaacagaacattatttcaaacacttcttttttttcgttttcttggattcggggctcttgggttggaagaggttgttttgg

SEQ ID NO: 128564 - DNA, 186 bp, Arabidopsis thaliana columbia
gataatgtgagatcctgagatgaattctctctggtacatataaccatttgttggttcttttggatgcataagtctctcaatataatatgacacgaaaaaggggaaaataaacatgaaacagattcaaaacagctctctcttattcgtggattcttttttttgtttgaagctaaatcaaagttttgt

SEQ ID NO: 128565 - DNA, 106 bp, Arabidopsis thaliana columbia
gagaagaagacggggtcacgaggtgtatcgggtgcggacactgtttgctggacttcctgcgagaggcgtgagtacaggctcctcacactctctgcgcagatgtgaa

SEQ ID NO: 128566 - DNA, 141 bp, Arabidopsis thaliana columbia
gactctcaagaggttttattggcttttttatttttagaacgacatcgataaaaaaaccaacgttatgtgtcagagctttgtctagatggcttgagaaggcacatattgtcacccacaggaccatatttgctggaactgcac

SEQ ID NO: 128567 - DNA, 318 bp, Arabidopsis thaliana columbia
agaatatatatggaacaatgtaatattttttacaaaggtatcttaattaattaccaaaaaaagatgatagctctataaagtggtggagaacagaaagacttcacctaaacaaacatagattcgtctataaatcatatcacagaaaacaaactgccacaaaacattttaacaaaaaggaaaaaaaatgtgaccacagagcgatcaggtgttcagtttctggcttggaagaagacttttcctttatctacctaagaacagattatgatctgctttgttctaccaaaaatcgtaagggggagggtgattggcagcaacagt

SEQ ID NO: 128568 - DNA, 389 bp, Arabidopsis thaliana columbia
cattaataattaattttttgaagaagcatgaaagtcaatacaagtgaaagttttggagtagctttatagagccaaaaaaaaaaacaattgagaataatatccgataaggtagatgataaaactcatcttcctttgttttacctaagctcttgcttctctttctaataaatcaatcgttggcaactccgcctgattttgattctgctctgacatacgtgagactaccagcattgttgggagctacattgttgatgtttcctgtgtcagctgaatcacgcttgcattgcatactcctgccttcacctctaacaacagaacgacccctaactgcaccacctctaaagtatgatggggctcttgtgaaccttccacctcgagaccatgacatg

SEQ ID NO: 128569 - DNA, 551 bp, Arabidopsis thaliana columbia
aatgaaagttgaattggtttttaaacaaactcacaccacatagaactcacaaaggggttacattgtcaccttacactcattttcttgtgcggccagaaacttattcttctttggtttctttaaccgtattgggacgtctctgtgcaagtgttctcttagtgctctcgaggacaccaaagaagattgatcctccaatacctatccacaacactcttggcccaataccctttaagagagcaggagctccttcctctcttacaattgtttgaacacagtcaacgattccttgatattgtttggctgatccctgaaccattaatcttgtcttaataacatcaagcggagtggtgactgctccggtcagagcaccagcaaatgcaccgattagagcgttctcaggatcactaagctctctacgcgcggcttttttataccccaagcaaagctgctcatatatgcagaactgtatagcatcaaatggcaaatctcgcaaaaggaaggaccggtatcctgcatagagacccctaaatcccttttttgatgcaatcatt

SEQ ID NO: 128570 - DNA, 292 bp, Arabidopsis thaliana columbia
gagcggccgccctttttttttttttttttttttttttttttccataaaccacaaattttattttcaaggcctcagaaatttacattttatccctgatgatgacctaaatatggcacaaaatttccaaaaaaaaaaaaaaccgatttaacgatgcaaagggcaaaagctaaaattttttaaatacatcatggatcagaacaactcctaataatccaatcccaatgccaattttttccaattttactcatcatcaagtggagttatgatccaccccgaatccccgacgcaaccg

SEQ ID NO: 128571 - DNA, 238 bp, Arabidopsis thaliana columbia
gaactaacaacttaattaacatttaaaaccaaaccaatggatgcagtaaataatgcagggaaccattaagagaaggctacaagacacaagctacaaactttgatgactgcgcatggaatcagggaaacaccataacacctcgagttttcttttatccttttctcttattgagaccactacgaactcaaccacacacaaactctacccggggtaagctcaggccttcgacatgggaacc

SEQ ID NO: 128572 - DNA, 339 bp, Arabidopsis thaliana columbia
gagagaaaacgtcgtttcaaattttattttaaactatgcatttttttagcagctgatgcatgcaaatgtaaacaagaaactgatactgaagactaaagccgatagtcatatatattcataaaacatagattaggttcataagcttttggaaacattacatattcttattattggatcaagatccttgaagtgactttcatgcacttccattgacacctgaagtcaaaatcaagcaggagcagatggaatcattccagctttcctagcataagcaaatataccaccagcatcaatcactggtccagcatcaccaatcggcttaagcttatacctctttcc

SEQ ID NO: 128573 - DNA, 386 bp, Arabidopsis thaliana columbia
cgcagcagtcgattcatgatttttatgaggagctttgtttaattgctgaatgctgcttcgacagctgcaagtgaggcaatgtctatgatattgaggttgcagagggataaagctgaactccaaatggaattgagacagcttaagcggtttgctgaggagaaaatggagcatgatcaacaagagcttttggatctggaagatttgatatataagagggagcagactattcaggctttgacatttgaagctcaggcttataagcatagaatgatgagttttgggttcactgaggctgaggttgaaacggagaagaacatgcttagccgtaatccgagcatgatcgaaaatgattaccaatatgatctccccacatctgattaccctcc

SEQ ID NO: 128574 - DNA, 637 bp, Arabidopsis thaliana columbia
aagaagatctgcttctgcaaaaaaccttatcctgctatggcttcttctttcgtctgctctctaccaaatcctttctttgcttttccggtcaaagcaactactccttcgacggctaaccatacgcttctcggaagtcgaagaggttgtcttagaatcaaagcgatttccactaaatgggaaccgacaaaggtactgtcttttccgaaaaatgtattggtttctctgtttttaaaaactggtgattaatcttagtgttgaggtgataattgcaggttgttcctcaggcagacagagttcttgttcgtcttgaagatcttcctattgtcagtttagctcctttattgtctgaaatgtcatgattattatcaataagctattaatttgatgaatcactaaattgaattccattgccaaaaacttatgggctcttaaattgttattctgaagaaatcctcaggtggagtattgttgcctaaagcagctgtgaagtttgagagatacctaacaggagagattatatctgttggttctgaggttggacaacaagttggacctggaaagagggttctgctctctgatgtgagcgcttatgaggtcgatttgggaaccgatgctaggcattgcttctgtaaagaga

SEQ ID NO: 128575 - DNA, 474 bp, Arabidopsis thaliana columbia
gactgattactactacttgtactaactctaatacatttacaaaacaagtcctccttttccccaagtatacagataaagatttaccagaaccggttttccgccttcatctcacatggaaatcgtaaggagaagacgcatacacttgatctggaaccactagtggtaacttctcaatgtacataaacaatcgtttctggttctctctagcgattgcagtgagattcactgtatcgttttggtccaaaaacatccagagatcacctgaatctactcttttaaggctgtctctgcagaacgggcatgactgtgatctccctcgccaatcgcggtaacacttgatgcataaagaatgagtacagtttggtagcaccaccttgctgttcatctccatacagattccacattcttcttccctctcgatctcaatctccgacatttcgctctcatccttctttctgtatcgcatcttgcata

SEQ ID NO: 128576 - DNA, 210 bp, Arabidopsis thaliana columbia
aaaaacaaggaaccactaatagcgctagcaccaaacaagggcacatgtatacaaagtatgcttctacctttgaaatatggagcaaaatcaaagaaaaggctccacaatcgaaggttggaccaggtagacaatgacagagactatggaaaacctcaaatcacaagaatggtacaaagatattcaaagtccacattaacccaaatgaactca

SEQ ID NO: 128577 - DNA, 227 bp, Arabidopsis thaliana columbia
aattaaaaaggttttgggggtacctaaaggttctagggccaaaccttttgggaaaaaaaaagggcccgtttaaacccaaaaagaacccatcccctttaggggcaattttagggctttggttccatggccaaggggaccaaaaaattcttaatccaaacttagggggttcctgggggaaaagccccttgaaatcctttgggggggggcccggtcccttgggctttggg

SEQ ID NO: 128578 - DNA, 321 bp, Arabidopsis thaliana columbia
ggcctgcctgatcaacaatttatttgattacataaaagggaagaaagggttccacctttgctttttcaggttccaggagaccaaaacccttaacaatctttaacagagaaatgaatgcctttaagccgaaaactttcccagggggcactggccaagggattttacgcccaagaaaactttatgggagaagcaggaaatcaagttcttggtttttacttttcaaatccaaacaaatcaggattcgcagggcggcccaggttaaacgcctcaagctgctttgggtacattctcagggggcgggggatcatcgggtcctgaatc

SEQ ID NO: 128579 - DNA, 366 bp, Arabidopsis thaliana columbia
accgaatggtcatggttgtttcttggcattagtgattcattgtttgtgcaaatattttataaagccaacaatagtatgtaaaatagcctcacagcaaaatctaatttgctttggctgtggagaaagagagagagagtcttaatacgtctcatggctgattcttggagtgtctctcagtaaagttctttagcctggaaaacccttctatgagaagctcaagctcaactgcaaaggtgatacgtagccagttcttaagcccaacagcttgacctggtaggatgatcatagattcctctttagccagcttggagcagaagtccaaatcatcactgatatcttcgagtagtgaaaagtttaacttcacca

SEQ ID NO: 128580 - DNA, 400 bp, Arabidopsis thaliana columbia
ccggtcttgtatcctatataagtacctggcttttgtctgtcagtatatgatgactctaaggagaccggcctgtggttcggaatagtcaagaccttcttcttcgagtaggtagcgctgtacagcaactgggagtctagccggagtgcgggaaccccttgtgtggtggcctgtccctacacatatgtaaatctgaagcctctcttgcgttgctcgagctgtgctcctcaacacactcagttcgtgcttcaacacctgaagtgcttcactcacatgtaacccatgcaagtctatcattctctcattccctctactgtttccttgacccactgggttcctctggcggtaaatggcttcttgagctttcccatgagcagccttcatttgcatattatgcaactgt

SEQ ID NO: 128581 - DNA, 400 bp, Arabidopsis thaliana columbia
ctaaaataccagtctttattaattaattgtataatccttcttcttcctaaaagggggggattaatcatacaactccttgaggtttaatgcagaaaccactcaacactcattcatattacataacccaaagaaattcatcaacattgtcatagctaaagaaagaacacacattcaacactcctctgaacattccgctaacacccctacttgctttgggtccctagaagagaagagggtgatatattacttagatcccacgaatcatcactcatctttgatgtgttcatgatgagcagaagcagaagcagcaacaacatctccatcatcatctccaccagacttgacagtaacaataggcacaggtccatcacgatcatcaggatatctaaccacaacaaca

SEQ ID NO: 128582 - DNA, 348 bp, Arabidopsis thaliana columbia
aaacaaaaccaagattttggcgaacccaataacaaagttttcaactgggaaaaaagtaaaaaactttcagggggtggcgagagaaaagttttaacaatccggcttcccttaggggtattattaaaacaggccaaattttagatggggggggtggccccctttgggaaaaaggcttgtccggggctttgggaagcttaaagcttgttttcgaactcaaatggggggggcatggtttccttaaatcccttccttttcctggtatcagcccccaaaactgaagcctgggtccctggctcaaggggggcagaagacattatttcccaatgatcaaacacacactgggggaaa

SEQ ID NO: 128583 - DNA, 149 bp, Arabidopsis thaliana columbia
ggcaaaacggccaaaagtgtttgaattggggggggggacacagttttaaagcgggtacaaaaccggtctagccggtttaatccattaaacagattcttttcatacaggggaatcttccatagctttgatcaattttataggtttttact

SEQ ID NO: 128584 - DNA, 342 bp, Arabidopsis thaliana columbia
caaatcaacttaaattttttttttttcttcatattgcaaaataaacaacttacgcacgagtgtttatgattaaatccacacaaataaacaagaaccaaacaagaaagagtaatatatctattggttctttatttttggaaaccatatttcgcaaagaaaaatatcaatattcataaatatattcgtcccttcttgatcaccaatagtatctacgttttggttcatcccacagatcaagtgcagcattcctcgcatcattctcaatacgtgcctctagctgcatagccgccatctcgtcttgcgccttcatcaacgactttatcctagaagctggagaactcg

SEQ ID NO: 128585 - DNA, 242 bp, Arabidopsis thaliana columbia
gggaatccgatttaagttttataagtttctttgataaggataatgaggcatttttaatgcaaaccattaggttttttccgggattgaaaaaaaaaggcaggcgacccatttcaggttttttttttaatataattcgatgggcttttttgggaaaataaaattttcttcaccaggaaatggggaaaaagggcctgcctgcagttttttaattttcctttggggggagctttttaagcggtttc

SEQ ID NO: 128586 - DNA, 403 bp, Arabidopsis thaliana columbia
agaaatacagccagccaggatgcggggcaaactggcgctgacgcgggagataacggtgggctggatttattgctgaatatgtttggcagtcttggtgctggcggcctgagtggcacgaaccaatccaatgttcctcctgaagagcggtacgctactcaattgcaacagttgcaggaaatgggattctatgacagagcagagaacattagggcgttgcttgcaaccaatggtaacgttaacgctgctgtagaacgactcttggggagtatcggacagtagcatacaggttcatgaactgatgtctctccatctggcttctcagctatagaataaacagcttgaatgtgtgtttttcagtaatgatatattcatcgaattcataaaaatttatatatgataggat

SEQ ID NO: 128587 - DNA, 438 bp, Arabidopsis thaliana columbia
acgcgtccgagccactatggcagtctcctcactctttatcctgttgtggtggtttctcaccaacaatctcccacaagacagaaattctctgtccaaatccatcactcaaagcttgttgtttactttcatccggtgcttaccaaaaaggcagcggaaacaattggaagagaaggcaagctcttgtgggagtaggaactttagtggcaacttcaattccagcaactttgcttcttgctgaagagataccaaaaagctactcgccttttgtggatcgagaagacgggtattcttactattacccatcagactggaggggcacatgattcagccttcaaagatagatacttgcaactgcagaatgtgcgggtcaggttcataccaacggagaaaaacgacatccatgaagtaggtcctatggaagaggtggtttatgatcta

SEQ ID NO: 128588 - DNA, 483 bp, Arabidopsis thaliana columbia
ccacgcgtccgcagaaacccattttcgatttggagaaaatagactactttgcccgcccaaactggtttacggggctcttgtttggtcttctcttcacggactcgtcggtggtgacaaaagttatcagaaatcaggaaatgttccaggggttggattgatgcacgcacctattgcattgctaccaactgcattcccagaagcttattggaagcaagcttgtaatgttactcctcttttcaatgaattgattgatcgtgttagcttggatggcaaattcttacaggatagtctctctagaacgaagaaagttgatgtctttacatctagacttcttgacattcactccaagatgctagaaagaaataagaaagaggacattcgtttgggtttacaccggtttgattatatgcttgacgaagaaacaaattcacttcttcagattgagatgaatactatctcgtgttcgtttcctggccttagtcg

SEQ ID NO: 128589 - DNA, 187 bp, Arabidopsis thaliana columbia
atattggttttaacaaaaaaaaaaaaaaaacaattagggaagggaagaataaaaagactatgttgggttagctaagttctgacaactttaactaaagtaacccatgtggggcacgagatcataaaacgaggattggaaagctgatttcataatctccttttgatcattttgcttcaccatgaagatc

SEQ ID NO: 128590 - DNA, 105 bp, Arabidopsis thaliana columbia
ttttgggtttggggaggaaccaaaaaagcctgacactgaaaatcatttatatttaagggcctcacgaccgggcccaataccaatgttatgaatgggcacacccac

SEQ ID NO: 128591 - DNA, 438 bp, Arabidopsis thaliana columbia
  unsure (1)..(438): unsure at all n locations
acgcgtccgcaatcgccttcttccacggtggctctcttttactgngttgtcacggtcccaatctctctctcgcgctgcgacggcgaagacggctggtacataatgttgaagctttggagatggtaccagcgatgcctgacggttcatcctgtgaaaactcaggtcatcagttctggatttctttggggatttggcgatgtcaccgctcaatacatcactcattccactgcgaaacgtcgtcttcttcgtctcaccgttagtcattttccgatctccttctctctctcttaccttcgattgaagtttaaaattggagtttctctccgattcgtgcggattgatgaaattagattttagggtttttgaatttgcatctatgtatctctgagtttcatgatatatctgcgtcaattgattcttgtgcatcagtatatttgc

SEQ ID NO: 128592 - DNA, 374 bp, Arabidopsis thaliana columbia
ctgttgatgatcaaggggagggggtaatcgagctccgtcgcctgatccggctgattcttgagctcctgttgttgttgatcctaatcagtatcatgcgattcttaagagcaagctcgagcttgcttgcgctgctgttgctcgtcgtgtgggaactgtgaaaccggaagattcgagtgctctagctagcaatcaaaaacaagctcaaggctccattgtggcacaaacctcacctggtgcttcatctgatagattttctcccacaacaagcacgcaaaagaaacctgatgttccagccagacaaactagtatttcatcacgagatgattctgatgacgatgatcttgatggagacgcagataatggagatcctactg

SEQ ID NO: 128593 - DNA, 464 bp, Arabidopsis thaliana columbia
  unsure (1)..(464): unsure at all n locations
gcggccgccctttnttgttgttttttttttttnnnncgaggttttaggtattcctttatctcacaaaggggtggaatcttcagacagcggcggttaatttgtaaagatatagaaacgtagagatctttaaaaaggataaacagctaacagtgggatctagcgtgctcaggtttgtgagtgtactcataatcaagatgcacaaaagcccgttcgatctcctctagtagctcgagcttctcttgcagcgattctccaatgtcgtgagccacttgcagaggcatgtcagctgggagaacaatatcaacctccacaaaataatgagagccaaatgtgtatgccctcactgtgtcaatgtgcctaatggctttatggtggttccaacacaggtaagttagtttctgcagatactctggtctagctgatttcccaacaagagagttaacgttctccaagaccgtcattga

SEQ ID NO: 128594 - DNA, 378 bp, Arabidopsis thaliana columbia
acacactcaaaagccactagggttggttttatggggggatcggggggcccctccatagagaaagatacacatgcatgaaaaatgacctaaagggggttattggtattgttataaggactgcctatatccatcccatcctccttccgggtctttcctcttcagaacaccacctgacatttgatacattcttgcttgatcctccttcgacggtacggaagcagatgaagataattgccttgatacaagtgttgattcgtctcttccctctgtttcatgacctccaggaccagaatttaagtcaaggcctgacctaaaccatttcgcgctattgtccaaaacaccgccattgctaccaccgtttgggaggccaactataca

SEQ ID NO: 128595 - DNA, 460 bp, Arabidopsis thaliana columbia
  unsure (1)..(460): unsure at all n locations
aacaattnnggaaagcaaaggtgatggcttaaacaaaagaatcgcgcgaaaataaggtagaggtttctttaatcttctttggtcgacgagagccaaaactgacacacaagaactaaacaacaatttagaaccatatcccacaaaagggcttttctctattcttctattctctaattgaatatggttaataaaataatcagataccaatttttgtaagaataaaataaattccccgcaacatgtcctctcggtcttttgctcttcttcccaactctctctctctcttctgtaaattagcctcaacgcagagctgctttcatcttgatctctttcttgtcttttccgcttcagtttctttagtctacaaggcgtttatagaacagaacgtaagcagccgaggtcttgatcttttcttggctgatttggtggacatggctatcatcaaagtcataccatcgat

SEQ ID NO: 128596 - DNA, 383 bp, Arabidopsis thaliana columbia
  unsure (1)..(383): unsure at all n locations
ttaaaagccagaaaagagnnnaagctccaacaagaagcactaataacaataatcataaagcatctttgagaggaagaagatgcatatcatcatccatcacatcaatccttttatcttcatgcatgcacgcatttacttggagcttaaggcaaaggataatttaggccgtgatttgtttttacccaacagattcatctgtttgagacgttcttcttcctcttcagctttcttccttcgcatcgcttcttctttctgtcgttgcagctcctctagctctcgataccgatcctcctctttcctttgcctctccattgcttcttttctctgagcttcttccactctctttaggttctcctctgctattctctccctctcttctttct

SEQ ID NO: 128597 - DNA, 354 bp, Arabidopsis thaliana columbia
attattgaaatcaagagaattaaaacagaggctctgcaaaagaagatgatcaaaacaatcacatctctacgcaaaactctggttctacctcttcatttacatattcgtacgctacaaactttcgccaagtacaacgcacaagctgcatcggctttgcgagaagagcgtaagaaacctctttatcagtaagttctctttttcatgatccagccaggtcatatagatattttgttaccattggaaaaagctctgtttcaaaattgttgtaattgtatcatatagaaatggagatgatgtatatgcggatttggattgggataatctcgggtttggtctaaatccagctgattacat

SEQ ID NO: 128598 - DNA, 392 bp, Arabidopsis thaliana columbia
tgacaattctatctaatgtatcaaaacgacaaagcaataaacgtcaaacgatatcaacacgacttggctgtctcagctcatttcttagcttctgagagaagagcctacaagcatccatgcttagatccaccgccgctgctagtgccacgtgcgccgccgcatcctccgtacaagtcacgtgcttcacacctacctccaccttaggcttgctctgtttctccactccttgcaccctcgtcgacatcacaaaccccaagttttgttgcgcttgagacagtgagaacctgaaatccgaccccgatcctgaatcagttcttgatgatctgatgcttgaccacgaagaaagatcgaaacttccttcagagctactccaagaagcagtcgtagtcgta

SEQ ID NO: 128599 - DNA, 521 bp, Arabidopsis thaliana columbia
ccagagagaactcaacaggctcactggatgatctagtcactgacattttcctccacgcttcttcgggcaggaatttaagcgacagtgaaacagagagcgtggagttgagttcttggacaagaactggtggacctttaatgagaacagcttctgctaataagttcattgattttgttcagagtcttgatatcgacattgcattggtcagaggatttagtagcagtcccaattctccagcagttcctcctggtggctcgtttactccaagcccgagatccatagcggctcattcggatatcgaatcaaacagcaatagcaacaatcttggaacaagcacttcaagcataacagttactgaaggtgatcttctacagcctgagagaacgagtaacggatttgtgttaaacgtcgttaaaagagagaacttgggaatgccatcgattgggaaccaaaatacagagttaccagagagtgtacagctcgatataccggagaaggagatggattgtagctctgtatca

SEQ ID NO: 128600 - DNA, 509 bp, Arabidopsis thaliana columbia
  unsure (1)..(509): unsure at all n locations
gaagaagagttgtttgattatctttaagcaaagaggaaactgttnttcnctagatccgatccaatccaatcaaacaaaggatccgattgatcagaaaaaatccaccaaatttctcaagatcgaaacatataattgaagatgagcgacgtatttgaagggtacgagcgtcaatactgcgagctctcaaccaatctctctagaaaatgtcactctgcatcggttctctccaacggagaggagaagaaggggaagattgctgagatcaagtctggaatagacgaagctgatgtcttgatccggaaaatggatcttgaggcaagaagtttgcagccgagtgctaaagctgtgtgtctttctaaactaagagagtataaatctgatctgaaccaattgaagaaggaattcaaacgagtctcttccgcagatgctaagccgtcttcccgtgaagagttgatggaatccggaatggcggatctgcatgcagtatctgctgatcaaagaggaagatt

SEQ ID NO: 128601 - DNA, 163 bp, Arabidopsis thaliana columbia
  unsure (1)..(163): unsure at all n locations
cgatgagtggtgggattaaagaagagaagacggataaggctcttttgtgnagattggactatgaatcagacatttccacttggggaggccaagggatcccatggaccgcccgggtgccaaatgaaatagacctcgacatggtttgttaaccaacccataccat

SEQ ID NO: 128602 - DNA, 138 bp, Arabidopsis thaliana columbia
gagagatttattcagcaatggcagcctcatgttctactactactttcagagcctacgcttcttcgggggctttctctacttcccaatctgacccatttgaaatcacccttcaaagctgtcaaatatacgcctttgcca

SEQ ID NO: 128603 - DNA, 184 bp, Arabidopsis thaliana columbia
atataaaatacctattcattaatttttcttttggccattccatagaaaatggcttattaaggggaaaagaaccccgaccattgggaatgaaatgggccgagattattcattagaatggtttaaaaaaaaaatttaacttccgggaagcttgggggcttggaggccatgaaactggtgccttgga

SEQ ID NO: 128604 - DNA, 130 bp, Arabidopsis thaliana columbia
ccccactggtggttgggctaaagaaggattgtatttttaaatctttaagaaaatcttcaatacagattcggagagaaaggatgctggacagcattttcctatatacgctatttgcctcggatcacgagct

SEQ ID NO: 128605 - DNA, 250 bp, Arabidopsis thaliana columbia
ctctctctggttttttttttttttggaaccaattctgccaaaaattgaatgataaataacggtcctggaaaaataccaaaagtccaaaaaaatcccccaaagcaaagaaatttatcgaagggttccattaattccccaaaaacagaaaagtcatttttttgaatcaatacttcaatcaagctttcgattttttccctttggtatcagcacctacgggcttggccttgaaaggcaaaaacctttctccccc

SEQ ID NO: 128606 - DNA, 355 bp, Arabidopsis thaliana columbia
accttcacagtatggaaacaccccatctgtgaaacccacacatcaaagtggaagtggatctggtgcctacccacagctcccaatggcacgcccactaccactaggtttaccaatggcatcaaccatcatccgcggtggaagtggtggtggctcagattccccaagatcaggaaacagagccccactcgatgatgtcattgacaaagtggttagcatggggttcaccaagggaccaagcgagaggaacagcgagaacattgactgagaacgggcaagctgttgacctcaatgcttataagcaagaactactcaaaggatagtattgacttgtcgggtgatagctctgggggtaaca

SEQ ID NO: 128607 - DNA, 362 bp, Arabidopsis thaliana columbia
aggagaaaacaataaaattttccctagggtttttgtttgagttggcctggttcttacatatatatatcaacccccctcgggggacggaaaacttgcttttacataaaaatctacgggttctcctacgggcaaatataaattttctggctttattttctcgcccaattttgctcgcttcaatttgggaaggaccctccatttgggactagcgatgactaaccgggtgtcattaaaagctagctcttggtggagttcttcaagggcaaatactcctgatgtttttacccccatcacccaagacatgtggagaattactacttgaagaccatttttttttaaaacctcttgggcattcccccctc

SEQ ID NO: 128608 - DNA, 522 bp, Arabidopsis thaliana columbia
aatacttctgaaaatgatttattttttggttaataaaaaacttagtcccaagaacatgtttatagctatctgttttctatttattctctttggtctctatacaaaacatggaactgttctgggacttctttgtaaaacctactatctatattcaaaaatattacaaaaaattaccaaaaaacggttccatcttccagaaaacaaaaacaaagaagaggaaagatccgaacaccaaaatcttgacgaatcttttaacgaaacagatcagatgagagttgtagattctgataaacccgttgtcgccttaggtactttcttctccagcattgaggttcctttgaatattgtaagctgcacttccttttggtactcctgcaattgctggtcagacatctttgtaaagccaaacttctttgtccatatagactctgcttcttcagctgccggaagaaccaggttctcaacatttaaagaagaaagaagattctctacacaggcatacagcccttggaagtatcccct

SEQ ID NO: 128609 - DNA, 434 bp, Arabidopsis thaliana columbia
aattcttggacaaacaaaaccgtaccgacttgaatatattgagacaattgaaagagaagctggaagcacgtaatattgtaacacataacgctactgttatatacacatggatttgtgtgttgacgaacacccgatcaaaggttacacaattccaacgttctagtgggttggcaaagcaacacaactgggccatgttcacagtcattgtaatgataagtgtcatacataaagggcagcataaagatagtatgaagctattacagccatatctaccaggtaacgctggaggacacgcagcacctggtgtcagcgcaggatcgccataccaagaaggtggtgctttatatgcacttggtctagtacatgcacagtacggcgttgacaagctgccgtacttgctggacgcattacgcaatgcaggcaacaatgagatt

SEQ ID NO: 128610 - DNA, 313 bp, Arabidopsis thaliana columbia
cccaaaaactactttaatccaaaaaggggccccaaaacattacaagttccagcccctatttttaaacttaacccgaatagtttaaaccgatcaaacccaccctaagcaaaacatggaaaccggggaagcaagcaacattacctttcacctacccgcctaccctacataaacagaacctcctccaactaaaaatccaccacccgaccccaaattgaaaaacaaagagggccttactgaagtggttttttttttgtcccctccccgactgattttactcaatcaacctcaattactttttgacgtttgggttggg

SEQ ID NO: 128611 - DNA, 559 bp, Arabidopsis thaliana columbia
gttgaatctcgatattggcttttttttatcaacagtcaaatacataatgaaatgagcatttttctttctagctatttcaaattacataatgcttacaacttggagcacttaatccataatcaatcaaactatcaaaggattattaatacactgctactatatagaactattggtttttccataatggactaagcaatggaaagaaaaaacccggtgatggcggtggtagcgattcgttactaccgcctaaaaaccgaggtgaaaatgcaaaattgggtgagaacaaaggaaatggtgatcttggctgcggtgacaaagcaaactgtgaagctggagactggaacgacattggattaggaccggtttgatgtgactgaaataagccggttgatggttgaaccgggttttggttttgtggctgcactcggtttccgacagggcttgattcgattaggtaacgcatataggccgagatgggagattcagccgggttactcgaaaattggttaacaggctgaaccggttcagatgcaattggaactgattgaaccggcggtgg

SEQ ID NO: 128612 - DNA, 514 bp, Arabidopsis thaliana columbia
acatcaagtgcaacgtttgtttagaagatttttatacaggtcagaagataaggaaaaaaaacctaagcttttgcaattatcttgaggcaaaccaagcttgcatacaacgatcatatcttaaatatttggagaatgggttactagatccataaactctaatcctttatacataaaaggccactatcttcttttaaagaggttggccattgatccacctgtggaacatgatataggtttcatatggcttgtactctgctgtgtgcccacctccctataatcaaaatccacaacttaatacaccttaaaccgcaataaaaatgttcgagtggattaaaaaaaggaaagaagaaagacttgctctgacagttgcaaatgtcattttattggcataagtctttgtgtatctgccaaataagacgagtcaagagtaaatttcgaagtgatcgagccttataaaacgaaagaataagagaagccatttaaaaacaaaatcagtttattattatataccccc

SEQ ID NO: 128613 - DNA, 256 bp, Arabidopsis thaliana columbia
gttacactcaaaggattttatttttaggctaccaaatttattttttttatgtatcacgactcattattattgaagattactttcaaaccaaaaaaaaaagcagaggttacacccacaaaaaaatcaccaagtgtatgacaattgggcaattagggcatcgccacttttattgtttatgaaaattagggcaatgaggccatgcccactttattcaattttgtgacaaacaggttgagaaccacttaaacaacctttt

SEQ ID NO: 128614 - DNA, 566 bp, Arabidopsis thaliana columbia
cttgaaacacaaaccaaattaaaactcaaaaatagtacaataaccaagttgatttaacttaaaaataaaaacaaattgagaaaattctccatactttttccggtgatgtttcctttctacctttctcaagaactctcctccggtgactccggttttctgcagagaatcatatgcatcggagagaatattccggtttcacctcctctggtcaaataatcagcagtcttaaacaacatctcatgaacatcaacagttcctttaggagcaactccaaccgctgacaaaatctgaaccacaatgtgattcctccaataagcaagcctacccatcttaagcctagtccaccacggctcagccggtggactcgccagatccttctccttcactatctcaaacccaacctttttagccgtctcagcaatatccacgtaagccctaagcccaggtaacgcatcacctctctcaatcccttggattacctccacgtgttcgtcatcctccgccttaaatttctccgtcgtaacccactcgtacgacacatacatagatccgggtttcaacaccct

SEQ ID NO: 128615 - DNA, 372 bp, Arabidopsis thaliana columbia
gggttcacctgcgttatttttagaatataatgctctcctttttcccacgggggagattcaaaccttttgaaacatttcaatggaccaaggagtccaagaaccagattagggttttaggtattcaagatttttttaaagaaaacatagaaccggacaaccatcaacatcatagttaaggcgagtagaacatcataagccttttttgaaggacggtaccagatcatttctggcagaatgttaccgacttgggttggtttggttttcatttcttcagagcttttacatgaaatcgtttttaagttcttgaagcgatttgttgcttgaagcaatgtctttgttggatgtcattttatcagttaccattagtccctt

SEQ ID NO: 128616 - DNA, 187 bp, Arabidopsis thaliana columbia
ggaaatattatactagatttaaatgtttttataaatattcttataacatcataactggggggcaattagccaataaattgggggcaaaaccaaatatcgcactccaaataacaaaataaaaatacataattatttctcgacatggctaacttcagcttcaccagaaagttcttcgagggacttgccc

SEQ ID NO: 128617 - DNA, 177 bp, Arabidopsis thaliana columbia
gagcccaccaccaatgacacaaaaaagggggctttttcattgggttactgcgggaaagccataagccatacttttatgaccataacgaacaaacgcaaaaccttaaccaaattgaatcgaaaaagccttaaaggaaatcacttttaagaaagaacaggggaaactgtaagaggattt

SEQ ID NO: 128618 - DNA, 136 bp, Arabidopsis thaliana columbia
cttctatccagcgtgtccacaacctaatcttgtttctgctgttatttcgcattccgatgcactctggctcaccatgcttttgcaggtgaatgaagttgacgttcttcaaatcaagaaaaatggcaagtggtttttt

SEQ ID NO: 128619 - DNA, 278 bp, Arabidopsis thaliana columbia
ggtcttaaaagttacatctttttttctatgcaattcttataaattcattttggcaagttactgagatttttttttgtatagatgaaataaaccaaataaggatcctttggttaaatatattacaatgaagaagagccagagatgttgctctgcaactgaatagtatcttgagtagcaacatcaattgtaccattgaggaaaccagtgtaccaagaagcagagagctttggagtcctcttgcgaccaggatcgctgaaattcacatagtacattccgaa

SEQ ID NO: 128620 - DNA, 177 bp, Arabidopsis thaliana columbia
gcggccgcccttttttttttttttttttttttttttgaccacaagaaaaattgttttttctatcttttatcaacacaagattatacagaagatctactcacagccaaaggccaacacggtttttctctcttgatccccatactcagctcgctcattagccaggatatcaaacacaca

SEQ ID NO: 128621 - DNA, 151 bp, Arabidopsis thaliana columbia
  unsure (1)..(151): unsure at all n locations
aggcaaacaacatgaactcatgatggtctgctnnncnnttacaaacattcaataaagaactttttcttatagtaggacaaacaaatagttgaaaaatgagatttttttatacatagaacattgattgagcttgaggtagcatttgggtatg

SEQ ID NO: 128622 - DNA, 139 bp, Arabidopsis thaliana columbia
gaaggaaaagatcaatctagtaaacactttatttacaaaattcttacaacaatttacattctcggcttaacttaatccacaagctgattcgaagccaatctttcaactcatttcaacatcatcaagctgttcaatgaga

SEQ ID NO: 128623 - DNA, 480 bp, Arabidopsis thaliana columbia
tcgcgatctagaactagtcggccgcccttttttttttttattctttttttttgatacaaaaagtcaaaaagataaatcaaacattttctgtgtccaagaatcaatcacatgtgttcttgaccatttacataaatctcaaaatgttagatacactaaccgttgtttttagccagatttctggataatgtcatgatgattagatgagaaagtcagcattttttccagtgtccatcgacagttctttcaaacacacgtggttgcctccttgggaatgttttgctccattctggatatttcagtaaatatccccaattcctaaaacacacaaaaagaaagagaatgcaaattctcctatgtcctgtttgtgttctagataatgatccagcggaagcttccaaaatgactaaccttcttaaactgtttacgaagtctggaccttcagcagaaggtgaggtggaacagctagtgaggatttcttca

SEQ ID NO: 128624 - DNA, 203 bp, Arabidopsis thaliana columbia
acaacattccctcccgcgcggaagcaaggaggatgagtttgccgttcacctttttgaatagatggtgatggaagcaacatggctctctagacaggaaacacggacgcaaagaaattcacctcaaggggaaattacctattctaggcagcatgtaacagagaatcatagtcaggtttcttcaccaccacgagtgactccaatcg

SEQ ID NO: 128625 - DNA, 172 bp, Arabidopsis thaliana columbia
cttgtagaccattgatatgttcttcgaaaaaaccgtacgctcttacgcctttctttctagttccttccatcatttctacttctctagctggactgacttgctgctaccactaaagcttggcattcgtggaaagtagggaatttagggtttttgggtgcgtgcgtgaaaacaa

SEQ ID NO: 128626 - DNA, 310 bp, Arabidopsis thaliana columbia
acttgaaaagagaacctattttgcattttttttgagttattattcccatgtcaaagtataggggggctaacttgtaatgtttggggcggatacaatgaataaataaaagagcttattctttgcctaacctacataatgaacgtggacgacacaaaagagaaagtattatttcgagcagcttctctctttaccatcttatgtgcatacaacaagacgctccaacaaacatttggctggaaccaatctctctgcaaccttttccatagtcatgatgcgtttgtagttgatgaggatgcattacttttccttc

SEQ ID NO: 128627 - DNA, 238 bp, Arabidopsis thaliana columbia
tctagagcgcgccgcccttttttttttttttttttttttttttttttttttttttttttttttttttttggagcgaccattaatttcaatttgggggagctgaagaacaacaataggggccatttttattttgataataacatactggactaggacggggcataatacgcggggctacaaaaacaataacgggggagcattttaacaacaccaattattcattaaatctttgagaatt

SEQ ID NO: 128628 - DNA, 245 bp, Arabidopsis thaliana columbia
aaaaaccctgggggagcaaatccctaagggtaattgggggtcaaaaacaaatgtttcccgggaaagtaaaaccctcccaattaaaatttcaaatcaaatccccagggtcttgttcaaaccttggtttttttttggagccgttccccccaaaaagggaaattctttggggggttcaaacctaaaatagatcccctcctgcccacaaaagggagtgggttttggggggggaaaataaagagaaaggg

SEQ ID NO: 128629 - DNA, 543 bp, Arabidopsis thaliana columbia
  unsure (1)..(543): unsure at all n locations
acataaatatttagttgaatttattatttataattatattagataaattgtacaaaacctacataccaagtcttatactaagttactagataacatcaaaacaagttcatgagagagaccgttaaaactttcagaaactcctactttcttgttgaacataaacttttctttagccttcttaaaattctcaaagtctccagctttagtagacacatctttactcaagatctgtcttcttagtttgtcacaagcacaatacttcacgtcgtacacatctacgtctttaaaggttgtaattgtagtcctcactcctacattctcccaacaaagagactttataagtcaaagatactgaaataaaatttaattgaaaaagagattacaagagattcacgattcaaaaaacaacttaagatacagaaactactcagaactaggatgattaaacaagtgatgacttactatcagtgtatacattagatccacacatatagagatattagtaccaaaaaatataaactagcanaagacacttaataaact

SEQ ID NO: 128630 - DNA, 447 bp, Arabidopsis thaliana columbia
tttcacgaccgtggaaccaacttatctgcaacagccgctgtgttaaccataggttacatggcacctgaactaataacaatgggcacgtctatgaaaaccgatgtgtatgcttttggtgcttttcttcttgaagtaatttgtggcaggcgaccagtggaacctgagctaccagtcggaaagcaatatttggtcaagtgggtctatgaatgctggaaagaggcttgcttattcaagaccagagatccaagattgggagtagaattcttacccgaggaagtcgagatggttctgaaacttgggttactctgcacaaatgctatgccagaatcaaggcctgcgatggaacaagtggtgcaataccttaaccaagacttacccttaccgattttctcgccgtctactccaggtatcggggcttttatgccagtttctatggaagcattatct

SEQ ID NO: 128631 - DNA, 423 bp, Arabidopsis thaliana columbia
  unsure (1)..(423): unsure at all n locations
gcctgtttttttttttttttttttttttttaaacctcagnaaaagatatttttcgagatcattaaacacaaaacacacatggagcttttttgagctatagaagaacactaaataataatagggttggcctaagatagccatcacaccttaactaaggaacaaaaaaaacccaatttaccaaaaataactcaacataacaaattaaacaaacccggggtaaaagattattgtcgtcaaacaattacaaagagatgtgatttttaataaatactaaaaaaaaattggatgtagtaacttatatatattagatctcgaaatcaaaacccccttatatgaaactctctttctagaaggtcttgaatggcaaatttgtatatcatggcttgtgaggagggcattggtagcatttggtaaagagaccaa

SEQ ID NO: 128632 - DNA, 140 bp, Arabidopsis thaliana columbia
acataaatatttagtatgcacaatttaatatacacaatatcatatgaatggaacaaaggctgcataccttgacgtattctgtgggagttctctaacccgttttctattactagtcccagaagtagattcactttgatcca

SEQ ID NO: 128633 - DNA, 356 bp, Arabidopsis thaliana columbia
ctggaggggaatttttatggggcaaggttatatatgttcccatgagggcgcgcacccaacttatgactggaaagtttaaaacgactccataacaaaagcgaaagcataaagagacaccacaatgtcgacgatggtgctaaattaagggtgatgataggaggatcctaagagaggtgaccacaatcggcaacaaccacaggcttggtggggtttccagatgatgaaccaaccttatcgatggcctttaccacgtgtaaggcttacacgacctggccaaacaccacgggcttcccatcaagccaatggggcttaacggcgcagatgaagaactgagatccgctcgggtttgcaccggc

SEQ ID NO: 128634 - DNA, 258 bp, Arabidopsis thaliana columbia
cgccggcctttttttttttttttttaaccaggttcttttaaaacaactttttttggcattatggaaatggggtttaccaacggggtaaattaaaccttacttaatgaggccatggtttcaaacttaaccaccccttacccccaaaattaaaattggaaaggttatttaatttaaaattaaccaaggggggggcaggcttggttatttccaaagggttttaggggcaagaggccccgggaccggttttggggggaacgg

SEQ ID NO: 128635 - DNA, 161 bp, Arabidopsis thaliana columbia
tttgtttttttttttttttttttaaacagagataaatatccttatttttgatctccacaagttattaattacagcacgggggggggaataataccccaaatgaagagcagttatttaagtatatgcagagcatttaaatacaaacatttatgctttgcttt

SEQ ID NO: 128636 - DNA, 147 bp, Arabidopsis thaliana columbia
catatcataatccatttaccgaacggaccatttgtttccggaaacaaagccaaattggatttgggcgggggtttgaactcatgaaatgcagatagcaataacagtgcagaggctgacgcatgtttatttgtaacagaagcaaactaa

SEQ ID NO: 128637 - DNA, 175 bp, Arabidopsis thaliana columbia
tcgctttttttttttttttatataaataccttattcataaatcagacttttttttttccgatggaaatggtctcataaggggaaggggatcacttccattaggacaggaagtgagcacagataattcttaggaatgttttagaaaagaaattaagcttcggggaaccttgggggc

SEQ ID NO: 128638 - DNA, 279 bp, Arabidopsis thaliana columbia
ctctaattaaaattccactacagattattttgcaaagaaatttagacacaagtgggggggggatttgcttagagttagaggagggaaaaagaacataaaacgatgttacagttttacaaactaaacgaacccaccgaagactggttttatcttcacgaaggattaagcctaaagataccgttgtttactctagtttccaatatagccgagacggtgaaggaccattgctaaaacgagcattaatattgcaaagaacaatgcgccttttcccaacaacca

SEQ ID NO: 128639 - DNA, 132 bp, Arabidopsis thaliana columbia
catgcatgcacagaaattaatagaggaaatttttaatgctaataggacaaataaacagagagaggaggggatccatacaaagacagtcaagctgattttagaaaaatggaccatgaagaaaattcaagcctt

SEQ ID NO: 128640 - DNA, 431 bp, Arabidopsis thaliana columbia
tttgtttttttttttttttttgttggcctagcaaatattatatgcatttaggtataactatcatatccaccatccaccatcacaggatttaaatactactaagcccctaaccccccaaaaaataaacatgttaaagctaattctgagtgaaaggctcccaacaaaagactgtagtgcataaaaaactaagtggctaaaaacgcctaacgctgctttttaggatgcatacataacccaaaagcatagagagaaagagagaaagagagagaagtggtgttttagttgtggaggtaattgcaggatgctcctttccgacaatgtccattttcgcggaagaacttgcatactctttgtcccttgaagttgatctgctgcccacctgactgcctgttccaaccatacccagaatctccattctggctctgttgttg

SEQ ID NO: 128641 - DNA, 307 bp, Arabidopsis thaliana columbia
agattcaaggcttaagagcttctcatacaaatgttctacacttgaaacgaggagtcctaacaaaactacatgggggggaaatatgttcaccctacccttgaaacaacactattgtgcagggcataaatcagttggggaatcttgtagcttttatcacccacgggaccattaaacgctgttgctgatgcgatccaattccattgtggcctacattgcttctatggtccgcaaaccttctgatactcattctctcttccttaatgctggcaaaccgggaatccagggtctggggccattgcctttgccc

SEQ ID NO: 128642 - DNA, 377 bp, Arabidopsis thaliana columbia
ctcaataataatatccagtataactattttgtacgatacaatatttgagtaaagggggtgaatttaacaaagaagaaaggagatgaaaattgtcaaaatatggtttgcgaccaatctagtggcaatagagtttgataatagagtcagcgcctgcagtgaatagccatggttgtctcggatgaaacttgcagtccaagactcctccttttgaagaatgacctcttagaatctccaatggcacaatcagaggattctggttcagatcattatacaccattccatggaaaacataagctgttgaatcctccgagcacgaagcaaataacggatatgatcgatgaactgccacatttgtaatgtctttaggatgattcttg

SEQ ID NO: 128643 - DNA, 383 bp, Arabidopsis thaliana columbia
aaagagagatattttaaaaatcaattgaaaggacaataaaggtgtgaagtttgaacagagaaatggggaagaaccgtttagttacaaacctgtcttgatgagtattttttgaagttacttcctaaaaaaaccacattacacttataaattctccaagaacccctaacaaagataataattgtagtagtaatataacacacgacgattataaaatataaattacattcaccaccaccaaacctaaacgtagagttaaaacactcagagaatgatctctggcccaagaagttcttgtactgtcttggattcaaagtcagtgtatagaatctatgttcttgcttagctcttccagcttcttcattctcatcttttcgctttctccc

SEQ ID NO: 128644 - DNA, 265 bp, Arabidopsis thaliana columbia
cccggcgccaacattttaaaattatagggggtttaccgcccttcaaatggaaaattttaaaccccgttgtccctaacccgaaaaaaaaaaaaaaaacccttcaacccccgggtcccttacttttttaaccaggaaggttttggacccaaaatccaccctttaacaaaaaaccgggcctttcacaaatttttcctggcattttaccccgggccggggaaaaaacccttgtttttaaaaaggcttctttgctttaaaaaaaggtttt

SEQ ID NO: 128645 - DNA, 486 bp, Arabidopsis thaliana columbia
aaggaaccgtggttttaatctaaaactgccactgttacataaagttttaagattagtgaaagacatgaagagagatttagttaagaaaaaataaaatgactgtccttaattaattaagagctttcagaattagcagaatccataacaagttcacactcttccatcacagccgtttctttaatctcttgcaacattttcaacacttgccacatcgtcggtctctgttccggcgatgttaagctacaagctaccgcaacttgagtcaacattccgaatttatccctatcttttctccaattcccattcttcttctcaccttcctctgtcactttcctcacccattcaatcatttcatccaacggcaaaaccggaatcttcgaaggttgcttccctgtcaaaagctccaagagaagaataccaaaggagtatacatcagctttaaccgattgataatttaaactcttgtgtcgagcttcaggggcttta

SEQ ID NO: 128646 - DNA, 327 bp, Arabidopsis thaliana columbia
aaaaaaaagcctttggggaacaaaaacccgtaaaaatttttggaaaaaaggttccccccaaccgttcaccccccaccaaaaaactttcctcgaccagccaagaaaaatcctttttttccctaaaaaaatcccgaaaagggggccttttaaagggccctggcttcaagcttttggttcccttaaggggggcccaagccccccccaccgggggttttaccgggcccctggttgcttaaaccctttggttgggccggcccccctttttttggacaaaaacctccccccggcctgggaaccaccacaaaagggtttggccctttccccccc

SEQ ID NO: 128647 - DNA, 478 bp, Arabidopsis thaliana columbia
aaacaaaaaaaaaactattcttatttgacaattttgagagtgtggtcgatatacagtgataactcctaagcttagaatacaaaaacttatctgatcatacacactatatgattcgattaatacaaaagatttttgattatcaaagtaacctcatcatcattcatggatctgctgccttggcgaaacgtcccctgattcttgtcctgctttctgcacgaaccttgcgtgattcatacctgatgtgtttctcgtaccttcgagacttcttcttttctttgtagcgagagagagcagagttcctctcaagactgttgatctcatgtgtcatcgaccttgtactagtgataaccggaaccatcacagtctcttcctcacatcggtttaagcagccggaaacgggaaccatcaccgatgactctcggtctacattctcaggtttctcatctgactccgacaagttttttagcagagagcaata

SEQ ID NO: 128648 - DNA, 507 bp, Arabidopsis thaliana columbia
tggtacaatcggtgctgttcaactagcaccacgaccccttattttaggaatgcctggtctccgtcctgtaatgcctcctatggttagaccggcttctcttccttttgtaacacctgcagaaaagccccagaccacaatttacattggcaagatagctaccgtggaaaatgactttatgatgtctattcttgagttttgtggccatgtcaaaagctgtttacgtgcggaagatcctaccaccaagaaacctaaaggttttggattctatgaatttgaatcagctgaagggattctccgcgcaatacgcctgctgacccaacgtactatagatggacaagagcttttggtgaatgttaatcaagcaacaaaggagtatttgctaaaatatgttgagaagaaaatagagactgcacagaaagccaaggaaagtcaaggaaccaaagagaaccaagctgaaggtcctgagagtgagcaagacaagcttgagagtgctgataatgagacagg

SEQ ID NO: 128649 - DNA, 467 bp, Arabidopsis thaliana columbia
aaattccaacttacgaattaaattttattctaacaatacaaaacacacaaaggaagaaatttctgatacacaaacaatttatcggttgaaaaacttaaaacacaaagaaacaacatgtcagtggctaaaaagatgatatataatcaatcaaattttgtaacgattgatatgcggaaccgttttgttgaaacgatcgtcctactttctccttaagatgttctatcctctctcggatggcttctccttcaggttccaccaataatctccttatcgctccctcgatctcattcctttcaacccgatcctctaggtttatcccgaccatccatacatcgctaacaaatcttgcatttagcatttggtcccaacgaaaaggcaaacagatcatagggactgcttcacaaacactctcaacagtcgagctccaaccattatgtgtcaggaatcccccaatggctcgatgcttt

SEQ ID NO: 128650 - DNA, 289 bp, Arabidopsis thaliana columbia
cacaaaaaaatacccctttttattgggcctttttttttgttcttacacaagttttggggaaacattcaagatttcaacaaaccaaaaaccaaacaaaaccggatagacccaatctcaaatcaaaatcaaaagggagggaaataaatattcaaaaggatgagggttctttcttcttcaagggctctgtttcttcatctcgggaaattcgttaattggccattttttttaatcttttaaacttaagtatctttcttgaaaagatcaaaaactccacaacaatttttccacc

SEQ ID NO: 128651 - DNA, 319 bp, Arabidopsis thaliana columbia
ggccaaaaaggggcagtctttcattgccctaagatgggggaaccaaatgattattctttaaacgttcattttttcgaactccaattttgtaagaaaacaaactcagtttacggaaaaaaaatcaagggttcacagcttgcagtacttgttgaaccaaacagcaatgttgaaaaagctttcataatccgtctggggtctatctaagggatgattgtcattgggaaatacaagaactttaaccttaactccttttttctttaacgccctcacgtattgaaatccgtttgatatgggaacacggagatccttagttcccaaa

SEQ ID NO: 128652 - DNA, 356 bp, Arabidopsis thaliana columbia
acttatagcaaaaaaaaatcaggggtggggaagagtttttccagattataatcaacccgaattttttttttccacataagctgggaaagatcgaaagagggtaaaattaaaaagacgagtttaccctcatcaaatcggggggggagctgacccgtagggggagaaaacctgaactaaagagttcagggttttaactggcatttccagagccggaatataatcagtggttttttttaaaatcaccggtccggtttgtttaccgaaaccggaaactaaccggcctaaaacacgtactttccggttaacatccggtatactttttttattaaatttaaacaccgaccctttcggttttt

SEQ ID NO: 128653 - DNA, 214 bp, Arabidopsis thaliana columbia
agaaaccctcaaaatgaagaaattaaagaacccgcctttataaggtggtaaaatacaacggtcaacaaacactaattaatcattggctaggtgaacaatttatcattatttattggggggattgggggttttcaataaacaggaagatttttgagcgcccagccttttattttttgggcaatataggcattatatattaaaggctcgaatttgg

SEQ ID NO: 128654 - DNA, 384 bp, Arabidopsis thaliana columbia
ggaacaaaagttccaatttggaaaaaaaatgaaaattcaacccaactttatacaattttctgaaatattaccctttaagtttatataatcagttttgttttagggttagcccacaagactgttttaaagatgaaaaaaattccggatgattttgggttatatgaaaaacataatttggggttttacctgcccaataaatctacaaattttccttcggcaccagcttgtgtggtagtatcaacctttccatgtaagcttttattttgacaggatcagatggagaagggtttaaatccaaagcaatgccgaaatgtaacacgggtttggcgtattgctttagctgattggatattttgccaagcgatgcatggactctgttttttt

SEQ ID NO: 128655 - DNA, 180 bp, Arabidopsis thaliana columbia
caaaggaaagatcacaatatatatattttaacaagggaaacttcatggggttggtactaaattgaacggccaaacaggaatagaactgcaaaaactggaggctccaaaaaccccaattttattttgttccaataaaccacaaaaaattttaaaaggggaaggaaaatttttctgggggaa

SEQ ID NO: 128656 - DNA, 525 bp, Arabidopsis thaliana columbia
  unsure (1)..(525): unsure at all n locations
ggaaaaggatgttaatggagttaacatttttaacgctatttccaactcgctgtgttcatcaagttgttgaatgatgagataggaatatgaaaagggagaagcattgtgttgaggttttacgatgctccaaggatttcacttactcctgtgtttgctcagttgaaacctcaaaaccaggcggtataaacacaatgtcgtcccagtttgacgtcgtgctttccctcattcccttgacaatatcttcgaaaactgcaacctgaatatcgcctggtttcagagcagggttaagtcggttctgttggctggacgctcgtattagagatttttccaagtcctcctttctaaagaaaacagggcgataactcatgttttcacttcgtagaatcaagctctttgactggaaaaccggaacaccatggaagtcatcatcatcgataccagctgttttcctttccttcaaggcattnttcacttgagtagactcaggaatcaacctaaatgccacaccattaacttttaactgga

SEQ ID NO: 128657 - DNA, 472 bp, Arabidopsis thaliana columbia
  unsure (1)..(472): unsure at all n locations
tttnttttttttttttgttttttacattaggcaaagatgaatttttttaaacaaaggcattgcaaagccaattccgtttatagaaccaatgcatttggatagaaacacaagcaacatttattcttccactatataacttaatacattttggagccatactaacataagaagcaaacttatgttgtaaacaaagcatataaagatcagtcattgctcggaacaagagttagtcattcatttaccatgttcaagcaagccggtgcccttaaatttctcttccattaacccatctatacgagcagccatctccggagtcagatagttcgaccaatctcccacctttcctttcctgaaatacgcgctattcgcgtaaacaccaggacgatcctctctggctttctcccctttgttagcttcaagattcttcaacgtctcgaagctgcaaagattcaccactttctcaacaacacct

SEQ ID NO: 128658 - DNA, 129 bp, Arabidopsis thaliana columbia
gtcaaagtctatctaaaagtggagatagcaagaaagatcaatctgcggatgcaatgcctcctgcttatactgttccagacctgacggcaactgatctactaaactgtgtgacgactaaactggcagagc

SEQ ID NO: 128659 - DNA, 110 bp, Arabidopsis thaliana columbia
actatatcatgattatgtgggcccgaaaaacaatttggatcacctcaccgctttactatgctgggccctattgtttgcaccaggtctatttgggttcatagtgatttgtt

SEQ ID NO: 128660 - DNA, 257 bp, Arabidopsis thaliana columbia
aaaaggaaaaacggccttttttagaaagcaatatagccttgtaaacccggaatacctggggggaagaccaagaaaccaaaaggcattgtaaaaaataaaccccccccaaagtaatcaagattcaagacaccccccggttttggggggaaaaaaaaaaccgcccttttgtttttgggacaggggttgggtaataaccctgaaactgaacccggttcgtttttaaatttgccggtccccccccccttgcccatgaagga

SEQ ID NO: 128661 - DNA, 298 bp, Arabidopsis thaliana columbia
cctggttggccaaaggaggatattgaccgtaaaaaaggggggggcctttccaatcctaataagattttcaaaaggagcatcaccaaattttggaagaccccctaaaaaaaggataaccccttggtggaaaaggataaaacctaattaaaggtattttctggttaaagaccttattagaaccccttggaccaaggtttattattaattcagcttttgccagacaccaaagagggattggcccccaagttgggagtggggtcctggctggaagaaaaaccggaaatggtccggccttttt

SEQ ID NO: 128662 - DNA, 254 bp, Arabidopsis thaliana columbia
caaacacaaacgaaaagaggcgacttttgcctattttgggctctctttttctacggagagatctgctctctctatgtatctgtcaatccgaaagaagaagatgcccacttcagtgaaagccctgactttactcgggaacgttgttcatttatcatgcttcaatcgccatgatgcatggatgatcaacagaccctagacttgtgtactccttctgctactgaatccgatgatctatcttactcccactctacttc

SEQ ID NO: 128663 - DNA, 462 bp, Arabidopsis thaliana columbia
cggtgagagaagatgaagatatttgtgaaaactctcaaggggactcatttcgagatcgaagtaaaacccgaggattcggttgttgatgtgaagaagaacatagagagtgtgcagggcgcatatgtgtatcctgctgcaaaacagatgcttattcaccaaggtaaagtgcttaaagatgagacaactattgaggaaaacaaagttgctgagaacagttttattgtcattatgatgaacaagagtaaacctgcttcagctgcagcatgtagtgcatctgctggcacatcgcaggccaagtcgatacctgcctcaacatcacaggcttcaatttcccctcagactccagcttctgtatcagcaccagtggcacctgcaccaacacgttcaccaccacctgcaccgacaccgacacctgcacctgtagctgcaactgaaactgtgactacccctatacctgaacct

SEQ ID NO: 128664 - DNA, 238 bp, Arabidopsis thaliana columbia
gtaatctatacaacatgatgcccagagggattcacacacttggcaaagcaacgagctcttacattgctctataaataagtctacttttccatatacgtgagttggaaacataagcgttttaagccacatgaaattgctcaggaacacacacggttcacactcagacgaggagataaaaagtcgtgggaccgcgcaaaatcgggacggattccttaagagacagatgcccttaattgca

SEQ ID NO: 128665 - DNA, 308 bp, Arabidopsis thaliana columbia
aaccccaaaaaaacaaactggatggggtgattatgaacaatggggggggggttgtttttccctaccaagaaaccaggggtgaccggccaaaaaacaaaagaaaaggtaaacgaagacttatctcctgttttttacagccaacggccattggggcaaattgggatgaaaagctttgagcaaggccgcaaacttgatagcattctctatgctgcaccacttgagcttccatgtaactaaacccactgttctcttctcttggacctttaatgacccaacaattccttgggttccaattatcatttcaaatt

SEQ ID NO: 128666 - DNA, 312 bp, Arabidopsis thaliana columbia
  unsure (1)..(312): unsure at all n locations
aaacaaatacatcggtantcatgatattccaaacttacagaattggatatcgtccacattatgtgacaaaatttcagctttcttctgcaaatctaattggaaatattacaaacaatacaacatcaacaactctcaaatattcaatctctctgtggaatggagcagccaaccatcattctgattctgactggaacagccaaccatcattctgattctgactggaacagcttctccgtgtttctgggttttgctggaaaatcaatgcttgttttcaacttcctcctcttgccattacttacttggtctccacta

SEQ ID NO: 128667 - DNA, 309 bp, Arabidopsis thaliana columbia
aaagaatagcgggagggcatttcatagcccccccttcttggggcaatttttaacccaaatttttttggttttcgaattagggtatctcaatttccccataaagggataaaaaggccgaagagcctttggctttaaaacaaaacccatgggcccttttatgttccgaacagctacctttttagatggggcctcaatttttcaacccccacatttgggggccctcaaaggattttctgggggtttggcccggcctgggaatgggcgcctgaaaaaccttggtgggggccaagcccgggggtttatcccccc

SEQ ID NO: 128668 - DNA, 279 bp, Arabidopsis thaliana columbia
ctgaagctccccacacaagcaagctgcgatggatcccaagaacctatatcgccaccaaggaccaaatatattgaacccaccaccaccaccgcgaaatcagggtttggtagatgatgatgctgctactgctgatgatatcgacgagaatggcagaccaacatctgacattaaagattcacagatcgtggtctctgattccgacaaagaaccaaacaagaagagttagaatcagaaccagcttggccctaagagaagctctaacaaagacagacacactaa

SEQ ID NO: 128669 - DNA, 144 bp, Arabidopsis thaliana columbia
acttcccacctaaatctcgccggacgatcgtaaccggagagtcttctgcgaccggacaagtggttgatatctaaagaggatgttgcagcttctatcaaaagtaagactggagctcaacacattagatccaagactggcgccttg

SEQ ID NO: 128670 - DNA, 412 bp, Arabidopsis thaliana columbia
caaaaacattaacttcatggaaacagtggttacaagcaagagacacaatacaagttaaatgtttgtgttttgagaagatgtcttggtaaaggaacaaaatttcatccagatatgaatcatttacagttaaaaccaaaagatggaacctttccgacatttgagcttccatatgctcaagcaagtctctgttctcgactcctgatagcgtcttcactctgtttttaagttagggagaatgagttccgctaatatatcgacccatgtgtcaggaacaccgggtaggcaccaatgcatacagtcttgtccccatattgccaccgcgtcctgcttccctaaccagatcgctgggtgggcatctgctctgaattcgcttagatgggtcagatcaagtaacttgatctttgtcgtttgc

SEQ ID NO: 128671 - DNA, 128 bp, Arabidopsis thaliana columbia
aatataaccaacactctattacagtattactaatccaatggtgcaaaacatgaaaccggggtatatctgaatttaaggccggtcctaagaaaccctaaaagcaaatacaaccataataagagcagaaa

SEQ ID NO: 128672 - DNA, 224 bp, Arabidopsis thaliana columbia
aatggaaccaacactgcattcccgtttttcaaatacacaggcggaaaacatgaaaccacgtaatatcctaacctaaggccgttcctacgaaaccctaaaagcaaataaagccatcctgggagcagaaaacagagagccaatccaccaacatgacgagacttggagatgacacaacatatgagaacacaacagcttcttcaccaattcatatactatgaacctta

SEQ ID NO: 128673 - DNA, 535 bp, Arabidopsis thaliana columbia
ttccaaattgcgcggtcaaaagagctatcaggatacgggtctttgtgtagcgtttaatctttctagatatgatttggtccgcttgacaagtaaccaaaaagctttcttcctttttgtacaagcgaacggtcgacgacatactagagcaaagttatgggtggcaattagtaagatctcgactctggacatgggagaactctccattatgggcactgagcaaaacgacagcagaggcttctcttctatagagccagagctgagcgttagatgatgttgctttttaggatctacatcgaacaccaacctctgctttacatgctacagagacatccgagccacggaggaacaaaccgcttgcactaaagccgccatcgagaaatctctagagactgatcaagactgagatcctctcatcgagtctttctggacaacgtggggattaaagcacgaaatggagtgtgtctctctcagctatcctaacttagttacacttggcagtatcgataaaagttttgaactcaagttaaatttcgat

SEQ ID NO: 128674 - DNA, 509 bp, Arabidopsis thaliana columbia
ctctccacaagacatcataaccataactcatcatcccgttttttcttacgacaacaacaacaccattcatcattctctaatcattccgacaacaaccttaacaacaacaacatcaacaacaatctcgagaagctctccaccgaatattccggcgacggcagcacaacaacaacgaccacaaacagtaactctgacgttaccattgctctagccaatcaaaacatatatcgtccaatgccttatgacacaagcaacaacacattgatagtctctacgagtaatcatcaagacgatgatgaaactgccattgttgacgatcttcaaagactagttaactaccaaatatcagatggaggtaacatcaatcaccaatactttcaaattgctcaacagtttcataatactcaacaacaaaatgctaacgcaaacgcgttacaattggtggctgcggcgactacagcgacaacgctaatgcctcaaacacaagcggcgttagctatgaacatgat

SEQ ID NO: 128675 - DNA, 229 bp, Arabidopsis thaliana columbia
atgcaaccacttttttattgataatatattttattatcttttactcaagtgtgtctggggaaagttaatgtacaaatacagagatgaataaaccaacaattactcatccaaattaaaataaaccggccttagttcagttctacgcggtctagtctggtttgggtttacccaaagagttgctgaatcacagtctcagcgtctccattgtattgcgatagcagttgaattg

SEQ ID NO: 128676 - DNA, 445 bp, Arabidopsis thaliana columbia
cggccgcccttttttttttttttttttttttttttttggcgggagcagcttatattattacctgcatactagatcatagttttcaacagggcttcaagcaacaaaataagaggttcaatcgaaatgctcttgagctattaagcagcagcagccttttttgcagaagatggaaaagcatcggttttcgaatacagcccgagttcctcctcgagtttcttccacgcattcaagaaactgggagggaatttcttcttcaccgttctaatcaaccctttagcgtcatctcttttcttgttctccaccaatcccacaaccaaatgcttcaaagggttgaaatctggaatcttgggcatatacacactcttcttgaagatcgcatagccttgctcggacaatcgggtataacaaagatgaaatatcaatgtcctaaaagtagctgcgttgg

SEQ ID NO: 128677 - DNA, 124 bp, Arabidopsis thaliana columbia
gtctagtcttttatattgtagataatatttctatctggacataacaacaatggcagatgcaaacgaagtatgtgttatgggccaacaattaaaagcgggataaatatgctggaaataaagaaat

SEQ ID NO: 128678 - DNA, 451 bp, Arabidopsis thaliana columbia
gctttttcctctgagcggccgccctttttttttttttttcttaacttcttactgacaataataatatttataaattacatgaaatttcacaaagatctattaacaccacataattaatcaatatttgaacaaaataatagaaatttacaaaaccttatactacattcatgtatgtacattatgaactattatgatggctgagattcaaagtccatcgtagtgacccccaaaagatatttgagctcttacgacaggaacacctttcataccaaagattgcttcattgagctttgttgcatgattcacaacttctttcatcctcttattatcatcggagtaaatctggaaccgaagcatctggttcttgttcttacagattttgatattgttgtgtccgaggaagaagacacatacggtagcagcagcagctgcaaccccaaaagaacagatt

SEQ ID NO: 128679 - DNA, 285 bp, Arabidopsis thaliana columbia
  unsure (1)..(285): unsure at all n locations
tttntttttctttttttttttttttttttttgttcgttcttggggtttattaagccaactggaaattttggggggtttacaatataaatcaatatatatatatatatagagagagagagagagagtgagcactgagcagagtcaggcccatagtttaggtatactaccatcttcacatgaacttaagaactttaactccaaaggcaattcctatgaaagttgcaagggggaccccaaatattccggccagaatcccgggaactatcaacgagttccatccctttg

SEQ ID NO: 128680 - DNA, 409 bp, Arabidopsis thaliana columbia
gccgccctttttttttttttttatacgaacttacgacccaataaataagattatgatagagaaagagaaagagaaagaagttgaggatgtgcaaaaacgtaaaccgtagtagttaacaaaagaaaaaacgtggaacacaaaccacaaacccacagctacatgataacattataacaagaacatatgttagaagaaaagaaaaagatacaataaagacgttacataacaaaaaagaagaaaagaaagaactcttcgctcaagtaacggctccgaggaagatcttactggtagtacatgagctgctgcgcgttctggtaaccaccgtcatatattgcctggtttgaaccagtggctcccattgcagcttgtttaaaagcatgttgtccctgcgggtgatgcatcatcggat

SEQ ID NO: 128681 - DNA, 262 bp, Arabidopsis thaliana columbia
agcaaaagtcctcctatttatataacattaaagcaaaaggtggaaccatcatgaaaatcggacaagatagcgaaagatccaaccggcacttgcaactacactacacaactctgaaatacaaatacttgcaaaacacagtccatatcagaaactaacacacattgcttaggtgggaagacagttttttggacaaaagaaaaacattccccgttactttatacactctgataaagtacacaaaaacaatattaaaaaaacaaag

SEQ ID NO: 128682 - DNA, 165 bp, Arabidopsis thaliana columbia
cttgggtacggaacccttacccttaaagggggtaaaacgggttttccacgcttttcccaacttccaaaggccattccaaaccaacttttgggggttggttcaccccacaggttccaaccccccggccacacttggtttcttattttaccaaacaacccaaggttg

SEQ ID NO: 128683 - DNA, 373 bp, Arabidopsis thaliana columbia
cacccattaacttctcatttgtattttcattattggccaggggatttgggcccaattagttggcttttctaataagaaaaccaaagcttggggggcaaacaaaaccgaaacttttggtttaccgggctgggcaagaccccttttccgaccaatttcattttcaggtctggggttaccccgggtgggccttaacttttcaacaaggcacaaaatagcaatttcatgaaattcttaacatccggcacttaggggggttatgaatcctttttttttacaaaccgggcctgaaaaaaaaaccaatggcttattttttattttcagcaactccccgttttaaccaatttttggtcttttaggggggtcaatcatttaa

SEQ ID NO: 128684 - DNA, 323 bp, Arabidopsis thaliana columbia
agcggccgccctttttttttttttttttttttcctaacagtcatgaagaccaatatacgtacaagggggacaaacttgcattatcatagaagaagaccagttttccaaacactaccttaaaacatatcaacaaaacatacaagatcatcatcatcatcatcatcatcatcatcatcatcatttcatcagatgttgctgtaagctacagagaccaagtgaggaactttaccatcatcaaaaggcaagctaacatattctctagcaaactcttcggttatctcccaaacaagctcaccatgaacagctttacaatacatatacat

SEQ ID NO: 128685 - DNA, 290 bp, Arabidopsis thaliana columbia
gtgaagggaaattttttagaaccattttttttctgaagaaacaaataaatttgccccaggacacaaagcactacgtcatggggaaagataataaagagagggaggttgctagactctaaagtttttaacccaactttgacttaagggaagcaacaggaagcttagaaagaaccttgttatcaaacaccatgtaatgtttattcagctacttaaacgcattctctgccactggaactaccttgtcctcatgtctattatacaacattggtactgtctgtaacaccacaaaa

SEQ ID NO: 128686 - DNA, 139 bp, Arabidopsis thaliana columbia
aaggttggagagacttcaagagctcatgaattactttaggttcttaagttccgattatcaaagaagaacaagaagatgcaacaagtgatgcagaaagggattcagcttggggaagctgcgtatgaatacgcaaggggta

SEQ ID NO: 128687 - DNA, 471 bp, Arabidopsis thaliana columbia
gagagtaaacttttttataattgatgtactttgtaagaatctttgatttcaaaagatggtgtaatattacaaatactttctcttatgaacactatataaagggtttctacatatgcttcttcttcatgtacccatagtgtctcaaatcttcatcaattagccattggtaactactttcaaacatttttcatcattagaccagacttagctcatcaggaactgcagttgcagaagaagaaagcttcttgtttagctctgctagttcttcaccagcatcacagatgtatgacgaagcttgtctccctgataatgttgctccttccatactatctatgtaatcctgctttgtgtatgaaccggcgaggaagaaattctttatgggcgtcttctgatcgggtctgaatggatcttttccgggtgcttcacggtacagagactgagcgatttttacaaccgacgaccaagtgactt

SEQ ID NO: 128688 - DNA, 434 bp, Arabidopsis thaliana columbia
aaatcacacacacatacaaatacgggctcacatgttctcttatgcgcaagcaaccctaacaacacatcaaccatgttctgattcttttccttcaaaatagatacacaaagtctgtttccacacgctcattcctcaagccttaccttcagctctcgcaaaggtgagcccaacgcaagcatcaacaaattctttatctatgaaatcagctgagaatatctgcagtttatcagcacatcctctttttacacactctatgatgaataccttggcgtagcactgtatcctcttagtcaccggttttacacacattattgggttatcgggctgcggcgtcactgtgttctccacccggtaaaagaatttccttgaagtagctggttgctgctggctcaaatgcttgatgttgctctcgaatttggtcgatggaagatctg

SEQ ID NO: 128689 - DNA, 467 bp, Arabidopsis thaliana columbia
actaacttgttaatcaattttaaacatacttaaaaatactaataatcccctatgtctcgccggcactacggcggagaaatcaagagtaagattctcatatgcaacaaaacaaaaaaaaactaataattcttgaaacacaaaccaaattaaaacacaaaaatagtacaataaccaagttgatttaacttaaaaataaaaacaaattgagaaaattctccatactttttccggggatgtttcctttctacctttctcaagaactctcctccggtgactccggttttctgcagagaatcatatgcatcggagagaatattccggtttcacctcctctggtcaaataatcagcagtcttaaacaacatctcatgaacatcaacagttcctttaggagcaactccaaccgctgacaaaatctgaaccacaatgtgattcctccaataagcaagcctacccatcttaagccta

SEQ ID NO: 128690 - DNA, 416 bp, Arabidopsis thaliana columbia
gggggcaaaatgcaaatactctttaagtaaatcaaatcaaaacaagtttatccaattaaaattttaagaaagaacaagttaaattgagactgagttatcttatttcatactcttgtactcggtagtcgatacatatatcttgcgagtgaaataaacaaaaccgagtttcccacttcaacgtgtgtggctcatagggcaagagcagagctaaggttcatggggttcatatacttggtggtaccggtcaagatatgtcggactatcatgcggtttgctttctcagtcggatgaaacgcatcccaaaagacgtataactcacggttcggacacaagtttgatagaaccgtacacaaacccatcccattgtacggcccttgtccgcaacaagcaaccttcgatgttacaaatccatatct

SEQ ID NO: 128691 - DNA, 390 bp, Arabidopsis thaliana columbia
tcttttttttttttttggtaattgtattttataaaatggaggagtctccttttcggttgcaaacgtcaaaatagtgaaaacctagacaaacttaagatattgccaaaccttgaatcgtttccagaccaaaacaaaaattctccgatgctcactacgaaaaacagacgacattaatttagctcaaaaaaaaaaatacaatacagggtttgttaatgttgcatccctttctattcagcgctcttagacttcttcttcttcttcttggcgctgggaccatcatcagactcctcttctcctccagctatactcttctttgtcttcttcttatctgacttctcgttctcctctgcagactccatcttcctcttctctttcttcttctttttctct

SEQ ID NO: 128692 - DNA, 374 bp, Arabidopsis thaliana columbia
ctagaaactaatttgatttttgggtaatttttgcagaaagatgttaccaaagtggtcagaaaaagtgagaataagcccagagagaggcttaaaaggacctcaagatgatgtctttagctggagaaaatatggtcaaaaagacattttaggcgccaaattcccaaggagttattacagatgcacacatcctagcacacaaaactgttgggcaacgaaacaagtccagatatcagacggggatgctacggttttcgaagggacggacagaggaacacacacttgttcgcaggcgatcacaaaaacaccaccattagccttgccggagaagcgacaagacaccagagtcaaaccagccattacccaaaagccaaagg

SEQ ID NO: 128693 - DNA, 478 bp, Arabidopsis thaliana columbia
agccaaaaacaaaagataattgcttccataaagtatttaggggcattaaaggagttgtttgtctatattattaaaaacgaaaaaaaaataaaaaaatcagcacttcaaaaaaagaaaaaaaatacataagtttaagtccctcactctcaaatctcaaaaatcttcattgtatcttgaatatccttttaagtctcaaaacaagatccttctcgtcgttagataactcattccagtaattagttctgattacgtccacggatcgactagaaatgtgactgataagcctgtcgtctacaccaaagtgcctcccaaacattttctgttcttctgggttagaagcaatgatcttaatagccacctcctgtcctttccttgcataatcaactggcatgttgttgttattcttaattgatgagacgcgcccaatgtccataaacactcttacattctcaatccttttaacaatgcaaatgggagt

SEQ ID NO: 128694 - DNA, 329 bp, Arabidopsis thaliana columbia
ggaaaaaccggggatgaataatacatttggccaaggccaactgtttaaaaaaaagaacaagatgtttttgttttcccccaacaaacccggggggggttcagatttttttggttggccaaatttggaaaaggaaaacttgaaggggctgggttgaaacccttataacttatttggggaaccattttggttttcatatgaggcaaaagctttggggatggaaacataccccttaatgcttttaaaggactcagttttccccaaaatcttattgggggcatgaaacaaactcggggggtttgatttgggaaaaaacccaagggggggccccc

SEQ ID NO: 128695 - DNA, 296 bp, Arabidopsis thaliana columbia
caagcaaaattatccggaatttgcatatttgaaaaccataataaaaagtctcagagatatccaaaaaggagggagagagaaagtcacagaaataaacagaaaaaagaaaaaggctcaaacgccatcgaagttttaagaaccaaagaaaaccataagagagtcgatcataacgaaagtctcatcatttggcacccttcttcactgcagccttggtgaccttggctccagttgggtccttcttggccacgctcttaataacaccaacagcaacggtctgcctcatgtccctaacagcg

SEQ ID NO: 128696 - DNA, 500 bp, Arabidopsis thaliana columbia
cgccctctttttttttttttttttttttttgggcaaatacacaacttttctttcatttattccttggggaaataacaggggttggggaaaaccacatagtcgagtaacatcacaaagggaatattcaatcaaagcacaaaaaaaaaaaacatttagacaaaacacacaaacttgtgtttcctacgcttcattccagagtgtgctactccatgttgactgggggagttgccttgaataaaagatcatgagcaatagtgtcccatggtaatgaaatggacattaagcagcatttaagagggaacatctcgttttcatcataagaggcagtagcagctgctattgcatgtttagctgcgacagatgcaacagaggctgctttacggaaaatggatccgagatcgatgctcttttttgaagacataggtgaaacaggccctaaaactacttggctctgatctgagaaaagcaattctatacaatcattctttaaaccatactac

SEQ ID NO: 128697 - DNA, 478 bp, Arabidopsis thaliana columbia
ggataccaagttattcttttttttaagaactatgtatgatatagctttgtcttacaagtttatgcttcactttctttggttaaaaaatgttccgtattcttcaaggcttattcttgaagtacagttaaaatcaaaatctgcattctactatataagtatgaggtatgtgtgtctgcatttcttcatctttcatgcttgagtcttgatggatctgtcatattggtctagaaggctttaaagaaagatcatcgtttcgtttacgcttcatccttctcttggattcgtcttctttttcatcaaaataagctagaaatgtctgcaatgatttagaacgtgaactttctggtgaagatactggggcttcttcatcatatttgccgtggcggaagaagtcgcggactatcttgaagaagtagatgaagagagcgataaaacaagagatcccacacacaaggaataatccccagaagcttcggag

SEQ ID NO: 128698 - DNA, 125 bp, Arabidopsis thaliana columbia
aaagacaaatccattgcttcatggttaattaacagtagtagcagatgacatatagaccacaagtagcatacacaaacagagacaagagacaagacatggggtaatatggtacagaacctgacatg

SEQ ID NO: 128699 - DNA, 376 bp, Arabidopsis thaliana columbia
gaactcgagagtggagaaacttcacatgagcgatgatgagcagaagaacagaatacgaaaacttgagcgtgctcttaaaatttctgaggaagaaatgtggcggtcaaagcatgaagccaccacaaaggctaaggaactgatggaggttcatggggcgtggcttcccccttggtttgctgtacactggagtagttttcagactgatgctgggacacactgggacgcccacggccaaccagttatggagaaagttactcaaaaggtgacgttagcaaaaaatcaagctgaaaaatgggctaaaccgcacatggctaatgttaaaactaaatatattccagccataaaagagactggtaaaacgcatgttgagccacac

SEQ ID NO: 128700 - DNA, 185 bp, Arabidopsis thaliana columbia
gagaactacctactttgttttttctctctcttatttacctccctatttttttcaactcgccgctgcttgtgttctgcgtctcctaccggcgcgcgtgggccaccatggtcacagtatcggttggttttttaagctattgcctagttatctagtatcatgactttgtgtggagagatctgaggatt

SEQ ID NO: 128701 - DNA, 188 bp, Arabidopsis thaliana columbia
cttcgattcgtgctgttgataccaatgatttcgtttgtgtttagtgggtggaggaaccgaccttgcttgtcactagatccgaggacccaaatctcttgcatactgtgacagattggtatagtgcctatgtttcgactagaggcaccggtttgactaatcgacctcacgttgttttcggtgacggacac

SEQ ID NO: 128702 - DNA, 456 bp, Arabidopsis thaliana columbia
gatgtaagaaaactgtaagatgtcatacatatggccaatttcttattcgattcttactattattgtaaagattaatcaatcattatgacaataaaacacacacactaaaaacatgaaaatccaggtgcaactggtgattgagcttaattaagttcaaatagcgcttggagattataaggtttagtgacgttggtcggcccgctccaaatcagctctgcaatttgttgatgtgctttctcagtcaaatgaaaatgatcaaagaacaagtaatctgtaactttttcgcataactcgtaactttgagatactcccattcggcctccgcatgtattgattccccgcaatggtccggttccacaacatgccattttcccttccttaaacccgtatttggaaggattgttcattcgtacggatagggaagtgtgatagtcatgaagagcgtatttgaatccc

SEQ ID NO: 128703 - DNA, 125 bp, Arabidopsis thaliana columbia
cgttggtaaaatgctcacattttttatatgtatatatatatatcgcgggtgtgagtgcgactctgatgcatcacacaggatcagcatatctgctttgtctgcttctctggctctatgcacccatt

SEQ ID NO: 128704 - DNA, 370 bp, Arabidopsis thaliana columbia
gtaaacgaattatttattgttttgatgatgattttttaaatgactagatgatctataaccgataagcatatgaattcctaaaacttacatcttgtaggaatccctaaagagtatagtaactatattatatacaacacaaaaacctttttggtacttaagatacaaacatatactatgagctacaatgaaaaataatatatactaatacagaactaatttaagggatcgtagtggtggataaaagcgtcgatctggcacaacatctccagagttgtggtgtgagcaagctgagactttccgagaatatgaaacgcgtgaccaacgcctttgtgcaacacgcgcttgatcacgtcctcattaccatcgcaca

SEQ ID NO: 128705 - DNA, 458 bp, Arabidopsis thaliana columbia
aaaagaagcagaatcattcccatttataacaaacctaaaccttttttttcttcttctctttacctttttcattccaaaatctctctctctctctctctttctctggctcgggaagaagatgtcacgtagttgctcacagtgtggaaacaacggccacaactctcgcacatgtccgacggacataactaccaccggtgacaacaacgacaaaggcggcggggagaaagccatcatgctttttggcgtccgcgtcacggaagcttcatcatcttgttttagaaaaagtgttagtatgaacaatctctctcaattcgatcaaactcctgatcccaacccaaccgatgacggtggttacgcttcagacgacgtcgttcacgcctccggtagaaaccgtgaacgcaaacgaggaactccatggacagaggaagaacatagattgtttcttactggattgcata

SEQ ID NO: 128706 - DNA, 454 bp, Arabidopsis thaliana columbia
actaaagtaatatatctgtgtttggttcatgaatgtgacattatcaacaacacacaccccgaagaaaacggcaaattactggaaaagtcttaccaaaaaaaagatagaaaaagcatatgagatacacttaaccttaacccaataaccattctgtttaaacttttcaaaagacacatctaaactatcttaagcttgaagtcgtcttcacttctgaatctgatcaagtcttgaccaaaacaacacagagactacctgttgttttacatcatacaacaacaaaaacgacaagtcgtttcccccaaaaagagcaaaaaaacatgtacacactaattcaaacttaaaaactcacttgattctgatcaaagtatctaattagcctaattctcaaatttcaaattaatcatcatccagatcttatcttatacaatataaattaattaaaacattatcttct

SEQ ID NO: 128707 - DNA, 298 bp, Arabidopsis thaliana columbia
aaaagaaaaaacgggggggcccccatttgtttacaaaattcactttgggtagggggttaaaggattttattccccaatgaaaaaataaataaataaaggccccctacaaaaggggaagtttattttttttaacccctccattttttaaaacaaaaccctttccaaaaaccaaactttatttcccgattccaaaattttttacccaacaccgggggacgggacccctactttggtaaaatttttttaaaaacactttccgggggcccccaaacccccatttttttaaatttgaacccca

SEQ ID NO: 128708 - DNA, 372 bp, Arabidopsis thaliana columbia
gaaagattcccaaaacaccaaacgtcagattacaacatatttacatgaaacctctatgtaatattctcctgacgcttacttaatcaaacacttgcctcggttttgttatgggctttatggctgtccaaccacataatttgggtttctcggaataaagttagccggagccaacttttccccatttttttttttcgtcaaccccatccttgaactcttagcaacttataatggtattatgattattggggatggttttgtttacctatcaatattgtaagaagaggacctcttcaaagcaggaacaagttccttcttactactctcattaatcaagctaccactaaaatactctttctcttccaattttaccct

SEQ ID NO: 128709 - DNA, 275 bp, Arabidopsis thaliana columbia
  unsure (1)..(275): unsure at all n locations
acaagtcgggaaccgtctaaatcttttatnatagttcacgggttaccgtaatacttttcgtgaattttttgtggtttataccacataaacacagtgtctgttctttcatagagaaatataccctttttngtccgaggcagagaaggtaatttatatatagaacagagaatgaaccaaataacaaatagaacccacaaaagaagaatatattaagctacgaaatccccacgagaggaattgggatacggcggtgtatattacctccgtgcgaccat

SEQ ID NO: 128710 - DNA, 222 bp, Arabidopsis thaliana columbia
caacaacaaagctgggtcccccccgcagcgttctattattgggagggacggaaaaaacacggccttgaaacctccagtttttgaaactttttacaatgtttttttgaaactgttttttagaatcaaagaaaaaagcccttttctctctctttctatgaccttatcacttataaaaccctcgttaaaagggcccaactggtccaaggcctgctggctcgagat

SEQ ID NO: 128711 - DNA, 405 bp, Arabidopsis thaliana columbia
gttaattgtttttgtactttatttttcgaaccatacaacatcattgacacaagattcgatgaaagcttgctagtagcatagtgagccaaagaattgtttttttagtaaataatgaaaaaggaaagattttggtgaagagggcttagctgaaatttgatttagcaacttgtggaagagatttgagaagagaaggtgatggcctccgaagagtgtgattgagaagtagcatcaaagtgagaagtgttaaagctcctgcttggtgtgcacttcctagtgaaaccggaacataactcagaagcgttgatacacctaatgtcacctgaacagcagtcattccaacagtacttccgatcaaagctttaacagctggatgtatgtctagcttccttgtgaaccaccacattg

SEQ ID NO: 128712 - DNA, 278 bp, Arabidopsis thaliana columbia
gggaaaaacccaaggtttttacccaattggtttccttggaaaattttttggggggttttgggcccttttaccggggctttccaaaaagggaaatttttttttgggttttaattttaacccggttttcccggggaaaaagggaataacccggtttaaatgggaatgggtccccaaaacccttggtagctaagtgggttttgggggcctttggggtccctaagttttcccagtttttggttccccttttgggggcccataaaaggcataattccggggaa

SEQ ID NO: 128713 - DNA, 272 bp, Arabidopsis thaliana columbia
ccccacccgccccctttttttttcaaacaaaaaacccctttttttttttccctttttcggggggcattttaaacaacaaacccaaaacccgggttcatttctttttgggtttttaaaaaaaaagggtttgcaaagggaaaatagggcatcccaacctagggccctaaacggttttttagaaaattggaaaaaggtccccccccctcgggaagggaaaaaagcttcccagggtgggaacccccccgggggtgggtcaaccaaaagccccgggg

SEQ ID NO: 128714 - DNA, 270 bp, Arabidopsis thaliana columbia
gcagggagaaaaagggattttttaattgagggggtttacagaatttccccttttaaatagtacacaagcctaaaaagggataaaggggggcatttgggggtccttttgttacagtcgaaactgaaaaaaaaaactaagtcaaccgcttgatgtttccatatcctagcgaataaaattcttttttccataactttcatggaagcaaagtccttaagagtttaaactaagtttaaaaacattgtttaaccgagaaaaaataagaattttttt

SEQ ID NO: 128715 - DNA, 305 bp, Arabidopsis thaliana columbia
aaaaagggatgtgaggcggattaatataaaacttttataacctattaagataggcaacctttaaattaaattaaagatttcatctgaaaccattggaactaccgggctcttcatcggaagaagaaaagaactccggcgggactccccttgaagcatgatccgaagaaggggagctcggcaaaagggtcaaaactggtggtctttcttttctcatgaaaacaaagaagaatgggtttggtttatcaaccggttgggccggtggaattatctcaatttgggcaccccaaatggtattattattatgg

SEQ ID NO: 128716 - DNA, 345 bp, Arabidopsis thaliana columbia
attacttgcttctgcagagttcgtcacaaaacaattgttacaatgtcacaagaacagaacattttacatttgtataaaaaaatgaaataataaacaacattttgtggcatcttaacaagagaactgtcgtgtcggctgactacaaaagaatgtgttatatgatgggggcttgaatttttcttcttcgtcttcttcttctcaaatctccctagtattggtctatatctacaaaagccctaagatttcttctcctcagcaaaattagaaccaatgaatcagtagtgcacacacacttaagccgccgaaattctggttttgataggcttaagctttaatcccatgctt

SEQ ID NO: 128717 - DNA, 269 bp, Arabidopsis thaliana columbia
cttaataactagtttctttttttgaaagccatataacaaagagaggggggtgtctaagtttcataagtacaagatagcgccttcaacaaaacagtgggaaaaaacagtgcttttggcagattcctaactcacatataaacaacttccaagagttgtaatggcggattaagaagatacaccgacattggcaaaagctctacaggggaagaagataaaaggcactatcacgaacctaatccaaagaacaaatgacttcttcaagaacttta

SEQ ID NO: 128718 - DNA, 250 bp, Arabidopsis thaliana columbia
cacgttctaattgtttactaaattttaaccaaaacatgggacttttttaaggttcacatgacatcaaaaatcatcccaaacgaagaagacgaaaaaagagcatagaattcagattaactaagtccttaaagagcctatgactatgaggatcagagaactacaacttggcatgagctaaagagtcttggaatggtaaggagtttcttgagcaaggcagattcttcatttcctctgaaatcacccaagcgta

SEQ ID NO: 128719 - DNA, 267 bp, Arabidopsis thaliana columbia
agatcataacacaatgtagttttattttttctttggggattttcaaacatagaggggagggttgcgtttatggaagagtagagaaatcacaaggtatatgaacatgatgactccattttcccattttcttctcagtcgtcaatcttcatcatcactcctccttcaccttcaccttcactctctcttttaccgccaatcattaccaccgattcacctcctaagcttccggcgaaaactgagcttcctgtcatcggaagctgtatagat

SEQ ID NO: 128720 - DNA, 108 bp, Arabidopsis thaliana columbia
  unsure (1)..(108): unsure at all n locations
aagaatnacactaatgtgtctctttctttaaacagataaacattncatgtgaattggtaataattgaataacgagacccaaaacggaagaaattggagacggagctaa

SEQ ID NO: 128721 - DNA, 122 bp, Arabidopsis thaliana columbia
gattctaatatgttgattggtttctctttgttatacaccaaggcatcaattgcagaacgtgtttatttactgtgatgatccataagcaattcattgtaagaaaggcgtgtccttgatattta

SEQ ID NO: 128722 - DNA, 210 bp, Arabidopsis thaliana columbia
cctatactaacacaagccgtgatataaaacaactcggcgacactgtcacagcgagagactcgtacaacttccttgtcaactggttcaagagatttccccagtacaagtcaccacgacttctacattgccggagaaagctacgccggccattacgtcccacaactttcggagctcatctacaaagaaaacaagattgcgtccaagaaagat

SEQ ID NO: 128723 - DNA, 225 bp, Arabidopsis thaliana columbia
aaattatattgaacgatttcgcagtagtgtaaatttccgatttcacctctgaccaagctgactctggcgcttgagcgttcagtgtataaagccggccactgtgagcgcaacaaacggctacattatgccgccggaaaagaggtgattcgactttaaactccaactcggagtactttaagtttctctctgaatcttgtctgatacttgattctagcaaagttcctt

SEQ ID NO: 128724 - DNA, 195 bp, Arabidopsis thaliana columbia
cccaatataaatatatatttactctaatttacaagatagaactccaaaaaaaaaaaaaaaaaattgacccagagataagataaaattcaactgtaaataaagctgttgtgtggagttttctttcattcaattcgaataagagaagcaggcatctcatactgcaaagcaaatgcttcgactcggtttctaagctca

SEQ ID NO: 128725 - DNA, 291 bp, Arabidopsis thaliana columbia
aaaggctgcgaagcctgccgcatcagatgtcctcggaagcggacgtgtgaccatgaggaagactgtcgccaagccaaagggtccatcaggcagcccatggtacggatctgaccgagtcaagtacttgggtccattctgcggcgagcccccgagctaccttaccggtgagttccccggtgactacggatgggacaccgctggtctatccgacgacccagagaccttcgccaggaaccgggagctagaagttatccacagcagatgggccatgctcggagccctaggctgcgt

SEQ ID NO: 128726 - DNA, 124 bp, Arabidopsis thaliana columbia
actctccatcttatcaacgaaccaagaagtaaccggttcaatcatgatgatctagtttataatactgacgaggaattcgctgatgtcatgcctagtgtacaaatcggtccaccaccagcctcgc

SEQ ID NO: 128727 - DNA, 261 bp, Arabidopsis thaliana columbia
tttttgaagcaagattacgagattttgttcgtacaggggacaataatccgagggatatggacccaaaaaaaccttttttttttttataagaactacaaagatttaaacttgtttaatttacctgaagaagtttttactttttcagtagaggctaaaaccaaagaaggggctgttgacatttcccaatccaagaccaatagccccaagtgacgaaacccaagttggtttttttgtgatccttggaacttttttttttaaagc

SEQ ID NO: 128728 - DNA, 130 bp, Arabidopsis thaliana columbia
cttattgtgggcaaccgtcattatacgcgatgccttgctccaggtgataagcgacacacgcttggtgatatatgcccgacatgctgcttcagctggggatggtatagcagccctacaagacgcactaaca

SEQ ID NO: 128729 - DNA, 191 bp, Arabidopsis thaliana columbia
taaaataagtgttggttgagtaaacaaaaactccaaaatggacttccattttaacccttccatagcttcaacactctatctttaccaccagaaactactttttctccatctggactccaatccaccgcaaaaacctcatcagcatgaccaggaagatcttgttttaactttttcgtcctaatttcccatat

SEQ ID NO: 128730 - DNA, 307 bp, Arabidopsis thaliana columbia
tgatgtctttggtatctggagccagggacatggggatcgacgacaacaacaacaacaagaacaacaaggatggagatgatgaggactcctcctccagaacaagagccgacgacgatgctcttcgtcgacagatgcgagaatcttgtctttgtgctaccgaggaggaagaagacgacgattccaaattgcaattgggtcctcagtacactatcaaagaacatctcgagaaggacaaggatgatgagagtctgaggaaatggaaggaacagcttctcggaagtgatgatgtcaccaacattggagagac

SEQ ID NO: 128731 - DNA, 168 bp, Arabidopsis thaliana columbia
gaagtggtaacatacaattatgatttattcttattttggatgatgttatcggatgcatgaacctagctgctagaagggcataggtgggatactctgctcgggcctgcagaaggtctcgggatcaaccttcgatttaatctccaccaatctgtcaaaatggcctttgaa

SEQ ID NO: 128732 - DNA, 144 bp, Arabidopsis thaliana columbia
gaactctcatggcgtgaaagagaggagctagagaagcatttttgtatatgagcgatacatgaggatgcacgagcaaggtaaaaccgtacaagctaggaaggactaggatcgtttggctctgattcgcctacagagagtagaagc

SEQ ID NO: 128733 - DNA, 135 bp, Arabidopsis thaliana columbia
acaaaatctaaaaacctttatgggcattttttgataggttcaactttagccgatggacttaaattacagatttatcaatattggagcaaagccgggaaaggccacaacaaaccaccttcgatgaacgtggctcga

SEQ ID NO: 128734 - DNA, 176 bp, Arabidopsis thaliana columbia
  unsure (1)..(176): unsure at all n locations
attncgagggaaaaagatttccatttgttatttttggccgcctaagacaacaagaggatttacgggaaaataagcaaaatatacgccgatgattaatgaatggaccactaacatggggggatttcaaaggagcatttttgttttttttatataattttaaaccttaaacattttaa

SEQ ID NO: 128735 - DNA, 395 bp, Arabidopsis thaliana columbia
gtcgaccaaattcatttatattcccaaaggacaacatacagaaggtccaagaagagtacaagcgaattaaacggcccaaactaaaaacataattaacattaacatatcatgataattatgagttagcatatgacacgtggagaagacgtatttcccttgaaaccacgcgtcttttcatgaagcaccaccgtctgtaattcgccgctcatctcccaagcgctgattagccgtcgcgtgtcagccctagaacgctggggtcttcattccttctgccgatcttcaatcctgcatgagatagcaccgaaatctaccgggtttagatgaaatcgctttaaaatttctccggaaagcaccaactctggggaggctccaccaccagctacacccaatttgat

SEQ ID NO: 128736 - DNA, 366 bp, Arabidopsis thaliana columbia
gaaatcaaaaccatcaaatcacattattttgaattacattattgaatataaaccccttttatggctccatgtgtgggcaatgccataaacatacatgttgactttttgtttataaacatacatatttcgggtcaaccaaattaattgtttaagcataaggcctttgattttcacagtccaaattcggcccagttgctactttaaacagcccagtatatctctgaaaaaacccgattcggtcattgacccgtccgtctccaggaatcccacactctaaaccgccatttattatatttgtggttaaaccaaacccgccggtccggttagatgccaaatccgccgccgtatgtcggtattttccgatca

SEQ ID NO: 128737 - DNA, 353 bp, Arabidopsis thaliana columbia
gggagagttgcccatgttacaggaaaacaccaccgagaacggataacgaacatatcactggacgaaaaaattatgcactgcatcaggaaaactgcagtagcccatcaaaatcttcagtgtacaagcgtttggagagcgaaaagaagaagaggccgaaaaaagaatctgggtcacaccgacttattcccacttctgggcgcagatctcagcaaggtcgaccacgcgctggctgtagccccactcgttgtcgtaccaggcaacaaccttgaccatgtcgtcacccatgaccattgtcagggaggagtcaatgggggaggagacgtcagagcacctgaagtcaacggacaccaggg

SEQ ID NO: 128738 - DNA, 349 bp, Arabidopsis thaliana columbia
gcgtaagatctcttgaataataaaatttacatgaatatatatatttgtaaattagtaagaatatttatagacatatttaccaaagaacatcataatgaaaaataattatcctgttttattgccacgatttaagatttagacaatgcagtactaacaaacaaaacaaagacactgcagatatgtcggcaaagccagtgattttgtcttttcttcaaatttcatgttaaccatatgccacattgcttctatgataaacaacaaacagattatacatttctttttggttattttttagggaaatgggtaaagtgcagaagcattcttcgatctccatcatacagagacgaca

SEQ ID NO: 128739 - DNA, 446 bp, Arabidopsis thaliana columbia
acgaaatatctttgaaattaactgtacaaccacaacaagggaagaaaacaaagagaaaaaagactatcaagagtcttctcaatacatgaccgacagaccgagacacacaatcaagagaggctcaaaacaacggaattgcgtcaaataccaaaaaacttataacaaacttcaaacgcaaacgcttctaatcgccaacatgcaacgagatgattgctatgttcaatcaagtatatacccgtactagctttcagctatgggtttgatcttgttcttcttcagctttgcgtgtgcaccaacaacagtattccgaaatagccccgtcttctcctgtgatccatggatgctccgccacagctttcaacgtcatcctctggtttggatcttggcaaaggagaccttcgatcaagtcccttagacgaggattgagtccttccggtattatcaac

SEQ ID NO: 128740 - DNA, 345 bp, Arabidopsis thaliana columbia
aaagaaaaaattttatcgattactcattgggaacagtaaagaatcaaggatgtgaggtgaggtcatctaaggttccctaggttttgaaaccttttttcacctttgtttttctttggagacagagagagagacaaacgaactcttttttgtcccctaagaattttttttttttattctaaagaaaaataacaaagcattaaacaaataaattgaaatagattagcatcgacctctcggaatctttttgactttgcttcttggggaacggttaatgaaagtttaaaacttttgattcaagccacggtctgttttgtctccatgtatgattgctccatccaaaccgga

SEQ ID NO: 128741 - DNA, 383 bp, Arabidopsis thaliana columbia
ggtgctacctagcctcatcatatattttttaaacaatgacatacaagtaataaatactcacttttctcacattaaaaccaaaaaaaaaatactcacttttctatgagtaacacatattttcctttcatttcaaattaaaataaaatttttgatttataaaatactgaattgagagtaccaataattaaaaaaataagtaaacaaacaactcttactataaaatttctttgttattttcttgccctttaatttataacatcctctcttcatgtaattaacaagcaaatccagcttccaccagcttgattagtttcttgattctcaatctctcttcataaacttcacttccttgcatttctttctcatgccttggtggcataggt

SEQ ID NO: 128742 - DNA, 133 bp, Arabidopsis thaliana columbia
aaaaatgataatgaactacgcaaatgaaagattcaaacacccatacaagtacacacacaaagggagccatgtatgatgatgatgatgatgatgataggtgatgacgatggttcgatggggatttaggctttga

SEQ ID NO: 128743 - DNA, 506 bp, Arabidopsis thaliana columbia
cttagaaacatatattgaagatacaccaatcctgtttctaggcattcacaagcctacacatatgggtttgtttctgttcaaataaccctacaattgcagcattactagtaaccttttttaacatgttttccagactttacctcagttctgtgccggtgaatggttcactgattccccatttgatcagcggtaagatctccaacctgttaatcatgggatttcggaagacagttctgacattcaaatgagttgtgcctttttaaggtcagacacaactcctctgtcttggctgcccctttcattgtaaaccaccttatcaatgatcccatattcaacagcctcagtgggactaaaatatttcgggcgtttcatgtcagcttcaatctgctccggggatttaccaatatgctttgaatacagcttgaccatttctgtctttatgtgcttgatttctttccttgcaatttcaacatcagttgcttggccttgaaatcgagcaatgggct

SEQ ID NO: 128744 - DNA, 389 bp, Arabidopsis thaliana columbia
agcggccgcccttttttttttttttttttttttttttttattattttttttttttccaacatataagcagggggggtttcagggtttttttggtgggaaacagttgaagaagatttgattattatgttttttccatttagtaaaagacaaggaagcttggggtcaacataaaaattttttaacccatacccttgggtttccaaccagcaattacatcctttgtttccgcccgggtgtccgggaatgattccctcgagaaaacattctccatgtaggatttgccgaagggaagtgaatttggaacagaccagtttttgtaatgtcccaatgcaattttaatggggtataactttggggccaaggacaaatttgttgccgggatctttttt

SEQ ID NO: 128745 - DNA, 381 bp, Arabidopsis thaliana columbia
attaacttattaagggaagagtataacatttttttttcccccgggaagcaatcaatatttacaaatatgtccctatctctacgttattttttcaccggggaaattaagaaaacaaaaacaaaacctattgggcttttaattgctttttcctcttccgaccaactcttttatcggcccacgagcccatttgaactataacttcatcttccactctccttgcttctctctcccatactaaacgctgggttttacggtcactgaatttctccaacacccaatccctaagcccaatatcgctcacctcacagaatctctcagcccaatcagttggttcaacgggtcgggtccctaaaccaggtgcccgatctttcgacccgacat

SEQ ID NO: 128746 - DNA, 492 bp, Arabidopsis thaliana columbia
gcgggcgccctttttttttttttttttttcctgtcaatctcatctttttttttccttactggcgtattgactggccatacggtttgttaaccgcttggtacatgcacttttgggtgggatccacggttctgaaagcggatttggtgcttaatcatcctacaccgcagaacatttggtctagtagtcgaaggggccgcaagcctagggatagggtaacactatctccggtggtttcttgaccggcaatgaaaagaatcagcttgtccatacattcgctatcttaccaattcaaatgaatttcatcttcgacccgtcgttagaaatggcttgaatgtcagagctactccgaccactactattacattcaagacgaagaataccatatgcgatcctggtagaaatgcagcgtttagacggctctcactccaagaaaataagatgccagcaccagctggcccaactgtcttaaatagagacatcgcagtcatagct

SEQ ID NO: 128747 - DNA, 524 bp, Arabidopsis thaliana columbia
gattaagtttaatgattatcatatatgagcttttcattttctgtatccaaagttataaactttatggaattagatcactaacatttggttccttatatttattcagatgtcttgaagaaggagctgaagatttcttattgaagcctgtgaaattagctgatgtgaagagattaagagattctttaatgaaagctgaggaaagagcttttaagaatattatgcacaagagagagcttgaagctaatgatatctactcgcagctaaaacgcgcaaagatctgagtttatcagattccacgtacgatatgttctttaaaagctcaaagattcacacacatgcatgtcctgattctttcggcttacaatttttgagacattacggcttcttttgctgatagaaccaagactgatcaagagtgacaaagatgggtttttataagatagaaatgtaaattgtagacttggattcattagagaggagaagagatacattttttttttctttacatgagagatatgtaaaat

SEQ ID NO: 128748 - DNA, 208 bp, Arabidopsis thaliana columbia
gtagacgaacgtcattttttccgacactggacacattatacctttaattaaatattttacattacatgatttacttaagagtaatatatatattcctagccccacaagagatatacctattacaagagagaattagcacgagattatatcaggagcgttcagagactcaatcatgacatggcgaggactctaatactgtaatacatat

SEQ ID NO: 128749 - DNA, 179 bp, Arabidopsis thaliana columbia
tctttttttttttttttttggatttgagagttaatttttttgcaaacgaaaacggtttgacgagtgggggttttctttaagagacttggggttttctaaacaataaaaaacacgaaaaccgtcctcaaactaaacacttatacaatgctgtactcccatatgacaatggtcgagccgat

SEQ ID NO: 128750 - DNA, 291 bp, Arabidopsis thaliana columbia
agactctaaagacaataattgcattggataacgtaaactttacttggtggatttgcttggctaaatcaaagtctctcccgaaatggaaccgaagaagaagttacacaactagataaaaataagggatctttctaattcaaacttcagacttttctctaaagcttctgcttcatcctctcaattgcaccacgcaacgtctcttcgactttacagaacgcaaacctaaccaaattcttcccttcttctggattcagataaaagacgctcgttgggatcgaaacgaccccaact

SEQ ID NO: 128751 - DNA, 208 bp, Arabidopsis thaliana columbia
ctataattattttttttggcaccagttacagttccacaacaatggcggttcattcgattcagcgctgtttagaagtacaaaacactttatgtaataatgagagaaagtgaaagaagaggctgtaattgagaccgagacttcgtcacttactgacacacacattatagtgaacggtgactgtaccgaccataccagtaccctgatgtgg

SEQ ID NO: 128752 - DNA, 173 bp, Arabidopsis thaliana columbia
acatctataacgatctctggggtgggattttttttggggccagcaggcttaaacccgaatgatttagacgctctcatatgtaacagcggaagcgatctctactacacatgcgtcaacaccgaatacgggccttttgttgtagacttttactaccactcccacatagaatatag

SEQ ID NO: 128753 - DNA, 208 bp, Arabidopsis thaliana columbia
ccgaggaatggatttattgatgacccaaccattagtatggaaaagtagaatcaaataaaataaaatgaaacgattcttgtgttgatgttacaaaagaaaagaaaagattcttgtgttgataagaaaagaaaagatttttgtgttgtatgcttcgtcaccattggattagtaataaaaatccaaataagagactctgtatattccattc

SEQ ID NO: 128754 - DNA, 192 bp, Arabidopsis thaliana columbia
gaaactgaaccacacatgtcttacattactatgattccacagataaacatttggggttttaacctaacaaaattggaccaaaggatatatataatgatacatagtgaaggaaagagttattgcctagatctggactcagcccttcgagcctattcacgtgtagttggaaacatcgttctataccttgaccca

SEQ ID NO: 128755 - DNA, 329 bp, Arabidopsis thaliana columbia
gttatgaatcgtaaggttttttatattgcctagctctcaagaaacagagcatgtgggctcattcattggtctgaagaaacagagttcttgacatacactaattctgcatgaattgaacctttgtttgggccactgaagctatgttacccaaagagtttggattataaagttcccttgttctaaggtctacgggcagattctggggaagaaagtactggagattcttccaaacatatacgcaaaacgcactttcagtaagtacatggctcgtgcctttgacaacgtcaggtttcaccattctcattcctgcaccctccgtatgggagctt

SEQ ID NO: 128756 - DNA, 457 bp, Arabidopsis thaliana columbia
gaagtgaagtttattacattttacgaataggagttgctaccaatttcacatgagagatttaacatttacattcactactctcaaaaaggtacaaatgtcaaggaggactaaactcaagccttgaggaaatggtatttggattcaacgtaactctctgaatcccataagaaagacccaaaagccacagcttccaaaaccaacatcgcaagtccagagacactcagagacagaacctcgtcgttagaagtatcgagctttccatcctcgagtatccttatatccggtcgtccaaagagcgcctgagtctgcttctcaatcagagtcatggcttctttagaacgtatcgtggcatatctctgaagcgtatccgagtccaaatacgtaacatatgatctcaatccataagacgatgactcatcttcatttctttgtatcgcgtattcatcgggatcatatt

SEQ ID NO: 128757 - DNA, 105 bp, Arabidopsis thaliana columbia
aacacctacaactgctttgaaagttgaaattgaaaattgaatttcgggtggcaacctaccttgtcttagaccatatcttcaaatgcccgagatgggcattctgaa

SEQ ID NO: 128758 - DNA, 161 bp, Arabidopsis thaliana columbia
aagaaaaacttttatatattaatatgaattacacggggatcttacctcgtgtggtgatcattactcactatgcgaaacgctacactctctatattaggtatttattaatggctccagggacttatcaacctcctacccaacatacatactgaatagagatg

SEQ ID NO: 128759 - DNA, 279 bp, Arabidopsis thaliana columbia
acggcctgtcctttttttttttttttttttttgaagacaaacgaaagttttttccttcatttttattttgtctctttattgaaaaatcaattagctttccgtttggactacgtttgtattttttgttccactccacgtaattgtgacctaattcagtagaaaagataacaatgataaatctaaaggggacgtttggctttgccgcaataaagaacgttaagaggaggctcagcttcagtgtagagagacttctcatcgttccaaacacgaacatagagc

SEQ ID NO: 128760 - DNA, 503 bp, Arabidopsis thaliana columbia
ggaccggctcgccctttttttttttttttttttacacaaacaaatgcatagaaatttgatattgaaatatgaatttaggttcacaacataccttttatttgaccatatattccaatgcacgagatgtgcattctgaatagtgatataaaaatcatacaaaagaaagaaacagaaagcttcttaactttaaatgaccaaatggatgaaagagcaacaccgtggggatatgatatacacatgtattatgaaacttggaacccaagaaaccaaaacctttcttttcttggtctcaacaaggtaacttgaaacccatgtaacgaccagagacataatcattccaaacatcaagagctccatagcttggcatcaacacaatactcaatgccatgacgataccaaccgagaacacaatgatcgaagcccttccatactcggttattaccttttgaaccacctttagtcccacgagtgacgccacaaaacatatgaccgcaaatatactt

SEQ ID NO: 128761 - DNA, 295 bp, Arabidopsis thaliana columbia
aaaccaaaaaaaaaacacgatcttattggttcctattatcatctgaataagggatggccaaggaaaatgcttacttggggaagtttatacagggaatttgatctttttgaaggcttgatatatataccgtatagaggggtagataatccccaaagcctttttatatttggaaacttcttgaaacgggaaccctttttggctttggctttacccggcccatttgggactggaacccaaaagaagagaaacctccaaaagaacactgggaggaaaatttttacgcgggcttgaaccc

SEQ ID NO: 128762 - DNA, 149 bp, Arabidopsis thaliana columbia
gtgaaaacatgctctatgcaccaatgacatcatctctccagagcaagagaatcatgcaggcttatcaaatgtttgatatatctacaaaggattattaccaaccacttaagggaggaaaagcaagagttagctttgataaaaataactta

SEQ ID NO: 128763 - DNA, 141 bp, Arabidopsis thaliana columbia
gtaaatctaattattttgttttctactactcaggttcatattttaaccattacccgaaaaggcggaccttaacggaactacagggggaaggaaataaatattacgctgattattggtgctgtatggatttgtccctatggt

SEQ ID NO: 128764 - DNA, 113 bp, Arabidopsis thaliana columbia
ctctggcaaacagaaatttatgttgtctactacgaacgaacacaaagtatccctttcacacaactcccaacagagatgggtgcaaacgtaatgacaaatcacaatcaggacac

SEQ ID NO: 128765 - DNA, 477 bp, Arabidopsis thaliana columbia
gatttcaagaacacaaaaacagagttaaaactctcatctctcccaaaaaagatgcctttaagcaacaatgtaattggttgcataaacttcatcaccgtcctcctctccattccggtcatcggcgccggaatctggctagccataggaacagtaaactcatgcgtcaagcttcttcaatggccagtaataatcctcggagtcttaatcctcttagtgggtctcgctggtttcattggagggttttggagaatcacatggcttcttgttgtttacttaatcgccatgcttattctcattgtacttttgggttgccttgtcggatttatttacatggttaccataagaggctctggtcatccagaaccaagtagagcttatcttgagtatagtcttcaagatttctctggttggttacgtagaagagttcagagatcttataaatgggaaaggattcgtacttgtttgagtacaactacc

SEQ ID NO: 128766 - DNA, 470 bp, Arabidopsis thaliana columbia
cacaaacccaaatcaaagatagatttacaacataatcttccagttacaacgaatgttcaggtagttcacacaaaaacatactacaggggccaaaacgtagagaaactaaaatacaggaatccagtaaatattaaaattcctcgcagttttgccactaaacttctcatcttgatcaagtataaccctgcttgtacttcctgaaaatatcctcagtttccgcattacggaatgcgcagcacccgataatgtagacgataatcaatccgataagcgccaagagtagaaagatatccgcttttaaccaatctaccttaatatttgcgagcaagccggctttacaagaatcacaagtgtaacacaaagtgttttggtcattgctccaatttagacaatccatatcagcagacatatctatgggacttatccaataagtaggattaacaaatgtgaatccacattttgttgggggc

SEQ ID NO: 128767 - DNA, 133 bp, Arabidopsis thaliana columbia
cccgaatcattgatagattttcttcataatctcccaggtacatcaaatgttcaggtcattcacacaaaaacatactacatgggccataacgtaaagaatctacaattcaggaatccaacaaatactaaatttc

SEQ ID NO: 128768 - DNA, 392 bp, Arabidopsis thaliana columbia
gaaacagaaaaccgtaacgtttcttcgtatgttttctacgactacagtcttgggacagagttaaattaaaggaatagagtcttgcttaggaaaaaaagaatttcttttcaagattcccagttgggaatattagcagtagcttcgtttatcattgtcaccaatgtcaccacgctctcgggaacacctcggggaggcagtgtgagatttcttgggggtggtttatccccgtaagaccgtttatcgaatctccattctccaatcttccctaccatcatcttccccttcatgtcgaaatcacagccgtaagtgtaatgtattatgaacgtcttctttgtttcagtgtcccaaggaggctgaatcatgaagtccttgtgtagaatgttgctcacgcc

SEQ ID NO: 128769 - DNA, 215 bp, Arabidopsis thaliana columbia
gaccaattgaaaggaggaatcgcatatggccctgttagtacgccctcggatatccatttgtatgcagcctcagtcatatgaatgccggcccaattcacatacttcgaaggatcactacaatattcaactcctttactcccacattttatactaaaggtgaagttgtatggtcctcctaacccgcaacaagcgggctaaggtctgtccatgagccc

SEQ ID NO: 128770 - DNA, 369 bp, Arabidopsis thaliana columbia
tttctttttttttttttttttttttttttctttcttttttttttttttttttctatttttcccccctttaagggcttgtaaaagcttaaaattcatcccccaaccattttaaacagggcgggggggaaaacaaaatccaaaagggccggggggtctcctataaaaaaagcttcaaaaccaatctgaatcaaaggcaactttcgttgaaaacctaacggcccgacgtttgctttcttgatcccggaaatcttcctaatcttcctttttttttttttcactaagcattccttttttgaccaaaaaatttccccgcttcgggggggaaaaatcccccttggcccctaaattttgaaacccgacaagcctttc

SEQ ID NO: 128771 - DNA, 225 bp, Arabidopsis thaliana columbia
aaaggctgtttttaccttaaaatccttacccccaccattttatcctgaggcggggggaacacaaactccaaaagggcgggggggcctcctttaaaaaaagctcggaaaccattctgaatcaaaggcgactttccttgaaaacctaacggccccccgtttgcttttttgatcccccattgcttccttatcttcctttttttttttttcactaaactttcctttttt

SEQ ID NO: 128772 - DNA, 192 bp, Arabidopsis thaliana columbia
taaccatcttcttgtttgctccgagctgtcaagatatcgaaaatggctggtgttcacaacggaaaggtttgtgtgaccggtgccggagggttttgggcttcgagggtcggcgctctttgtctgtgtaaggattacttcgatcatggcactgttagagaccctgataatgaaaagtatgctcatttgaagaag

SEQ ID NO: 128773 - DNA, 228 bp, Arabidopsis thaliana columbia
agggaacatgcccttctctatggccaggatggacaatattgaatttatggacctatcttacaacagcttgtcagggaaattgccaaggcatcttttgacaggttgatactcattgagctggataaagctctcgcacaacagattgagaggcccgattattcggaaatcgagtgatgagacctctgtgagttacgctgatcagggacacaaacatgtttacagggaaga

SEQ ID NO: 128774 - DNA, 508 bp, Arabidopsis thaliana columbia
  unsure (1)..(508): unsure at all n locations
gcttgggaccagagcagctattatcagacaccaaaccatccatctgcgtctcctgtttcatcctataattctgggagacaaacaccgaagaatcttgagaggaagtattcacggattgctgataactaccgttccattgatgaggttaccgctgctctttcacatgccggtttggagtcctcgaatctcattgttggtatagatgtcaccaagagcaacgagtggacaggggcgagatcatttggtaggaagagtctgcatttcattggaactactccaaacccttatcaacaagctatttccatcattggaaagactttatcggtttttgatgaggataatttgatcccctgttatggatttggagatgctacaactcatgatcaggatgtcttcagtttcaatcccaatgatacatattgtaacgggtttgaagaagttctcatgtgttacagagagattgttccccagcttcgtctctcaggtccgacatctnttgcacctatca

SEQ ID NO: 128775 - DNA, 140 bp, Arabidopsis thaliana columbia
gagagagagaagagatctactcagatataaacaccctagattttttctgttaaaacccacatcgaatctcaactcagaaccaacaatgctccaacctttctcttcctcctctgatttctcgagaatactgtggactttct

SEQ ID NO: 128776 - DNA, 107 bp, Arabidopsis thaliana columbia
gtctataacaatgttttgaacaaatttttatctaacgacaacgctggaaacacatgaggtgcctaaccatcacactgacgaaaagtaagaaacttataccatgacaa

SEQ ID NO: 128777 - DNA, 344 bp, Arabidopsis thaliana columbia
aaaacgatcattttatcggatttgaaaagtgttttaaaaaactgacatttttgtttatttacctatgaagatcaaaatctaaaggaagcgaaataaggaattttaccaaaaaaaaggaacccaaatacttagaccggaaccttgatcttgatctaaaccttcttcaccacaatcataaacagacctatccaaaaccaaccgatattccaagtatgtctgaagcaaaccaccttcttccggttcatcaaacccgccggaaccacattcttcttcacatattcggagcctcaaatcattttcctgggcggtggattcagcaaaccaaggatgacgacttcggagcg

SEQ ID NO: 128778 - DNA, 354 bp, Arabidopsis thaliana columbia
gccgtccgagactccctgttcggcttcctgctgtgagaccaggtggagatcgagctcaccggaatcgagaagtgctttgctgacttcgtcgcccgcgttgagttcctgaccctgcaccatcgcaccagggtcggtgttgaccagtgcgacggggaccttgttgacctcaccgaacggattccagaaggcccacaggtacatcgcgccgtacagcagtggcatcaagatgatggtgacgagtgcgatcctgggcatcgcgccgcgggagaaccgcttgagttcggttccgagagacattccagcgagcatcgcggttacctcgccccttcttggtcgggattggtgacttcttgg

SEQ ID NO: 128779 - DNA, 453 bp, Arabidopsis thaliana columbia
gctcacgcgtcgggctccgtccgaagctgtgtggtaacgggtcttgtcgcacacggtcacagcgacggccgaatccaccaagctcgattcggccgtccgctgggagattgtcgtctgcgtcgccgcgggtttcaccactcttctcgattcggcggtgctcggaatcggagttccgtccatccgtgcgtcactgggcgcgtcgacctccgaagtgcagtggatcctcgcgagctattcacttactttcggcttggccctggtgccggcgggccgactcggtgacgtcgtcgggcgtcgacgcttgttcttgtcggggctgagcattttcgcggtgatgggaatcctcggagcgtgtgcgtcggacccgtcgatgatcgtgtcggcccggctggggcaagggatcggcgcaagcaccatcagttcgcaggtgctcggcatcatcaccgaccgggt

SEQ ID NO: 128780 - DNA, 337 bp, Arabidopsis thaliana columbia
cagacagacggagcatggaggatctgatagaaagactgatatttgagaaagaaggccttcttgcggagttacagaacccatagcaagaacggaaagagtttgagctgtgagtcacgacattgaaagatcggttgcaacatatggaacaacatcagaaattaattgtggcatatgtttcacaggttttgggaaaaccaggactttcactaaacctcggaaaccatgagagaagaaaaagaagatttcaagagaactctctttctccaagcagttcacacatagaacaggtcgtaaagttagaatcttctctaacgttttgggagaatcttgtgtcgga

SEQ ID NO: 128781 - DNA, 155 bp, Arabidopsis thaliana columbia
gagaggaacaagaatgtttatgttcatttttttacaagaatcacataaagacttgaaaattcaagctccaggtgcaaacttagttgcaaaagcccactcattgtttgcaacagggtcgccaagacggtcaaggagattctccaaaggaccttttc

SEQ ID NO: 128782 - DNA, 366 bp, Arabidopsis thaliana columbia
cctttattcgtctttcttttcgtgtaaagttggatcctttaatattttttgaaatcgttttgcaaacaaaagatcatactaaagaatattatcttaagagtgaaagagttgtacagaagaacgaagaaaaggctcggggtatcaatgtacaagactgcatttggggcgagacatatctctctttttttttacctaaagaacagaggtgatgaacatggaagaaccagctctctcacatgttagctgtagtttcttttatttcatccgatgtaatcgtgtgatcttttccagcgaaatcattatcaggagttaagataagcatacaatggcactgcttcctctctctgattggaacacacggacaat

SEQ ID NO: 128783 - DNA, 143 bp, Arabidopsis thaliana columbia
ctccgttgtcggcatcctaggtttgctagctccaccgccgtcgaagatgatttgaggctccggggatgtgaagaacgatgtggttgcagcgggtttgatgaacctgatgatgctggtatgcttcagacatactagcaagatca

SEQ ID NO: 128784 - DNA, 454 bp, Arabidopsis thaliana columbia
cgtgaagccgccgatcgagctcttgccgtttccgctcggggaagaacactctggagcagagcgatcttagctaatcggatcaaactgggatttcgtaaacagagacgtcctcgagctacgatggcgattacggccatgactacggtgggtagtagcaacaccacctgatcgagaaaacggagagtgttggtgttgacagtgactcagaagagtataccggctgttaaccggaaagtacgtgctctaggccggatagtttccggttgcggtaaacaatccgtaccggtgattctagaagaagcaactgattatattcaggctctggagatgcaagtgagagccatgagctcttttagctcagcttctctcctcctacggctcagctcctgcaccgatttgatgaggttaaaaacgtctttttaattctaccatctctcgatctttcacagcttat

SEQ ID NO: 128785 - DNA, 425 bp, Arabidopsis thaliana columbia
gcggaggaaaatattctaacatggattcccttagtaacggcgagcgaaccgggaagagcccatcttgaaaatcggacgtcttcggcgttcgaattgtagtctggagaagcgtcctcagcgacggaccgggcctaagttccctggaaaggggcgccagagagggtgagagccccgtcgtgcccggaccctgtcgcaccacgaggcgctgtctacgagtcgggttgtttgggaatgcagccccaatcgggcggtaaattccgtccagggctaaatactggcgagagaccgatagcgaacaagtaccgcgaggtaaagatgaagaaagggaaagagagtgagagcaaagattggtggtggaagcaggagagcaatgttgaaagagggagagtgaaagagtctgtaacgcaatggattggttcagaggt

SEQ ID NO: 128786 - DNA, 604 bp, Arabidopsis thaliana columbia
  unsure (1)..(604): unsure at all n locations
ggcgaagagaatgtgactccaaagaaaccaaccactttaaacgaggctgctaagtcaaaaggagttgagcaggactgtagaaacccaagcagattcgaagtgtaagaagaaacagatatcgaacaccaagaataaagcaatgagtgggcatgacatctttgcatctcctgaaagccaacctcgccgcttgtttggtggtgcaacacaatcagaagttaaaggaaataagaacacggaggaatctgcaccgaggagctcgcgtgcatctgtcaaaacctcaaacgggcaaagcagcaacagattgtttagtgaagaacatgttgcgaagtcatcaaagaagatacataaccagaagtctcagtttcaggggctcacaagcaatggtatcttcaaatctgataaaatccctcctggttattcagagaagatgcaaagctcagccaaaaagcgggaaatgagcggacacaatatatttgcagacgggaagtcggaatatcgggattactatggtggtgcgaggagacctcctggtggcgagagcagcatttcattggtctaaaataagtcttaaaccacagacactnttttttttttttttttttgg

SEQ ID NO: 128787 - DNA, 546 bp, Arabidopsis thaliana columbia
gtcgtaaaggacgcgaagaagaagggctttgtggcagtcgcctcaagaggtggtgccaagagaggtttggctatattcgatttcctcctccgtttggcggccatagcagtcactattggggctgcctctgtcatgtacaccgccgaggaaactcttcccttctttactcagttcctccagttccaagccggttacgatgaccttcctgcgtttcagtactttgtgatagccgtagccgtagtcgctagctatctcgtcctttcacttccattctccatcgtatccattgtccgtccacatgctgtcgcgccccggctgatcctgctcatttgcgatactctggtcgtgacgctcaacacatcagcagcagcagcggccgcatcaatcacctaccttgcacacaacggcaaccaaagcaccaactggctccctatctgtcagcagtttggagacttctgccagaacgttagcaccgcggttgtggctgattctatcgcgattctcttcttcatcggtcttatcatcatctcagccatcgccctcaag

SEQ ID NO: 128788 - DNA, 614 bp, Arabidopsis thaliana columbia
gatgctactcactagaactgagtatgacagatgactgaacactttttctccagaatgaaggctatttcaagtggaatatgccattgaagctatcaagcttggatctactgcaataggagtaaagacaaaagaaggagttgtgcttgctgtcaacaagcgtatcacgtcgccattgctggaaccgagcagtgtggagaagattatggaaattgatgaccatattggttgtgctatgagcggtttaattgctgacgcgcgcacacttgttgagcatgctagagttgaaactcaaaaccatagattctcgtatggtgagccgatgactgtagagtccacaacacaagcactgtgtgatctggctttacggtttggtgaaggagaggaagaatcaatgtctctgccgtttggagtatctcttctcattgctggccatgatgaaaatggaccaagcttgtactacactgatccttcaggaacattctggcagtgcaatgcaaaggcaattggttcacgttctgaatgagctgatagctctcttcaagagcaattcaacaaagatttgtctctacaagaagctgagactatcgctgtatctatcctaaagcaagttatgg

SEQ ID NO: 128789 - DNA, 151 bp, Arabidopsis thaliana columbia
aaaggggggacgacccctaataaggggggggtgacccttatattttcgataaacataaactgaaaataggccggagcccatacaccgggggataaaacctagcataaactgaacacaacactttaaaacttcaacttatttttggtttaca

SEQ ID NO: 128790 - DNA, 256 bp, Arabidopsis thaliana columbia
ggccgccctttttttttttttttttttttttgaaaaacaattaagatggtctcttttatgctccgaatgacaatgtaaaagcatcttatgatcattgagttaggaaaagagagtgttacggggaaccttaatttgcattcgaccacaatttatataaagtacataataattttaagttcaaaatgatatttgtacaaacatgatcacacacaaacgcattcacctccccataaccctttttcgttgtctcacttgg

SEQ ID NO: 128791 - DNA, 357 bp, Arabidopsis thaliana columbia
aaggcaaacgtatagcacagatcccggttccttagaatcgagccattcaaggcactcatcttgatcaatatctgatttgtttcccctctctgctttgtctactcctaccttgttgcacaaggaaacagggctcgatggtgccatagctttacccggacattggccgttctttgagatctaaaagcatcccggagtaccgcctcaactccttcctaagctttttccttaaccggtgcggttatacattctccaacggtgtctccagaagcacatccggcatatctcaacccactagtaacattccctgtagatgcggttgcggaagttgccgctaggagaaggagaagagagctggtg

SEQ ID NO: 128792 - DNA, 555 bp, Arabidopsis thaliana columbia
ggaagatggcaatcgtttccaaggttttaggaaacggttgtttcttggttagattacttggttcctcactgaagttcaaggggactaaatccgatattcgggttagacaatcttggcaagataacgagtggatcatgattggacagggtacatcaagattaagcgcacacacctttacaggagaactaaggataaaggtggatgcaagcggccactacctttcatttggcaagaatatctaacctgttgacccatgacgtgccatgtgtgcatgcaggcgccggtacacatatcgcgagcctgtacctccttggggctggacctttcccgaatctaccctccgaccagttgtttacccgctccggcgtggtttgagttacacgcgctttactcacaacatagccgacgcgccaaaagtgattcctatagctgttcgtggaagaaacggcaccgtttcagggaaatcaatccgtgtgacgcacgctaggtgtgatcgtctctctctcggagtccacgtggaaattactaacgttggctcgagagatgggacgcaca

SEQ ID NO: 128793 - DNA, 226 bp, Arabidopsis thaliana columbia
cactatcacgataactcatttaatattatacaaagttcaaacattgactgacccccatacaaatgcgtaatatataacaaaaccaaaccaatcgaccacatgtatcgcgagaactcttaatagtgaaagaacgatattcagacaacttacaaagattcttgtgatacatttaggtcatcggatcaggcagccgaaactttatccgtcaaaaacgagttcttgagag

SEQ ID NO: 128794 - DNA, 376 bp, Arabidopsis thaliana columbia
gccgtaataaagagagttttattactttttttgcacgtattcaaccgaaatacatttagtaggaacttgcatacgagaccccaacatgaattactatgtatcgcgagaacttataatcatgaatgacatatattcaacaacttacaaagattattataatcagcgaatgaaaacggatctaattgggttttaggagtggaccattcaaccctaagaatgaggttatcataaccatagccattcaatttgttgattgctcgctgtgcatcttccctgctcacaaaactgacaaaaccaaatcctctgctcatgcttgtcttctgatcaatggctacatgacaacgggttacagcaccaaacggacgaaacaactcca

SEQ ID NO: 128795 - DNA, 487 bp, Arabidopsis thaliana columbia
ggggacaagattatcgataacaaagctaaaacattaatattgtaatatgaaatgcatagtctgaaacaaccaccaactaactttataagtttacatttaaacttttttgttttgttacgtttgtttgccactagtaccatcattacttgcatttattctgcactaacggtactaatcgaattggttctgtttctttacttccacaccatttgttttctttaacaattttatacattacatatccataaatggaaaacaaaaaaatatcttcacttcacatgcctccaatgaatcctctcttcatctcttagcataactaattcaatcattggcatctacaaagtcacacagagagaattgttaaatcgtaaagccacaattataaacataagtgtaaagagcaaaaccggtggtataaaccggacaatagatttgcttcacaaaccccaacaaaacaaaattaggtcactgagatttgactgttacc

SEQ ID NO: 128796 - DNA, 224 bp, Arabidopsis thaliana columbia
cctgggtataagtttatttacatggtccaatttcatccaaagagtagagagcttaatattatttacataggcacacattatttgaaaaaaaaaaaaaaaaaaaaacaacccgaaccccaaaatgggtcaagattctgaaacatcaaacatcaaagggtgaagtaatagtaaccgaggaagggtttgatgtggattgaccaagcaacaaatgattcttcatttct

SEQ ID NO: 128797 - DNA, 221 bp, Arabidopsis thaliana columbia
acctaaacatcgacttggttttttagcccattaaacataatttgatcattttatacaattattttggccaatggttgattgcgggagccgcaaacaaaaaataccttgggcaatttttgaaggttccggttcaaaagaaacttttatttactctcccaaagaggggactggggcggaattggagggccggtgcacaatattccaggggggcggggccaaaa

SEQ ID NO: 128798 - DNA, 301 bp, Arabidopsis thaliana columbia
gggaatgaattattatgtttgcgttgacataaacatcaactaattaatatcttttggtactactagattctgcaaacacaaaacacatatttagacttagaaactcataacatttaagctttctcattgggggcttcttcttcttcttcttcattctcatctatcccaacccactgggtaaatgcgaagagaaactctttgaagttcaccattccgttcttggcccaggccatttcctcaaatctcttcattgcaatccgcccggaggatcggtctcctgattcatcaatgggtcggacca

SEQ ID NO: 128799 - DNA, 155 bp, Arabidopsis thaliana columbia
accgaagcgaaattgatatttttatttttatcgatccgaaagagaagaaaaagggcaacttatacgtgggtcgactaacgtaattattattgcatgccttattatcatccattaagagaaaatggtaacggatatatgatcacgttacacgtacg

SEQ ID NO: 128800 - DNA, 443 bp, Arabidopsis thaliana columbia
agtactaatctgtctctttttattaataataatttaacaaaaagaacaaaatcaaaatcactttcacagtttaagcacaacggaatttagaagtttccaactgactttacacacagagagagtcaattattgtcagacatgtcacgaaatctcgcaagtgctttcttatggagaagagttctgtaagtgtcaccaggctgaacctcaaactcagcatcaactttcttctgctgactcccaagtcctgctctcctatcaacgccttgcgcttgcaccggttctttcattccgctcccgtctttccccaaacccgatccttcgtgccaacccatgttcctcagcattctgtttcccacgttactctcatctattgctctctcttctgtaatcacatcgaaactactgacttcggtgcttgttgtaatcccacgtccacccacacc

SEQ ID NO: 128801 - DNA, 394 bp, Arabidopsis thaliana columbia
acagagtccaatggtagcttcttactcaagagaggtggagattcttgatcttctgcaaagaagttatcaggagctgagcgattcaaacaaggatggtcaaagaccgataattgcttcagaacaagagttcatgatgatcaaatggagcagctttgacttcctctaaatcccctttcttttttcttcatcgaaacatcaaaatctggttctctcttcaaaaaggcctcttgaataagaatgtacagaaaaaaggctatgaaagaagcagcgatttgcttctttcttgtttctcttttgcaagaaacttacgtccagattttgatttcaatctttcaccagaccgaatgatttcgcccaacaagtttcgaggattcggacaagactcaccatgttt

SEQ ID NO: 128802 - DNA, 208 bp, Arabidopsis thaliana columbia
aagctctgtttttttacccgttccccattattaatttctgacggttaaaaaggactcccaaccacaatgaataaatgatccaaggggattttatggcttttgcaaattttgctttgaagcaataaggcaacaaatcgacattgaagtcccttccacaatgcgcactatgcacaagaaaagacctctcaaaagcaaagcaaaagggggg

SEQ ID NO: 128803 - DNA, 469 bp, Arabidopsis thaliana columbia
ctcacggtactgcctacgaatggagcgaggaattttgcgttgatatgagttggggcaatcggttgcagcccgaacgagctagctcaaaacagcagagacggaagaacgtgtgacgaaagaatcaactcagcgaacagaatctttaacagcaaactcatatctatagtcgacgcttttaaccagaacacaccagatgcaaaattcacttacatcaacgcttatggcatcttccaagacattattacaaaccctgctcgctacgggtttagagtgacaaatgcaggatgttgtggagttgggaggaacaatggacagataacttgtcttccaggtcaagcaccatgtctaaataggaatgagtatgtgttttgggatgcgtttcatcccggtgaagctgcgaatattgttattggaagaccatcttttaagcgagaagctgcttctgatgctcatccttatgatattcagc

SEQ ID NO: 128804 - DNA, 427 bp, Arabidopsis thaliana columbia
aagttgaaacaaattcatcatcactgataattcaaatatacatggtaaagtttttgaatgataaaatgtgtctgattatgggaatgcagattaaatcaaaggaaagcaaatttggatgtggagaagaagaagaacaccgcattagaaagacaatatataagcaattaagttttcgagattccgaaatgatgaacctccaagcttaaggcattgttcaacagtttccttcatgggcataatcctcttgcggatctcttccccttccgagctcgtcattagtgttctaaccgcgttttcgatcactagtctctctaccttgttttccaaatgcaatccgatcttccaaacatcgttaatgtatctagcattcaccctctggtccccaaaagatggtctgcatatcattggtatagcttcacatatgccc

SEQ ID NO: 128805 - DNA, 422 bp, Arabidopsis thaliana columbia
cacaatactttgaaaatcacacacactaatattttagctctacccactatgtggcttgacctcggatctagaaccgacgagagatctgcaaactactaaactgaaaactacagtgacggttgaggaggtgtaaaaagacttttccggacacgtcttgttagactccgaatccgtcaagcactacggtgcccgagccaaaccacttgaggcgaagcagaggttggaggcgaagcggctttattttgtggtggagccggtgaaagagtgtccaccgagaagggtaagatcaggaattcacgtgagtgcaaaggagaggcttgagagtctcatgctggcccggagatcgtcttccgatctctccatactcaaaccaccaagaggatggacgacggaggaagaagaatgagctgtgaggagggtga

SEQ ID NO: 128806 - DNA, 400 bp, Arabidopsis thaliana columbia
cagatgtatgatcagccacactatgataatcctcctatgcatttttcttatggaggatatggaggctcccaacagggctatccatcggcaggtggtcagcaccaaatgcagcagccaagtagaccttacggtatgcaaggatcagccgagcaagggtatgggcctccaaggcctgcagcacctcctggtgatgtgccttaccaaggtccaacaccagcagcaccgtcatatggttcaacaccagcagcagcatcgtatggttcaactccagcagcaccatcgtatggttcaaacatggctcaacaacagcaatatggttatgcatcaagtgcgcctactcagcaaacttatccttcatatagctctgcagcaccatctgatggttataatggtacacaac

SEQ ID NO: 128807 - DNA, 452 bp, Arabidopsis thaliana columbia
gaagcagaagatgcaaaatcaaaggccgtcgaatttcaagaaatcatcgaaaggtatacgtttactaattgcttaaggcatttgtaatcatatttctgttctacagtcagagttcatgagtattgattgtaaattccagattacatacgaacctgtcaaaccttgaatccgaaaatcaggttttgcgtcagcaggctttggccgcttcaacaagcgttgaagagattggagagttaaacaggtacggtcctgtgagctgagcagttttctcagcctagtagattctttttcttctatcaggcatagctcttatcagcctgaaggataaggttgcaattctagagtcagaaaatgaaactcttcgaagacagacagagtctgcagaaaagacaatgcctcctgcaagagtttttgcgtcttgacttttatggcagagaaccatgtaaaacaat

SEQ ID NO: 128808 - DNA, 407 bp, Arabidopsis thaliana columbia
aacaaaagaacatgattttatttctgtgtatttagaatatatgcagtagatgtattaaatgaataaaaacctggtctatatttagtgattttgtggctgtgtctcatcttgggtcttggctttactccttagcatctcagtgaagttgcctctcatgatacgtctgaatctcgtgtcttcacttgctgcagccacaacctttggtgactcgggtccctgacctgtcggtgatccaggtgccgtgctttccgttgcttctttcttccccaacaagcctccttctccaaacaagctcgtgacggatgatgcaatccccaagtgagcacccatagctttactaattgcttcaaatgtcccacctgatctctccttcattatgatctctaacgcttccttgtgagctggat

SEQ ID NO: 128809 - DNA, 562 bp, Arabidopsis thaliana columbia
tgttattaaccacgaatggagctcagctgattttctcatattctatactggtcaatggtgggtgcctgggaagcttttcgaaacgggatgttactttcaggttggaaattcactgaggctcggaatgtcaattcctgcagcgtatagagtagcattagagacatgggcatcatggatagagagtacagttgatccaaacaaaactcgggttttgtttcgtacatttgagccatcgcattggagtgatcatagatcatgcaatgtgacaaagtatccagccccagacactgaaggaagagacaaaagcatattctctgaaatgatcaaagaagtagttaagaacatgacgattccggtatcaatattggatgtaacttcgatgtcagcgtttagaagcgatggtcatgtcggtttatggagcgataatcctttggtacctgattgtagtcattggtgtctacctggagtacctgatatctggaatgagatcttgctcttcttcctctttagacaaccagttcagtgaagtggataattggcacatagaaaaaaagattaacga

SEQ ID NO: 128810 - DNA, 235 bp, Arabidopsis thaliana columbia
  unsure (1)..(235): unsure at all n locations
gatcggcaagaaaatgtcttgaattcatttgtctataaatcaagccgngacattacgtgtgggagagttatcaagccgtgacattacaaataaaaagaagaaggacgtagaagaaacaataaaagaatgaattaagtaagaatcatttttaactttcaccaaaaatttgtgacccctttatctgtctttagctctcagaagaaacatgaacaattagctccgagagattcagtct

SEQ ID NO: 128811 - DNA, 244 bp, Arabidopsis thaliana columbia
ggtttggccccctttgggacctggcgttggcgggggaggaaaaaaactaacgggggggagaatcgcagtcataggacgaatttgcatttccattgcagctttttaatcaggggttttttttaaaaccaccggtaatgattggttacgggaaccgggaactaaccgggtcaggactttcactttcctttggacaggtggcaaacctttagccttaagccctaaaaccggcgttttttgttttttt

SEQ ID NO: 128812 - DNA, 189 bp, Arabidopsis thaliana columbia
tttttgagtctttttcacattaccattacaccagtttttagccacaaaaccacaggggaacagggacgggcagagtgagagaggaatcacatgaattggatgttgcactttgatgaagctttatcaagagccataagttcggtgcgcaagggctcactatcgttgtcttcttcaacaccaattttcaca

SEQ ID NO: 128813 - DNA, 277 bp, Arabidopsis thaliana columbia
gagcatatggatacagcttcatcccttaatgatggcttacgtgttcttgttgcagccatattactcattcgggttcggtggacaactctgtcattgtcttctctgcgttcaggccgcaactcaaaatccaatagcttggcgaagcgaaaaatcaagttttttgttcatcttcttgttgttgctgttgagcctttagtttctcgagctgcttccgaagataagcttgtttgagtttctcccgacgatttgatgcttgctcttgactcctttgctttaa

SEQ ID NO: 128814 - DNA, 414 bp, Arabidopsis thaliana columbia
aatatatcattaacgcttggggattttttattagaaactccgatatcaaccccatatttccagattgacgttttttaaacctccaattttgatactctacaaaagggaggtcaaaagataaaagaaagaaactacaaaatttcagctagtcaagaagaagaaaagaggaaccaaacaacattttattggtcctactattttaaaaggacccgtataaagtagcaaaaggggcttgtcatttctgcaaattcagcttgaccttctccaacactttccataatgcagacttagcttcttctagtgtctcaacaccatgaccttcctcaaatgctagcctttgtatgttaaactgagcaccttgacgaacccgtacatctattcctttgctatctattgaaatgagagcagcatcgt

SEQ ID NO: 128815 - DNA, 251 bp, Arabidopsis thaliana columbia
acaatgtagtagatattacaagttccaagagatcaatataacaatagaagttatggactctcttatttaacaaaaaatacagtaaaaatatatttttaaagcacgacatagtactacagactcttaattagctctcgtggaaaaaatcgtaaatacttttttaataaacaatgtaccacgacggacctccgccgcggcgccgccgtataattattcccgtcgggaaagatctcaagtagttcaccgctgat

SEQ ID NO: 128816 - DNA, 152 bp, Arabidopsis thaliana columbia
tctacctttctatggcttagaatctaaaatcttctatctaactgctgacagattctagattgatgttggtttctgcttttcttgcatctagctgctttctctaaaagtgtttactcttccttcaggttctagaggatcaatcctgacaatta

SEQ ID NO: 128817 - DNA, 459 bp, Arabidopsis thaliana columbia
agcggccgccctttttttttttttttttttttaagccaggaattacatccatctattaaacaatgatttgggcatttttgggaacaaaacgggtttaaactgataagaaactttagtcctctctaacgaaccatacaaacattatatgaatatgtaaagaaagaaagatttaagagaaaagaacgttaaattgccgctataaaacgaattttcttcgttgtatgttttcgattagattctcccaagaaagaaatctcttgtgaatgttgttttgttttttcatgttggaggcagtttttggcctcatcatcatcatcatcgtaatcactccaaatctctgaggctttcacttgtcaaccacagtttcttctggacaatgagtatcacattgtccgagtcttggtctgattccgaggctgtcttggtttcaactgcttcccaatgcaaagccttgagata

SEQ ID NO: 128818 - DNA, 177 bp, Arabidopsis thaliana columbia
ctaataattctaaaatgctcacacacagtttttgggaatctataacgaagttttggtttgtggttatcaacaatggcggaagcaatagatcaagatagtggttgatggtctgcagtgtatacaccatacattgactaaaaacccaggaggcatctgagctttttgtcttcaagaaaa

SEQ ID NO: 128819 - DNA, 189 bp, Arabidopsis thaliana columbia
aagaacagatagagagagatgaagcagatgccaacatacagtatctgtctcattcggcgaaatcagctatgcggatgaatgaacaatctttaccaactagatctcgtgcttatgcttttcacaatggaactgttgctgctgcttaattaaaaatagctgggaactttgagaattattataattaattag

SEQ ID NO: 128820 - DNA, 314 bp, Arabidopsis thaliana columbia
cgggtgggttttttgagaaaaaaacccccaatttttcccggggggttaatttaaccaccaaaggaggcaacttaggggtaaaccaaatttcaccccctttttaggggggttgaaaacccccaccccctggttgggttggaaaagttcaaagatttgggaaacctttttcaggaaggccttggtttaaaattccccctttggggtaaaaaacaaggccctttatgggtttcatttaaggattcagggggcgccaggggtttttttttttttaaaaggggttttggttttattttgggggctaataacccccttgg

SEQ ID NO: 128821 - DNA, 259 bp, Arabidopsis thaliana columbia
aaaaaaacaccttaaaagattaaaaacattaccatcaaacataggaatatataaaagcacagcaacctttagaaccaaatccacatgattctgtccactctttttacccatctcttctcatataagttttggctgaagatatatataaatattatacggtttctttctctcttgtcctccttacttaatgcaagagatatgatgagtcttgagagtaatgatcgtaccgcagagtttttaatgctcaacaacaaccgct

SEQ ID NO: 128822 - DNA, 497 bp, Arabidopsis thaliana columbia
cacgcgtccgatctttgaatctttctttattccaatccaactttcttcaagtgccgggttctcgggtcggatcttctaagactagctagggataatggctactgtcactactcatgcctcggcctcgattttccgaccttgtacttcaaagccaagattcctcaccggttcttccggtaggttgaaccgcgacttgtcgtttacatcgatcggttcatcggccaaaacgtcgtcgttcaaggttgaagctaacaaaggagaatggttgcccggtttggcatcgcctgattatctcaccggcagtcttgccggtgacaatgggtttgacccgttgggtctagcagagatcccagagaacttgaaatggttcgtccaggcagagctggtcaacggacgatgggctatgctcggtgtcgctgggatgcttttgcggaagttttaccaagatcggaatataaatgtcctgagtggtacgatgctgggaagagcagtatttt

SEQ ID NO: 128823 - DNA, 389 bp, Arabidopsis thaliana columbia
accaccaccaccgttgctggctgtaacggaatctccgcttgtgatctcgagaaactcaacgttctcggatgcagaaacggcgggattgtttacaaagtccgtcataaaaccacatcggagatctacgctttgaaaacagttaacggcgacatggaaccgattttcacaagacagttgatgcgagagatggagattctccgccgtacagattcaccgtacgtcgttaagtgtcacggaatcttcgagaaacctgtcgtcggtgaagtatcgattctaatggagtatacggacagcggaaccctagaatcactacacggcggtgtaacggagcaaaaactcgacggattcgctaaacagatctcaaaaggattaagctatttacacgctct

SEQ ID NO: 128824 - DNA, 332 bp, Arabidopsis thaliana columbia
aaaattgaagttagggcggttaaaaatgttacaaaactgattatgcttctctaaacacattaccccaaaaaaaaaaaacagaacattttttaaaaattaacactcaaaaattacatttgtaatgcttgagaagcctattggcttcccttaaaccactatagtaggccccatgggttggggagtaaggggttctatgtgttgcttcccctgcaaacatgacttgaagctcatgaaccttggcttgatcatgaccattgacctgaccaacctttttattaatctttggcaatggctcagccattgcgtctaggtcatccccgtttgatccaacc

SEQ ID NO: 128825 - DNA, 349 bp, Arabidopsis thaliana columbia
ctgtatatggatgcaagcctaaggatctcaaactagtaaaataagaacaagaaggtatatgacccaaacaccatcatgttgcagtgagcacctaaggcttttaactcttgtttttgacaaacgattttacccgagaaacacaactaagaaactgagatctcttccatgccgctaatttcttcagtcagctgatgctgtactttgggctccaagtcgatgaactggtttgacttgcttgctagatgtgagatactaactcttccttgacgtttgatgtaatctgcaaccgcattcatctcttccattgatatgtaaatgtatttccctctatcatccatgacccccgaga

SEQ ID NO: 128826 - DNA, 395 bp, Arabidopsis thaliana columbia
actacactacacaggtgggatatattaaagcttgcaaaactcaccccaaaacagaaactaacacacattgcttatgtgggaagacagttttttgtacaaaagaaaaacattccccgtcactttatccactctgataaagtacacaaaaacattataaacaaaacaaagtagggtggcggaagatcaggttaccatatttacatcacccgcatgtgacactccatggaaccattcctaacggtgctgactgctagagctaccgttgtacaacctgcaaacaccccacttgcggtcaattaatgaaccaacaacttgtgatctgaaccatccgatcaacaatctcaaatgtcaatactcagaagaaaaaaacaacagttgtgattagcactctaaaa

SEQ ID NO: 128827 - DNA, 190 bp, Arabidopsis thaliana columbia
ctgagaactatggaaatgaaacctaaagattgtgtcaaaactcaaaagctttatcatcaaggtattcgtattggtagtcaataaaaacatgaaaatgttaaaagagagagataacaccatccggattgggagactttttcaaagattctaaaagggtcgccttcaagtggtcggaatctaaaccttgatg

SEQ ID NO: 128828 - DNA, 295 bp, Arabidopsis thaliana columbia
agccgtgggaattggcgtccacatactcattagcataaacttagtagagaagagcatcgaggtttcgtttaccctcaggacctttagagtaccaggaagaaacatattgaccatacacaacttccttgtaagacggtggggagagttgagaaactggtgctatccttgcagtcttggagggatcatgaaaggtagcgactgataaccgcgcccgattcgcattagtcacagctctatgttgagcacttttgtatcttccattggtaatgatctcggtttgatcggcaataagaat

SEQ ID NO: 128829 - DNA, 341 bp, Arabidopsis thaliana columbia
gttggaaagatgaggacctcatcatgtttttttagcaaataggaaacgtgaaaaacagaataataaccaaccaaaggagcttaattacagacaagacagatttggggggatgttgtgtaaaaaccaagtagtagtgaattggagcctagtcaaaagaaggaacacgtgttctaagattggaaaggatattgctaggctggtcacgtcaatcaagttgagcagcagccgttcttctgtgccacaggctgtcctctgatctgcacggtcggtggtcttgcattattcccagctggttggctagccattctatctttgatggatgcagacattgccatgaaagc

SEQ ID NO: 128830 - DNA, 163 bp, Arabidopsis thaliana columbia
agtcgcaatgagacttaataattttgtgtaacaaggccgggggtacaaaacataacgctgtcgtgggtgaagatacgctataacaaacatcaaaaagagagctcacaagactaataaaccgtcttttaaatagaaaagaaatacaacaatgaaagaacaaaac

SEQ ID NO: 128831 - DNA, 99 bp, Arabidopsis thaliana columbia
ccttcactatcaaccttgctcaaacagatgatgagagatgcttttgatgccacttctcctctggtcttctcatctgttatatttgcctgtggcctatac

SEQ ID NO: 128832 - DNA, 288 bp, Arabidopsis thaliana columbia
agaaacaaattttactttctcgattttatatgtcgaaccaacggggtcttagcatgtgattaagaacacatgggttttgactcttaacacaatacaacactatactgtcttaacatcaagaaggctcaaggggatgtagatgacaagaagattggcttaatggggcctacgacggtctttcgatgagtcgcggtagtcacggtcccgagaagaatgatgccttgatttatctgaatgtccacctgaaaccttcaatctggcttttgaccgatgatgacttcgatcttt

SEQ ID NO: 128833 - DNA, 454 bp, Arabidopsis thaliana columbia
aagagatgattaatataaattaccttgagattgaaagagtagatgacaaagtcaaaggaagaagagatagtgagatgtagaatcgcaagctttagttcttcaatcgagacaatagcttttaagatctgtcgttttcctctcttacaccgaacttttaagctcacatggttctgtatcaccgtagcctccacttctgtcgtatctccaccgccgaatctcgccgtaaatccattttccgacgtcgtagacacgctagaaatagaagagttagtgcatgcaagagacgaagatgaagaacacgacgccgttttaggagtttcatcagttccatcctttcgtttctcagcttctagagattgcaagagttgctctagttccttgatgaaatctattgcccctcctacaatcgaagcttggtcaccccgttgaagaaacgaaggaggcatgagagatc

SEQ ID NO: 128834 - DNA, 328 bp, Arabidopsis thaliana columbia
gcggccgccctttttttatttttttttttttttttttatttttttttgagtgaaaaaccctaaaaatacaagggggtttaaagacatggttaagctgttgtttgatattcacaaacgaccacaagacatatgtacactcatgtttaaacatatgcacatgtttatatgtgaatgggatatatgagttacagaccaaagagatgtaaactgtttttgctatataggactctttacttacctactccagctccaattgatgttttatatgattttcaggcttgtcacagacccgaggaacatttgccaaggaacatttcctacaagcatt

SEQ ID NO: 128835 - DNA, 333 bp, Arabidopsis thaliana columbia
aaggcaaaccccggatacagggatacccagggttaaaaaaaagggtttttaagggggccgccaaccaaaaattagtttttttttttttgcgaaaagggaaaaaatgggaaaaccccaggtaaagcttttactttttaaagaggccgggactggactgggccaagaattttggtgcccttgggaaccagtttggcatggaaaaatttttaacccccgtttggaaccggggtgggcccaatggccccttggcctcagggtttaaagaagggccaaaagccggggggcttcgcccaactggggggaccaaaattggggcaaccctttttttttttg

SEQ ID NO: 128836 - DNA, 319 bp, Arabidopsis thaliana columbia
cggccgtccttttttttttttttgatctttcaaccttatttttatcacactgatacaagttgagagtggtaagaaacattgagaaccgtacgattgcaactaaagcatggattctcttgttttgctctgtttttcgaacatttgggaaagataaaaggcgaagaaaccctagtgagcagcgtcttcttcttcgcagaacttggtgtattcctttggacccatcagagcttccaactccgcggggctgctcgggttcacctttatcatccaaccatcttcataagggcttgagttgatcaaaccaggtgactcggtgagc

SEQ ID NO: 128837 - DNA, 413 bp, Arabidopsis thaliana columbia
cggccgccctttttttttttttttttttttgccttacgattttattaggccaatgtttgcaacaagaactgaaaatctaaagctacatcaataaaacctgtttggatacaagacattgtgctgaatacgaccaaaaggtcaaggattcgggtgcctgaaatgatgtacgtctgacgcattcaatgtttgtgcataagtcatagtggcactaggccactctgtataagaaggtgccgtcatagctgggtttaaggggtgtccatagtttaggctggcttgagttcttggcatctgtgggaaaattgcgtcatggaacggaagcggaatcggtatcggattgaagttttgtaccggtggcgcaaccctcacatacctgttacggtcataatcaggatcataacgatccttctttc

SEQ ID NO: 128838 - DNA, 593 bp, Arabidopsis thaliana columbia
  unsure (1)..(593): unsure at all n locations
gcggccgccctttttttttttttttctaggaacaattgttcttataatccgaacaaagaagaagacaaggacacttttttactcgccaattgttttcagtgaaaatgtaaattacaaatacggtaaaaagtaacaaactcttctgaagcatcatcttacaagaacaaagaaaatagaataacccataatgtggaacatcaagcaaaatccatcataaccactttagaaagcatgcataaggattgaagaacaaaagccaaaggttcttctttttattttagcgtaaccaaaaacataatgatgactcatttcctcaatggctggctagtttgagagtgttggccttgtcttgcagtgtaccgagcagactctcgaaactcttcttgaaggaatctactccttcgtcttccaactgttctcctactttgttccagtctattcccagcttctctagtgcactgtaaatcccttctgcttctgacacattcgcatctattgtcctcttcactattccatgatctgcgaatgcttccagggcttgatcncgcatggttgatacagtgtcaggtccgatgagaggagcgacatataag

SEQ ID NO: 128839 - DNA, 130 bp, Arabidopsis thaliana columbia
aacgaaagaattttaaaacctcaaagctttgcccaaactcatagttggtcaatgatataagcagaatctccattgtccacaatgcagctgtgaagagaaactgactaaaacaaaggaaggaagagcttgg

SEQ ID NO: 128840 - DNA, 300 bp, Arabidopsis thaliana columbia
gggcaaaccatgtatttttaatcagggccgaaaatgggaaggccttttattcctgaatggtggaacaattattcccaaataagaaggaaattttttacccctaaaaaatcaacccagaaaaaaattcaaaggttcccttttttggggggggtcatttcaacccgaattgaccaagggggtggtgactggaaaaaattctacaatgctaaattttcgaaaaactgggcgggacaagaacctggttcaaaagggccaactcggccccccccaaccaaaggggcagctgcaacccccttttgg

SEQ ID NO: 128841 - DNA, 152 bp, Arabidopsis thaliana columbia
cggccgccctttttttttttttttttttgttgcaaggaatttttttcaagaagagggagatagacagatccgcgagagagcacacatgatccagtcacattgtcggcttcactgggtctgacttgacagccctggaaacaccagaaatggaa

SEQ ID NO: 128842 - DNA, 196 bp, Arabidopsis thaliana columbia
cggccgccctttttttttttttttttttttaacgaaagattttttaaacctcaaagctttgcccaaactcagagttggtcaatgctattagaagattctgcattgtccacaatggagctgtgaagagaaaccgactaaaacaaaggaaggaagagcttggggccaacggtggaaaagaaccaccgagggcgctcaa

SEQ ID NO: 128843 - DNA, 341 bp, Arabidopsis thaliana columbia
ctccttcctccggagaggttggtggcgacgttagatggtatatcgagctacgcatggggtttcttacgagtacgaactcatttttatttggacgacaatcttttctttactttaattcacaatgactaaattctgatcagcctctgaaaatgtttaacagggaagagtcaaagggtacccgatttggcatgacccgaaccgagtcgatccattcttgaacgaaaacgcttgaccgcccaatgccagtccaagcatcgtcaactcaaaggccttaggtactacacaacacttacactcatgcctcagattgtttcaaacgctaatttatgcttgcatttcct

SEQ ID NO: 128844 - DNA, 499 bp, Arabidopsis thaliana columbia
tcttgctgcagaacaccaaatggaaatgcttgtgaggctttggatacgagaagcagtagcactcacggtttttcgcttatcgagacttggcgatttgatgggaggagttatctttcatgggcatcagagatggagctttttttgaagcaaatgaagctggcttatgttctctctgagccttatcctggtattggtagtggtagctctcaagattggttgagagatgattatctttgccataatcatttgatgaaatcattgtctgatgatctgtaccgtcagtacttgaagagattcaagcatgctaaggaactgtgggaagagtcgaaatgggtttaccgtcgtgaggaatccaattctaagatggtacaagccagaaagtacattgacttcaaaatggttgaagagagaccggttcttgagcaagttcaagagtttatcaagattgcagattccattgagggtgctggtatggttcttgatgagacgttttatgtga

SEQ ID NO: 128845 - DNA, 394 bp, Arabidopsis thaliana columbia
ctccaataatattaatttaatttgatttttttattgttaaactgtcacagaaaaaacaatgatgtgtcatgtgtatatgcatacattgaaattcaacatatttacacatttactactaatgttggttctttgcttgagtctctgaatccacaaattcagcgactgaagaagacatcttgatttggtttcttgggagctttctcttcagggatgatgtctctctcaggttctttcctcttggaacttacactgtgagaacctgtctgcattgttcctagactcggtctcatttctatctgagaagagcctgtggctgcactaactgtaacccttttttttccactcctgagaaactcttcctcagcttttaatcgctccaccaacatacaaaccg

SEQ ID NO: 128846 - DNA, 367 bp, Arabidopsis thaliana columbia
atccaacaagaaaatagattattgggagatattatacaatgcttagcaaagtcccaaaataaaggtgtacaataaacaaacaactgagcaattaatctaagtctatgaatctatgatcgatcattacccttagaagaggaaaaaagaagaagattttaaatccttttgggaggttttctctaatatagagaaacggcacaaacaatgcttgcttgctagataataagactgtttctattgatcaaatatcataagcttgattaagacttgtcttcttctgactgagaacatggaggtcctggaatcgaatccacaaagaattcatctatgtcctcttgttcgggagagtcaagtaaaatctctgaat

SEQ ID NO: 128847 - DNA, 429 bp, Arabidopsis thaliana columbia
atatatagaatgaaaatatttatctagtattacaaaagaaacagtattatacacaaaacctttcaagaattaattcaaagagaatgaaacaataaagactctaaaatcatttcataccgccgaaaaaaaaagataccaaacaactatttatttttctactgatccaaaccgtccaggcgttgctctcttgcgttcagccccaagtgcgccagctttatagcgatagtgatgtggcgaagaacgtgaagagttagcaacggcctgtttagtggaagaacggttagggacaacattaagcccttggatgtgttcgaggacttcgactacttccttcatgtgtgggcggttttttgggactggctcgatacaagagagtgtaatgcgtgccatttcggtcgcgaccttggctgtgtatcgacctttgattcc

SEQ ID NO: 128848 - DNA, 358 bp, Arabidopsis thaliana columbia
caaactgaagaaacgtctctttgtgtctaaatagataattgacagaactgagcttagcttaacttcttctgaggaggacagtggactcgcgaaagctggggtacccttgcagctctaaacgtcctcgaacgtatgctaaatccaagaaaactcattcttatccaaggaggaggcttgaattgggatcgagcaagaatacactttgatgcaaaaggatgtgaactggccaattgggtggtctgttggtggctaccctggccctcagggaccatactactgtggtgtgggagctgacaaagccattggtcgtgacattgtggatgctcactacaaggcctgtctttacgccggtattggt

SEQ ID NO: 128849 - DNA, 178 bp, Arabidopsis thaliana columbia
gattaacaatcacctcttttttttgcctctataaaaccattctttttatatcttagccactctcattacccattgtggaacagaagaacacccgcaatgaacacttgaacgttttttagatagagatggatgggaaagaagaggatgttcgaccgggagctaacaagttcccggagag

SEQ ID NO: 128850 - DNA, 397 bp, Arabidopsis thaliana columbia
gcggccgccctttttttttttttttttttttttttttttttttttttttaagtttaaagggaagttttattcatttgtgggataggggagaatacaaagacgttaagacaaaacaacaagaagaagagacgaccaagcccctttagatagacgaaagaagagaagcaacaatgggggaaatcacatataacaatatttttggatcacggtttagttcttgcgaagcacgatgaggtactgcattccgggtttggagttatggaggcgaaaaatctgttcgcgtgccttgacctcaacaagctcaaaggctttcctcatgacttcgactccaaaatgtgcggaaatgaaagcaccataaaaggccttgaaagagatggccaatgtcttggggtcaaaa

SEQ ID NO: 128851 - DNA, 143 bp, Arabidopsis thaliana columbia
cgaagctctgatttcatcttcgatatctcacgccggatttcattcaattcttgaatcagatgataacgacgactgcgaggagtttacaggattttttgttaatactccgtgacctttaacagctaaattgttaacggatcgaa

SEQ ID NO: 128852 - DNA, 549 bp, Arabidopsis thaliana columbia
ggtgaaggcaactgctggtgacacccatcttggtggggaagattttgacaacagaatggttaaccactttgtccaagagttcaagaggaagagtaagaaggatatcaccggtaacccaagagctcttaggaggttgagaacttcctgtgagagagcgaagaggactctttcttccactgctcagaccaccatcgagattgactctctatacgagggtatcgacttctactccaccatcacccgtgctagatttgaggaactcaacatggatctcttcaggaagtgtatggagccagttgagaagtgtcttcgtgatgctaagatggacaagagcactgttcatgatgttgtccttgttggtggttctacccgtatccctaaggttcagcaattgctccaggacttcttcagcggcagagagctttgcaagtctattaaccctgatgaggctgttgcctacggtgctgctgtccagggagctattctcagcggtgaaggaaacgagaaggtccaagatcttctattgctcgatgtcactcctctctccct

SEQ ID NO: 128853 - DNA, 335 bp, Arabidopsis thaliana columbia
aaaaaaaaaaagatttttggaatgttccctaaaaaagtttgcctttcaaaaatgaactgggaaaaccgaacattggaaaaccattctttttttttaactttggattttttacattttgaacccccccggctcaaaaacaacttggaataggggtttttaaaaccccccaatgccaaaaagggtcagactttaaaatctttttttaacccctgggctgaaacttttccaaactagggcccccttttggggggtgggactcaaaccctttttcgaaggttgcaccttttgtttttttaaaagggcccccagattgaatcccctttttttttacgggg

SEQ ID NO: 128854 - DNA, 449 bp, Arabidopsis thaliana columbia
ggatgtgaaagtacaaagtattttgtctttataataatttgtttccaaggaaaaaagacgagaacaaaaactaaaacaagagaaagatcatcccatgatatttaaatagagaatcaatctacaaaaagacggcaacctgattttcaaaacaagaacagtagatcagaggcaagccggatagtacataaaaaagactcaaacccaaaccaaagaggctttctccaactagaacgtaagtctttttttgagtcgctctgttttcgtttgtggaggaaccatatcaagtttcgacgctcacaagctcatactcgatcagcgaaagattgttatcatccttcacggtgatgtctgtgggctcctctgcaacttcaacacgtccccatctatcaactgcaagcctcatagaacccttgtacatgtcgatcttcgcattacgcagagtcactaca

SEQ ID NO: 128855 - DNA, 521 bp, Arabidopsis thaliana columbia
aaacaaaagtgtttaagacttttcaaagttgtaatatgagagaggaaaaaggagattttgtgacaattctaagtcttatggaaaccgtaatacaaatcctctaacgcactaagttcagattttaaccaaaggtgcatgacgacgattaggcagaagagaagattgtcctcctcacacaatttgatttctttccttttcaatgcttttttaagcactttgagacttttggagtattttgttgaagggatctgatcatgtcctcttcataatgtatcccaggattaaaccgattaggccgaccagaagaacgtacatgaaagggattccaccactcttacttgtcttgctttcgcgcctcaactggtccaattcttggtgaagcctgttgttcagttgaaccgcagagttcttttcctcggtgagttttgtgaccagagctcttgcctcagatgaattatcctgagcatcaaccctgtctgcgctaaatcttggagcagcagtaaaatcagaagcattcccat

SEQ ID NO: 128856 - DNA, 235 bp, Arabidopsis thaliana columbia
aatctcaagagacttttgactcagtggtttttcccctgtgtgaaaaaatcctaggctttcgtggttaagaaacaatcatcgtaaatgggagacagttcctcaaccatcgttggacccagcggaatcctggggtatattagctacaggctttgctacaagttctttctgcttctaagaccgaattgaccgggtggcgcacttgagcttatcacattcgggcgagaggatttgtggc

SEQ ID NO: 128857 - DNA, 268 bp, Arabidopsis thaliana columbia
aaaaaaaatctacaaaacgcataaaggcattaccggaaaaaacgatattacttataaaagacaaacacacgaacaaactcatacacgcctacctgagagaacactgaacacctctgtggcctacaaaagcaaaaaaaccaccacttcatgcagcctaaacgacatcgtgtaagggtgggtactctgtagggttattctctactctttttcaagactagtgttgcgtgtgagagatcacatgccgtaagtgggaggagagctccttggt

SEQ ID NO: 128858 - DNA, 331 bp, Arabidopsis thaliana columbia
  unsure (1)..(331): unsure at all n locations
tttnttttttttttttttttttttttttttttttttttttttttttttttggggggaaataaagggacatttgcttattgagattgaccaaacatgggggatactaatggatttatggttattggtttctaattacaattttattttatacccctccctattttacaagttagctttgccgttaaagaaataaaatattggtggccttagcatcccactccctgttgttccatgggctaaagccagttttacccacggtttcaccgggggctttttttttttaaagcccgttcggtcttagaccatttccatataaaaaacggtacagccg

SEQ ID NO: 128859 - DNA, 495 bp, Arabidopsis thaliana columbia
acggtgtagatttttttggttcaatgctagagagtacaattcaatggttttgatttacactacggatgataacaagaagcggaaataaattggcaaaaatcatgtatactttgtttgagttatgaaaacttttaagaagaaactgtgttgttgttgtgctcctttgatttagcgagtttagcttgtatgagtttgtccaagatcggtggctccaatggaatcacatcaagacatctctccgaagccgcaacgatcacctcgtcgagcaagaagtctattgcagcttcgtcctcaactgcttccttcaatggagcttttaagaactgaatatctagctgaatctgctggaacccgctccggttaaacgtttggagacggacatattcttgcaaactcttcagacaaagttttactgttgttgtaacaacggattcctgggtaaattcaaccttggtgaatatttctactttttgcttgaacagttttgcaagatgt

SEQ ID NO: 128860 - DNA, 375 bp, Arabidopsis thaliana columbia
ttttttttttttttttttttttttttttttttttttttttttttttttttttttttgggtaaaaaggccctgggatttttttgggaaggggaaaaacaaaggcccgttccaagcccaaacgaagggccataaaaaaaaagccaaaaatgaaaaccaaatcgttggggataagtttttccaactgggggaaacccaaactcccccgggggaaaaaaatcacctcccaagggcttgaaaaacaaaccaaccccttttttttaaatcacaaaaagcttaaaagcttcccccccgaaaacaaaaaaccaggggaaaaggccccccctttgggagggggaaatctgcaagggggcaaccatcctaaagctgttttccaac

SEQ ID NO: 128861 - DNA, 349 bp, Arabidopsis thaliana columbia
aaaaaaacggaaatttttattaccccagggggggggaactatttttccgggctctcaaaaattcaacactgaaggattacctctggcttttttttctttttactataccaggatggatccatccaccaagacattgactaaggaaatagcctttttttattcaactggggaaaggagagacctttttaacgtttttaattccctaattggttcttggcctactaacatgaacactttttcctacatcctttttccaattttggcaaatctttgggttactccaaatataaccgcctttgtcaacagcctttggtccaaggtccatgcaagggcaatcgcccctcctacc

SEQ ID NO: 128862 - DNA, 378 bp, Arabidopsis thaliana columbia
atcatgtcaaattttatattcaatagtgctcgtctcttatacgaccagtatcaaagctttgtttttcaacagacaaaaaacaaaagaatctgctgttattatccaagtgggaggatgaaaaccgagagctcacacaatgctttaatacaaaaagaaactgatgtcgtcgtccattcacattcacacgtcttcgtctctactctgatgctccaggagcaattgttccaactcttccttgcgtcgggctatctcctcaagaaccttgactgcttgttctcttgaaacttccttttgctgtcgagcacgcttcaaaaagccgatgcagagaactccagaaatgacatagataacaccacaagcaagaagcaagtagcttgc

SEQ ID NO: 128863 - DNA, 234 bp, Arabidopsis thaliana columbia
gtaaagcaccattgtttttttgaaatataccaagaagattcaaacggaagtttttttaacattgccacaaggagttccaaacgaccaaagagtccgtttgggaggctcttaaaaacagtagacccggcttatatagtgggaactctctcggcagttccagcgatgaccgatagcaagtgggttccaaaaggatcactgataggctttgcagggttctcaaccggaccttgtccg

SEQ ID NO: 128864 - DNA, 402 bp, Arabidopsis thaliana columbia
gttgattgactaaatgggcatacatctagggttggggaatctataggctacagttaagattctttaatgatacaacttccatggcttgctacattatcccatccgcatgcaacctattacttttgacaagcctctcaaggaaaaccccattgtccagggaaaacctgcatcagagtctttcccaaaatcccttccatttaagaacttgacaaggatgctttttttgcaatgatagccacagcttctttagcttttttctttccacattcaaaaacaacaagtgggaagtcactgccccacatgacacgatttgccccaaaatgggacccaagttgatataggaaaggcgataggtcctgatacgggacgccggttcttgaaatcctgaatagagcactgaat

SEQ ID NO: 128865 - DNA, 402 bp, Arabidopsis thaliana columbia
gcactccaattcaatctattgtgtataacatatagtttatatacacacaacataataatcccaggcaaaatggtaaaactaattaatataacttgtctcaaaaagaaccggccaaaaaaaactaatgccttacagtagttttacatggacacagagatgctccagcttctactctctctttttaacagttcatgttcccggcacagcttttgtgaacaagaagaagccgattctgagcccaacctcttatagtcaacgatcgtttgaggccataccagccaataaatagtcaacgttcagtcttaagtgtgtgtatttcacttgtgaggtcgcagttcaagcttataagctcgtatttccatgggagagatcgagacacgtccttcccgtggctgtgaacta

SEQ ID NO: 128866 - DNA, 206 bp, Arabidopsis thaliana columbia
tgcttcgatgatctgtccaaccgaggtttgatcttttttatctcgcccaccgatgtttccatctacatggttaccacttgggagaagatgccgatttcatttcagatctctttcacgctgaattgcgtgctggagaaaagtgtcaatggtctaactcattctaccgtttacaataccactgatagcttaaatagctatcaatatca

SEQ ID NO: 128867 - DNA, 115 bp, Arabidopsis thaliana columbia
cagggcatactacgactctctcagattagcatcatttttgaagggtccaggtctctacaccgaaatcggcttaaaggccagagatcttctgtacacagaccacagcagcgaccac

SEQ ID NO: 128868 - DNA, 143 bp, Arabidopsis thaliana columbia
ccatatatatatcattccctgggtttctcaattataggttattaaacgggtacaatacaatttgcacaaaacgccttccagagatattacaacttccaacaacaagacccaaagacacattaaatgatcaatcaattagacaa

SEQ ID NO: 128869 - DNA, 171 bp, Arabidopsis thaliana columbia
aataagaagaaggtttttttatttctgaggtgtgaggtacattgctttactggctacaaaacaacccgctattgcgatgcaagaaatatcaatcgagtgttataaacgctagacaggatatttaccgctggttaggtccttgctaaaaatgattcaacttactagtgaact

SEQ ID NO: 128870 - DNA, 450 bp, Arabidopsis thaliana columbia
acataaaccaaaagtctttttttgcatcctttgattgttacaaacccaaatattttgctttgtgtgactagaaaattagaaattgttactttaggaactgcacttaatccaaagtcagaaactttgagattaccctttgaatctagtaacaagttttgtggcttaagatctctatgataaactcctctgttatgacaataatcaacagcatcaatcaattgttggaaaagttttctagcatctgattctttcattttctgtcttccaagtctgtctgaaagctgaccacctgaaacgtattccataactatacagatctttgtcttggttccaatcacctgtgaaaaatgtaaaatttcactcagaataaaaaaaacagtaacttgatgagacagagagacatcagacatcagaggcaaaaccctttaaatgatttaattgtctttggaa

SEQ ID NO: 128871 - DNA, 231 bp, Arabidopsis thaliana columbia
cccatgaaattatttttatatatatatatatatatatatatatatatactcaattataacatactttacaatacatttagcttctcacatgaaccatcatactctagaaaatataaaaacatagctgcaaaaacaagcggtatttaataaaataaattttggacaaacctccgtgttgacaaaaagaaaaacgacctattaacttaattatggacgttaccctgcttcgat

SEQ ID NO: 128872 - DNA, 280 bp, Arabidopsis thaliana columbia
tcctttttttttttttttttttttggggttctccaattattttccattattatcaacaccaaaaggaaaaatgaaaatacaacattggcgacccttcaggatcaaaattaaccaaactgattcaatatgtctgttttaaccacttatggctgaaactgcattgacttttaaaaacccaagtcatgcaaagttacactacttgctggtagaaatggctttttcggcttgtggggctgggggaaacacaaagacacttgaagcaaccgcaaatggctgaaac

SEQ ID NO: 128873 - DNA, 397 bp, Arabidopsis thaliana columbia
gcacaacagctttagattcatgataaggggaaaaaggctctcccagtagttttaggatttcaacatataagctcacacacccttacacgatttaaccataatcatatgagagataaaacaagcctaaagaaaaagaagaaaagaaagcgcaaaatttggcatgagtgtgatcgaatttaacaaccatcacagcttcaaagagacaagttatccttgcgggttttttcaaaatctattgctcccatatttgcgagcgacattagcatccaacagtgtatcccaaacatgtagctctccctttgagccaccaatagcaagcaagaaagggttgtccaccgcaaaggaaatggaaaacacagctccagcatttggttggggtgtagcaatgcatgaaggt

SEQ ID NO: 128874 - DNA, 437 bp, Arabidopsis thaliana columbia
gtaaaatggttattgtttattatataaatgcttgttttgtatgaaaacactgataatttggaaaacaaaaagatttaaaatttgttgagaacaattagcaatttacaagaagtctagcttcagaatcctccaatcattagaactgtttagaaatctataatcgtttgaggacaaaaactccacatccaatgcctagaaaagttgctatggagaccccaaaaacaccagagagaatcccggggacgacaagagaagtccatccttttgcggttgccatggcacacgcagtggttgggcctccgatgttagcatttgatgcaagaagtaatagcttcatgtcgatacagaatagttttcctagaaccaaagtcactgctagatgaaccattacttgaatagcagcaaataagaagatacttggggcagtgttgattaca

SEQ ID NO: 128875 - DNA, 333 bp, Arabidopsis thaliana columbia
caaaaactatagaaactaattttttaaaaatcttacaaaaaaaaatacgagccaaaccatatagtaatctttctatttcatacacacaatatactaaaaatacaaagacaaaatgaaattttcaaagcaaataacaaaaccagagggtttttttcttcttctaaatctggttccaaggaaggtccttaagctcaaattcaaagctctctttcttcggaaattccttctccactggataagcatcagtcgcaacaacagtaatcacatcaggtttatactgatgtttcatggcgaacacaatagaaatcaagaagtgcaaggctcccaagacaa

SEQ ID NO: 128876 - DNA, 206 bp, Arabidopsis thaliana columbia
catcaccctcttagctggtttttccagagatgcagggttttacccgatacatatatgacatatctaactaacatttttatggaacagggggaaggaagatgagactgtgcggaccttaattaagttggttatgtaccaccacatggggcatttgtgtgaatgttttgagtaacattttgacaagccggacgttattctggccaagg

SEQ ID NO: 128877 - DNA, 154 bp, Arabidopsis thaliana columbia
acctctcaaattctttgtggttctattaaagaaattaaagtaggcaggcccttgaggaaaaataaggaggtattgaccatccaacaaacaagactggctttatgtaatcccccaaaaacattggcgacccaccgtgaaccaaaaaaagaaccaa

SEQ ID NO: 128878 - DNA, 290 bp, Arabidopsis thaliana columbia
accaacgtggtggacatttttaaaaaaaaaagggaacaaaagagggggagatccaatccacaattacacaagggagaaaaataaaccaaaagagacaattggagtaaaacagcaaattaataagccggataatatagctcaaaagttgtagacacaggttccatcgtcacttctagccgttggatcaaagttttcagccacaggatcagtacacccttcaggaactggcaggtttacttggtgggctccttttccgaaaaaagttcctcggccgatggcgttagcgtttg

SEQ ID NO: 128879 - DNA, 256 bp, Arabidopsis thaliana columbia
cccgatagggtgagaagatttttttattgttaacaagattagatttaatacgtgtggatatctaatcaatcatatgaggtaacaactatgaaaactctactttatatattatatatggttgcattaaaatgatgacaattgcttcttctactttagctattacaagataagaccaaaccaaaataaaagggacacaaagaggaattgagagctttaaaacaaggcatacttctgggtccaggttcgagccatggct

SEQ ID NO: 128880 - DNA, 314 bp, Arabidopsis thaliana columbia
cattggtttctgcatccagcgggttactacgagtctggatcggttttgggatgtcattcttgtgaaacatgttactgcaccgaggtagggttttatgatgtatttagaaaagcgataagagcaacgttgagagcggttgctggaagtggtcgtgaggtgatcttgacgacattttcgccatcacattttgaaggacggccttgggacagtctcggcgcatgttacatgaccaaaccgtacgaagggaaggttttagaaggtctggacttggacatgcgcaaaatagaaattgaggaatatacggcggctgcggc

SEQ ID NO: 128881 - DNA, 322 bp, Arabidopsis thaliana columbia
atacaaaataatgttatagacatatgaattctataacagaattgaaaagaccacagcttggtgtcattccaagattttgatatgagcaaaccctttgattcagaacgagggttctaatatttatctgccttaattctcttacaattggttcactccgaaaggaacatgatcgctaaggttattggaatcatctccgatgtaacacaaattagggttcccccaaacaccaagtctccttcccattctctcataaaagtacctagagaattccaactctccgctgatgttatttccattcacgtaaagcgcgctgagactaggc

SEQ ID NO: 128882 - DNA, 311 bp, Arabidopsis thaliana columbia
gtaatctaaacatccaatatatagccttgaggaattggcaacattttgacataaaggggggatactttgggctaaaaaagaccagagacagagagggagaaaggatgaaaattatttagctacaagaaggaaagattgaaggaaggacgtggcctttgggttagattcttttgatatccttcattccaaattatgaatggcctaaaaaaggctcttctttttttttttcctccttggattcaactgctccctaaaaagtctttggatgggctcttgaccttttaaaaaaaagcctccttgtctggtttgaa

SEQ ID NO: 128883 - DNA, 347 bp, Arabidopsis thaliana columbia
atccagcttgccatttattacttcccggcggcattattcaaaagggtatgcttcttcgtgctctgcttcagtttcaatcggctgtgtatgaatgaagtgcaattctatctgttgcagcagtgaatttctgggatattgaatttcggagtgacgagtggtgttccaaagagatctcacgaagcgggtgttactcatccatcttcttcttcatcagtagcaaaataccctcacggaggattctggatcttaccctacatcgccgcatcagcctgtgactccaccaccgcctcaggatcatcataaccatcaacagccccatcagcatccccaatctcaatctcaatctc

SEQ ID NO: 128884 - DNA, 498 bp, Arabidopsis thaliana columbia
ggatattgaaagaattgaaggagttgcaaagagaccctcctgtttctttcagtgcaggtccaacaggagaagatatgttccactggcaagctactataatgggtccgaatgaaagtccttactccggaggtgttttccttgtcaatattcatttccctcctgattatccttttaaacctcccaaggttgtattcagaaccaaagtgtttcacgcaaacatcaacagtaatggaaacatatgtttggacattctcaaagaccaatggagccctgcccttaccatttctaaggtttgaaattctatatatgtatttagttatttgtcaatattttctataattccatatatcagatttggtatataaccaagaagctccaataggtaacacatattactaacattttggtattataggggcttctctctatatgctctcttctaacagatccaaaccctgtcgaccctttggtgccagagatagctcacatatacaaaac

SEQ ID NO: 128885 - DNA, 393 bp, Arabidopsis thaliana columbia
ggtcgtctccgtcgcgtcctccgtatgagttcttctcaagggtcactttttctaaatctgtccctaaatgggatagtcgccttaagtgcaatctgtactactaccgaacaaactatttcatcatgatcgccgttatacttggattgggagtccttacaaggcctttagcgatcttcgctgccctttagacagcattaaatttggcattgctaaatgacagctctgcaggttcttttagtgagaaggcgacacgaaccgtcagaagattctctccacagttcgctgctaaaatgagacctcctttgacacctgtcactcgtgggcgtccatcatcaaagagagcaatccatgtatgtggccaaccccgttgggatgttgtcttgacatgctcac

SEQ ID NO: 128886 - DNA, 278 bp, Arabidopsis thaliana columbia
atggtatatgtttttatactagacatatgaacatatatattctagggaacacagaaaaaaaaacacaaaaaaaaatcattatattgaaatgtttttaaactaactcaactcactaaaagtattggtgttagtaaatgaacgatgaggattaatctaatcaaccaaacaaaagaattattaacgggtacaatctctactttccttggcgatttcaataaaacgaagacgaccatgatgtatcacatccctctgcttttctcctccctccggggaatttc

SEQ ID NO: 128887 - DNA, 440 bp, Arabidopsis thaliana columbia
gaagctgaagatatttgaaattaatgttttgtggtggggcatatcctaaagatttttaatacaaatagtgaatcatgtaacaacagtagatgatgtagcataataccctaatcttcgttctataaaattgaccaaataaaaggaaagcaaaatgttaggaagaaacaagaaaaacccactaaactctcaagtgtacaaccaaaagactctgctttaaaaaaaaaaagtaaaggaaaaagaaagagcttccgtgtgtgacactttccaactcaactcactcctatctctggcgacgatgactcactatctgccactgactttgatgatgacaagagacgcagcctctggacacgcggcgggagatgcttggctggttttcttgacactggcggtgtccacggcaagaaaactccagtgccagcgtctagcctcttgggcgc

SEQ ID NO: 128888 - DNA, 432 bp, Arabidopsis thaliana columbia
tgctgtcgagaagcgtatcacgtcgccattgctggaaccgagcagtgtggagaagattatggaaattgatgaccatattggttgtgctatgagcggtttaattgctgacgcgcgcacacttgttgagcatgctagagttgaaactcaaaaccatagattctcgtatggtgagccgatgactgtagagtccacaacacaagcactgtgtgatctggctttacggtttggtgaaggagaggaagaatcaatgtctcggccgtttggagtatctcttctcattgctggccatgatgaaaatggaccaagcttgtactacactgatccttcaggaacattctggcagtgcaatgcaaaggcaattggttcaggttctgaaggagctgatagctctctttaagagcaattcacaaagatttgtctctaaagaagctg

SEQ ID NO: 128889 - DNA, 385 bp, Arabidopsis thaliana columbia
tgctgtcgagaagcgtatcacgtcgccattgctggaaccgagtattttggagaagattatggaaattgatgaccatattggttgtgctatgagcggtttaattgctgacgcgcgcacacttgttgagcatgctagagttgaaactcaaaaccatagattctggtatggtgagccgatgactgtagagtccacaacacaagcactgtgtgatctggctttacggtttggtgaaggagaggaagaatcaatgtctcggccgttaggagtatctcttctcattgctggccatgatgaaaaaggactcaagcttgtactacactgatccttcaggaacattctggcagtgcaatgcaaaggcaattggttcaggttctgaaggagctga

SEQ ID NO: 128890 - DNA, 168 bp, Arabidopsis thaliana columbia
gggataggcggccaaatttaaattttgttctttggttcttatgtttgaattggaattgattcgtgaaattgtgtttgtatgatggggtttttggtggatccgcaaaaggagggaggtgaacattcatggggttactttagaagtttggttagaaggaaacatttccac

SEQ ID NO: 128891 - DNA, 257 bp, Arabidopsis thaliana columbia
agcaagtgaactatcctgttttttttttgaaagaaaaatcctcctcaaaagtaaagacctgcaaaatccaaagtcagagagagggatagagagatcgatagagatgggactgttttacagcataaatgtttttatttgatgataccactccattgttgggcttagcgattcacctgcaacatggcattaatagggtccgccctcaaacttacgggacataaagaacttgtaatccctgtgggagaagccgccttttc

SEQ ID NO: 128892 - DNA, 390 bp, Arabidopsis thaliana columbia
gaataaaaaggttcacccttcactttataagttatatttcggtaatgaagatcccaaaagggaatttcaaatacaaagtaaactcaaaactcagaaagaaaaaaaaagaaccattacattatgatctgaaactctcacaagtctgcgttcttttatgttttaatgtttgtagtcccttcaaacttctgcgtaacatttctgacctcctcaaggcaactttcaagctccttcaattcttcagtctcaccaaagctctttctagcttgtttgattgtgttcttcaaatgcatctcagcactaaacagttctcgtttgctttctacagacgctgagatctctatgtacactctacaaagttccaatgatgctcttgcaaacttcttgaaacgc

SEQ ID NO: 128893 - DNA, 353 bp, Arabidopsis thaliana columbia
aaataaaattagtacatattttttaaattgggaaattacaacttatagtacagaagtaaaacatatacaacaccaagaatccaattcgaatatggaagggtatataattacgaaccaaacacattagaattcctccttttccatctcctgtactcacacactttagaaagtttacttttcaagcattttatttttttcatactaataacataatataattacgtataaaacacaatattgcatgcatgcaatattcttcattcagtcgtcgccaccaccatatcctccaccatatccaccgccttcaccggatccttctccgataccggatccacctcctccacctctacccc

SEQ ID NO: 128894 - DNA, 459 bp, Arabidopsis thaliana columbia
ctgattatatccttattgtatatacgcaatagcagatgtaagagttacatatggattgacaaatgttgacgagcccctccaaaatcatatcactgagaaacaaagagcaaaaaaagaaacacaattgaagaaagtaatttaccatttgactgcccctcttttccaagggaatacagatgcagatagcttccgtctcatacggctctccagtcatcttcaaaactcataactccaagaaacgaatagatgacatcttaactatgacttgacctttgcttcccccattaaatgaataattgatccgatacaagagactctcatcaccaagatgggtcatttggctcactcagaagcttccgtaactggctgtttggaaccaacatcttcatcttctgcaggtcgggaactagaattgtcaccttctctcttaggaatttgcttcatcaattcaatatcttt

SEQ ID NO: 128895 - DNA, 450 bp, Arabidopsis thaliana columbia
tcactgagaaagagcaacaagagcttgtttttttagttgatgtccctctagaccgggatttcgagcttgtcgtggctacttacgccaggctttgcaaatacatagttggtgatttattgagagtgactggtttcaagaacaaagcgcctcaattcagtttcatatgtcgcaaaaatgtggtcttgagcatatattccgacaagaccgacgaggttgagctttacaacgcggtgaagaacgcagtgacacaccttgtcccatttgatgcctcactctctgagtacacgagctatgcagacacaagttccatcccaggccattatgtcctgttttgggagctatgtttggatggaaacacaccgatccctccttcggtcttcgaggactgctgcttagctgtagaagagtcattcaacactgtttatagacaaggaagggttagtgacaagt

SEQ ID NO: 128896 - DNA, 387 bp, Arabidopsis thaliana columbia
attgtacaagcaataagaataaactgataggtaaaatgtagccaaatagcattacagagaatctctacgcacgtttttgtgatccgatatagggagaaacaagtttttcgagatataaatatagcagagtagaagcaaagtgatcaatcagaatatgaatacgttttggtgccgtgttgtttctgttctctgttttttttttcttctctataacctgggcaaatggcgtggagtgtcccattccgtgacaatgtggttacgggtgatttcactgagtgaccggcacccacttagtgccatggttagctcgaactcatcacgcaacatttgaagcacctttttgactccggcttctccttcagcagctagtgcaaaaaccactggtct

SEQ ID NO: 128897 - DNA, 452 bp, Arabidopsis thaliana columbia
gtaaaatactcactttatcatcaaatctttataattgtacatactaatggatttaaaaataagaggagaaataatttacgacgaaattggatttggaactaatcaagttttcgaggtccatccatgtttgcgtcgctccaacgtattcaccatttttaatttgtgttttaatcttctctgctaagctattagagctatccaagccattgtcatcaagcctagagacatgcttgagaagaggtccccatgaaaacacaaaatcttcaggggatatccaactatctcccaaaatcactcctccaagatgaagcttcaatttgccagattgaactgcgtcaataaccgataaaccgagcttaaccgcgattttgccaccataagattcagcaacaatgaagagagggctttggtttaaagtctggtttttgttgaagagttgttgcaacagtttg

SEQ ID NO: 128898 - DNA, 371 bp, Arabidopsis thaliana columbia
cccccttgaaaagggctcccccttttttgttctctatctccatggggggaagaaaaaaattttcagtataaacttttgaaatagggggtaccatcaagttaaaaaactttcctagcaaaaaataatgtttaggaaaagtctccgcatttgtttcagggccaaaaaaaagattcaaagatcaaaaaaactttgccgccaaatccccagagaaaaagctttaaggaaaacaaaaaattcgttataaaattgaccttttttggggatgaaacggtttttcttgatagctttttcaacgaacactcaagccttgaatagctgcaccaaatgatgatgatgcctgaaaaccttcctccgttaccttattcgattcg

SEQ ID NO: 128899 - DNA, 289 bp, Arabidopsis thaliana columbia
gggtaattcgccgggccaatatttttccaggaaaaaggaaaaaaatgggtaaaattacatttaaaaccctagactaactttgaaaaaaccgaccccgttttgcattaaacaaaaagggtaagcaacttgggcgttttttctcctccgttaccggacacataacccttgtcacaaaacgccggcgtagtcgtcgtcgtcccggagtcctttgagttcattgacggggttactgatcgccgccgggtaaaaaaaggggttgtttgcttaatgggaaaattaggggtgagag

SEQ ID NO: 128900 - DNA, 340 bp, Arabidopsis thaliana columbia
ggggacaacccccctgggttttacattgggggccaaaaattttttggcaaagggattttttaaacaaaaaattacttttttccccccccatagggggtttaaaccccttttggttttccctttcacaccccccgggggggggaaatttttaaaccacaaaagttttttttttacggggaccctcccacttttcaaaaaaaggcccctgggctttttttaaaaaacggtttttttataaaccccttgggtgccccttggggatcttttatgcctttgaaaaaaaccccccttttttgggttgaaattacctttcaaaattcatttttttggaaaagggaaa

SEQ ID NO: 128901 - DNA, 490 bp, Arabidopsis thaliana columbia
gtagaagaaagtcatcgttaattagtccatagaacctttataacacaaatgattccaaaatctttccatacactaattaatgtttccattcatcatatattttcgcttagaatttctaatccgttttttatggtaagtaatataataaatacgaccataatgtaaaaatgttagatgcatctaatcagaagaagagatccaagataattccaccataccttcacttctcacggccgatagattattctcggatccagaagcaccaggttgtgtgtaaccatcggatctttggaccatgggttgatcattaccattgatggatcttagcatattattatcattttcggcttcagtactcttttctggtccatggatagtatttagggttggctgtgtcatcgacgatgaagaagagacgataatgttgtgaagcccctcaaagtttgttccaacgtccacgtgtccaaaaccattactcattctcaagctc

SEQ ID NO: 128902 - DNA, 352 bp, Arabidopsis thaliana columbia
cgctaaaactatctcttataaatttagagtttttgagttaatcgattacaaagtacaaacacgaatttaataaaagaatatttgaattgataaaccaaatatgagaggaagaatacaatgaatcaacgtgtgtggtggctttaacatttcgtgggaacccgagtttttattggctttaacttcaaaccaagactctctggtgatagaagctctggcgaaatacatgacggacttagtggactccgggggctatcgctaacccgaccaggccgatacaatccaaaccccatgaaaaagaactccattggtatcaacattgcatgtggttgctcttctgtcaccattgatccac

SEQ ID NO: 128903 - DNA, 451 bp, Arabidopsis thaliana columbia
aaatagagaaacattacaagaagctaaaaagtggagtcgtaactcctacaaagcaaggaaattatggaaattaagtggagaagatggtttcctcaacaagaggaggaagagccagtcatctcttactttgaaacagaaaaacttaaaagtatgagactgtattttccggtttggtactctgcttctgtttgatgttctgcgccgtggtgcttcggttccatcaaaacatcgatgaagtttattatccagtaccagtgatcttctccaaaacgtgaagtctcgcctctttgataattttgctatatttagccacagtttcaccaacctccgtgattttcgttgttaatgtcttcacatcatcctcgaggctttccatgtctagtttcacgtccacctcatctccttcactcccaatagcatcatccacagtttgcaacagagacgagatctg

SEQ ID NO: 128904 - DNA, 197 bp, Arabidopsis thaliana columbia
gccaaacaaagatcccacttatttgggttttttactgggggcaaatagtgtaaggcactgtttccactatcctttcaccttttggggttacaacttgtaacttacaagttcagggcttgcaggacaatgagactatcacacatccaattttagattaaacccacatgctgagatccatcagtcgtaccaattttttt

SEQ ID NO: 128905 - DNA, 169 bp, Arabidopsis thaliana columbia
ggaaaacgacgtcgtttcattcgtgtgggacaactactaattatgcatagatggctgcttactttcacggaaacccaccggagatctctgccggatccgacggtggtcttcaaacgttgatcctcatgaatccaacttcttacgttcagtacacccaactggacaacga

SEQ ID NO: 128906 - DNA, 219 bp, Arabidopsis thaliana columbia
ggaatggtagattaagcattgtttattgggattatatatcaataacaatgattaggttaatacaaattagaatacatgggggatgatacaatacaaatacattgcaagtttacatattattccttcacttatattatactttggaaaatctccagtagaagctaaagctctctggcattattcttcttttaagccaagtttatatgattctttttttac

SEQ ID NO: 128907 - DNA, 416 bp, Arabidopsis thaliana columbia
aacaattatcaaaaagataaacagtttcaataagcatttttttccaaggcaacgtagcagtactaaaatgtcagtcaaatttctcccaatcttgagttacattggccgaaggcgaagctggcggaggagggttcaagcttccgacaccgtttccgaacgattcccactcagtgcttacagctgcagctttgctctgatccacaaacgggtttgaaacatcttgccttcaacttatccacagcctcctgcaagttttggattctacgtacctcagccttacgctgtactttagcgtccccttcagcctcaatgccatccaatttgagcagctgcctcataagaagctctgcagccatgtcaaactcccgcaccgcaacttgcgtccctccattcacagcaacttctaaagcaacaac

SEQ ID NO: 128908 - DNA, 132 bp, Arabidopsis thaliana columbia
gatagtgataacgaaatcctaattccatggccgacaacttttgttcagtgagttacggtatcttattcgagcggacgtcaaacaatggacctcttaacgccgttaataaaccaccgtctaaagatcgacaca

SEQ ID NO: 128909 - DNA, 378 bp, Arabidopsis thaliana columbia
atcttagaataatatattgacaaaaactcagttactcaacaacacagaacaactcgaatcaaagcaacttcataacattattttagttagatacttggttcaaagtcacaacaatacaacaacagactagtttctgtaaagcaacaggtttagttgagaagtagagaatacacaaagtcaagttaggtcaacttgaaaccaccaccaccaccaggtttgtgcagctgataagtctggcttggcacaacttgaatcacacctggttgttttgatatctcagcgacttgctcaggagtgagcttagctgaaaaaccagaagcagcttccttgtaactgtaaatcaaagcatcttttgcagcttcctcactgccgagagca

SEQ ID NO: 128910 - DNA, 434 bp, Arabidopsis thaliana columbia
ggcttacaacaacaaatcttaaacgttttactttgtgctgcactactcaacctcaatggccgcctcaacaatggctctctcctcccctgccttcgccggtaaggccgtcaagctttcccccgcggcatctgaagtccttggaagcggccgtgtgacaatgaggaagactgttgccaagccaaagggcccatcaggcagcccatggtacggatctgaccgtgtcaagtacttgggtccattctctggcgaatcaccgagctaccttaccggagagttccccggagactacggatgggacaccgccggactttcagctgaccccgagacattcgcaaggaaccgtgaactagaagttatccacagcaggtgggccatgctcggagccctaggctgcgtcttccctgagcttttggctagaaacggagtcaagttcg

SEQ ID NO: 128911 - DNA, 362 bp, Arabidopsis thaliana columbia
ggggaaaaaaaccggttttttggtttatgaaaaaaaacccaagggttggaaattttccctttaaacaaggttttttttttcttttccccccccgaagccaaggcgggggccaaatcccaaaaaaactggggtccctttccgggaacaaagttgggggggaaggcccccgccttgttgttaaccgggcccgcccaaggggcaaaaggggtttttttgggccccttccccgggaccaggggtttaaccaaaaatcccaaccttgggaaccttgccccttttccggttttgggccccttcccctttaactaaaaaaatgcccttggggggggggcccaaccccagggggccaaaccccccccggg

SEQ ID NO: 128912 - DNA, 399 bp, Arabidopsis thaliana columbia
tctttttttttttttttttttttatataagccgtaaaaattccaattaattgggttatgtgagacaactccatgttttccagtagtctatagttttctgaggcttccaggttcaggagaagacaaaactaatgtacctctagattattcttcttctgtatattgaagagcagcaacaaatctcaggtttttttgagatgcatttctgttactctactccattggaccagaagatgttccctcctcttcaccatcgaattcttgctcaacacctttgacctcggaaacataatgcataagcatattctcaattccggatttcaaagtaacagatgaacttggacaaccgatacaagctccttgcattctaagcttcactataccagtttccgtatcgaat

SEQ ID NO: 128913 - DNA, 438 bp, Arabidopsis thaliana columbia
aaatgagaaaaatgaatattactattcaacgtaacgtagtattggtttcatacaaaaggtaaaacgacgtaaaatgaggattctacattttacaatcatcttatactggaaaggcttttgcctatatgtattacggcatgttaatctcgatattagaacacttgcatttgcgccttttcttctttataccaaccagcaagaaagaatgtaaagatttcatactcaggaagccaccattaactcggtttagcttgttgaatctgctggagaagtgcagctgctagctgtaatgttgcttgaagacgcttctgtggattagcctctgtttcttcttgttgttggctgttgctactttgtatctgtacattttgattttgtggagttaccaattgaggtatgcttggtgtctgcgcatgttgcaaatggctgaaacttgct

SEQ ID NO: 128914 - DNA, 377 bp, Arabidopsis thaliana columbia
ccctcctggattaagtctttagcgtatccatgacaatgaaactaaaacaagtgaagttaacatcttaattttgtagcaaacagcaataacatccaaatctacgttaagttccacagcaaatatacaaaaaactgtgctaggatttgtgaagacgtgaacttgatgtaaagaggcaattataagccacaaagggcatggcacgttaccggtgcatcaaacaagtcctgctttgaacacatttggaggagattgaccaatcgttcagccagagcatcaaggttttggaacaagaaatctttgacctgatgtgtgtaaactgtagcttaaaactcggtgtcaaaacaagtcatgaagatctttgagaccatggttcttgc

SEQ ID NO: 128915 - DNA, 328 bp, Arabidopsis thaliana columbia
gagagtaaagaattttttattgggttttactggaaattatatctcgaaaaacaaaaggggtacacacggagataaattttacagaagtggaacagataatgatacacagttcacacagtaacgaagcagaacgacttcaatgacaagacgaaaacccaggatgtgataatagttcatatttcttcttcaaacaggtaacaagcccgacccgtatgcgaatacagctcggatctgttttgtggaggttcttctacaccaggaacatgcataccagggggatgctgatacatttgaaccggaccgggtggggtcatgtccataataaccc

SEQ ID NO: 128916 - DNA, 405 bp, Arabidopsis thaliana columbia
  unsure (1)..(405): unsure at all n locations
tttnttttttttttttttttttttttttttttttttttttttttttttttttttttttttttttttttttttttttgggttaaagggcccttttttttaaaaccaaactcccagggggcggggcttccccaacttggcgagattccctttttcccaagcgaaaaagggcccttaatttcccaatttattggggccctttttccccaaaatggtgaatgaccaattggggaaaaaaaaaaacttattggggggctaaaccaaaattttaacatgccctttgaacatttccccccttggccccggggaattcaaaggcccaagccccaccccgggggcgcaccggaaaacaatctttgggctttaaacggggccttttaaaggacccttaaaaaaaaaaactccaaa

SEQ ID NO: 128917 - DNA, 334 bp, Arabidopsis thaliana columbia
caaaaaaaggggcctataaagcccatttttttcaaatgggcctcattgtccaaaagcaaaagagggcaccccataaaaaaaacgacgagcttggcccattgcccagtttttaacttgacaaacaatccagaaaaagctccttgaatcacgagcttgaccctcgtaaatggggcccccatgaccaaaacaaaatgattcccagtaactcctgattaaaaagctctggcttaaggggaacaaagtctaaaactagagagagcaaaaagatcctggggaccaacaataatcaattagctaaattagatccatggccctttgcaaatgaacaaaaatc

SEQ ID NO: 128918 - DNA, 359 bp, Arabidopsis thaliana columbia
catcaaaggaaagtagaaaagctttatttcatgcaaattaacaagagtaacaaaatacttaaatacatatataggataacatcataaaacgaaaaagatagcaataacacaagttacacaactgataaaaaacagggaacaatgatgtttctgtagaagataaaaacgactttaattccattgtttctacataagctcgagcatgtttgctttgcctggaggacgttccatcatgcggttttgctgttgctgttgctaaggtaaaagaatggtatttagaatcgataaattggacgaaagcgcaatgccacaaaatttcttggtgacagttaaaaacttcgacatattgagtaccattt

SEQ ID NO: 128919 - DNA, 107 bp, Arabidopsis thaliana columbia
agataatattattgttatatgaccttatatccatgaaattacaagacactgaagacgcatcgccgccgtcaacttacaagcaccatcccaaatggtggaaatcaacg

SEQ ID NO: 128920 - DNA, 304 bp, Arabidopsis thaliana columbia
aggaagggactggtccctcaatatcataaagctttttaaatttttcacccccctcccaaggaatttacaagaaatgaaatctggctcacatttccaagaggcaacaaaccgggtacccccaactggatcacaaattaaactccctttccggggaccaagttggtagcgaaggcccctgccttggtggtgactggaacaacccagggggccgggggggtttccaacgggccctttccggggacaatggcctgaacgaaaaatcccaaccttgggaacattgccaaccttccgtttttgagctcct

SEQ ID NO: 128921 - DNA, 412 bp, Arabidopsis thaliana columbia
acagtaactaaaatattatcatttcataatatgatacacatttgcattatgattttacaaaaggtatcaactacatatacccctttcccttacaatagcctaacttgaaaagtaagaaattgcctacaagcaataaagatagaaggctataataatatatccccaaatcgataaaagttccccatttttcttgttcatataatctcttttactaaaagaaaagatttgtgatgaacaagatcaatctataagaggatcttgtacaatgttccattataggttagggatgtacatattatatctatatatgcacctatagttatgaatattctcgttttattaaaaagactactaaatgtacttcattgccccttgcacgtttattgctgcatctgtttccactccaccaacc

SEQ ID NO: 128922 - DNA, 545 bp, Arabidopsis thaliana columbia
gctagagaaagaaaatatatgtaaaaaaaaatgcaaacacaaattaccctttattattattaggtggtttggtaacaaaggaaaaacatggagcttcaagttcctatagtttgagaaatctaactagggtaccacttggttgaggaaatgccctcgagttgaacttcaaccttcaacatatcattcacaacaaaaccctttgatgaatctctgagatcagctagagggataatctgaaagtcgcccgagtaataaaaccaagaagtgtaccaattactaacttgtatttcgacgttattgagtttgcgttggttaagaactcgaagcttggctcgaacataaatcatctcaaagggtttgaatttatcgttaatgttaagatacagcgacatggcttttccctttgaaagattacgaccattcggaaacacttgtaaatacatgcttcttcctccaatggagaacacatcggattggtaactttctttgagcagcgtcgagaatctcaggagtgcataagtgaatattgggttatcgaatttctc

SEQ ID NO: 128923 - DNA, 323 bp, Arabidopsis thaliana columbia
acttgaaccagcctatgctcggggctgaaagaatcaaaagatcgaatctttcttaatttagataactcaaaatgacgagctgattctcaaagcataaacctttgtatacagacaccaaactaaagttgaatgtctccgaagagattcggattaatcgacataatatgcttctctgcattgttcttagctcatgagagatctcaagcaccaattgttgctgaatcttttccacaatatcagacacaacaccttcagattcaccaccaaaatccaaccaaagacatggctttattagatcagtttccatgatctgatccaatgat

SEQ ID NO: 128924 - DNA, 321 bp, Arabidopsis thaliana columbia
ggagagttataaagcttttattgattgccaagaacaggttgacatattggatatattggaaaatttacaattacatggacatgattggggaggtaggaagggcgagccaaaggaggagccgttgtggcctattgaggtatcgagcttgccacgctggctcagcggtctcttgctcaaacccacttttcatgtatagactcttcgctgcttcattgtctaccgtcacatgcacgtacatatccgttatgccccattctccagcaactctcttagacttgtcaataagtttgtaaccaactccattacgatgcagtttttttg

SEQ ID NO: 128925 - DNA, 455 bp, Arabidopsis thaliana columbia
aaacgaaataaaccatacgaataatttaaatgtatatatgtacaagttaatcacaaagaaacataaccccaatgacagccttttttctcaagctaaaaactaggtaagcaatcaccgaactaaagtccaatgcctaataaacctaatgatcttatgtacatgtatattatatacgaactaattacacgattaaaaacactagacgagtaatcaatatgccactcttcaatcacaattaacaaataaccttttcccaaatttagctagtatataaatcttcccagaagatcaagtcatcaagaccatcacacgctgacttgctaccatccatcattgccggattcatcatcattggataagaagatatctctggcgttgcggttgtgttcacatcggaactcaaaccggtttcttgagacacactcacaagagaatgctccaacttgatcatacct

SEQ ID NO: 128926 - DNA, 425 bp, Arabidopsis thaliana columbia
tctttttttttttttttttaccacataaggcagcgaccaaaattgacattatcgggaaagagaaaccgttttttggggaacaaatagacttgaaaccatatcatccggaaacacaaccatacaggtatgaaaaccggctactccgaagaccctggggctataacttcacaacagtccaaccattcatcccaagtaaccaaaagcctcagtcccttgtaaggtgtaaacgggtttaaacatcagcctcaggctacaaccggatacgatgaacatgttgcaacaccacacatgttctttcccatttccatcttgaagtagccattgtctccccattcacctccccatgagttctttataagccagtacgggacgtcgtcttcaactccataaccaactgctaacactgcatggtttacatccattgg

SEQ ID NO: 128927 - DNA, 139 bp, Arabidopsis thaliana columbia
  unsure (1)..(139): unsure at all n locations
ancatgtaaatgttggcttaggcccaacaaaaatatatgacgatggacaggaataaactccatacagtcatcatcactctccatataggcccacacctggaacattaaattctttttattattgacagagatcatcaca

SEQ ID NO: 128928 - DNA, 306 bp, Arabidopsis thaliana columbia
aacaaaaaaaaaacccaaaaatgggtttatgtttatttcaacccctttgtttttaagggttcggcaaaattaaaaaaaagggggtcccttttaaaagcttcaagggggggaccctttttgggaggctcaaaggaagggaaatttttgaatttcttccccgggttggcccatacaattgccaaattttttttgctcacccccgcgggggttttgccttttccggggggggttttaccttcccccccggggattttgttttttattttgtaaacaataccttttttgggccccccccttttgggcccc

SEQ ID NO: 128929 - DNA, 322 bp, Arabidopsis thaliana columbia
agatatgaaagtttggtagtttatacaaggtgcggagacaacagtgttaacagacccaatctcaatgcaagaagaaaagaagtgcagaaattgatactttcaggaaatacgatttcagcagaagctgttctccatgaatttcacaaatccataaaaatcgattcttccgtctttacttccatggaatgatctgatcattctcctgcagttctcaaggttagatccttgctttaagccaaggattgtcaaaactctctgcaaatctataggatcgataaacccatctctgttttcatcaaagacatcaaaagcttgcttcact

SEQ ID NO: 128930 - DNA, 320 bp, Arabidopsis thaliana columbia
cttggggaaaagccgaaattttattaaaataaggggctcccggccttgacagaggcaaaacatttttatgttccccttacaaaaatgagtaacttttcccaaaaagggttcaacaaaagacgtttgaaacccacccaagaaaaaaccaaacccgaacgttttttttaattaaagcaaatgatcaaactcgggtttttttttccttgtaaaaaaaaaaaccactttgcttttaaaagctccatttagggggttccacaggtttgcggaatttgactcccacgtaaattgcctttgaacccaactcctccttaatacccaaa

SEQ ID NO: 128931 - DNA, 449 bp, Arabidopsis thaliana columbia
aatgaaaggtacaagtggggtttgcttttacatgactggacgacctatcctgacattcctcacacacacatgggaacacgcctgaatggagcataaaacctgttgactaccacaaacattcgacaccatcatgacgaacttaacgacactagaccactctaaaccggaaacaaagtaaacacggaacacttggagaaaataactttttcaactataaatggctgacgacccagggaaccacttcttgccagaggatcgaagttgcccaaacgagggataacaaaagacacatcaagcttgtcttcatcaaccttcatgcaatcttcatcgctccattcacacacaatcctcatcatcatcatcatcaccatattgataattatgatattggataatgatgatgatgatgatgatgatcatttacgcaacacccactcacgaacatttac

SEQ ID NO: 128932 - DNA, 333 bp, Arabidopsis thaliana columbia
acgaccaggtcaagctggatccgaccggcgactaccgccgccgcacgttcggcgccaccaacctgtctgccgccggcatctggaagctcaacgatgcagttgacctgcgcatcggcgtggacagctccgagcgtgctccgaccaatgaagagctgtacgccgccggcgcgcacatcgccacccgctccctggaaatcggcgatgccaacctgaagaccgagcgcggccagcgcatcgagctcggcatccatacccacagtgatcgcctggacttctccgcgtcggtctaccagaccaggttcaaggacttcatctatctggccgacaccggca

SEQ ID NO: 128933 - DNA, 271 bp, Arabidopsis thaliana columbia
tccttttttttttttttttttttttttttttttttttggtggaatcttttttacatttcttgtttgttttttctttttttttaaaggggaagggaaggttttatcactgtctcctaaaaaaaactgtaagttcaacaattaccccctttttcttggggagcaaataaaaaagcggtgggaaacaaaaatcccaaatacttattccttttgggaaaaatctaaacttgaattagggaaaaaaaagcttaagcccgttctccacaaatttttt

SEQ ID NO: 128934 - DNA, 208 bp, Arabidopsis thaliana columbia
agaaggaaacggttgtgtcaaccattttgtcagcagttgaccatagaacgaaagactaaaatagaacgagagagataaaatgagtatttatccccataaagtaaaaatcagatatttaacccacacgcatccaaacgataataacgtagggcagatgccgtgacaaaacacacaaatttgctcttaagagtttcatgtttcttcattc

SEQ ID NO: 128935 - DNA, 276 bp, Arabidopsis thaliana columbia
aaagcaaattttttaaaggggtataaatccttcaacccccgggggaacaaagggcaaacttggaaaaaaagacccccaaaaaaaactaaaccgcccccggggggaaagggcctttttcttggaaattggaaaacgggaaaacccctaagggccctggggcccccgggggaaaaaaaagcgggattttaatcctgggtttggggcctttaaaccctttgataaagggggtaaatcctaacaaccaaattggggacggggtccaaaatccagtaaaaa

SEQ ID NO: 128936 - DNA, 495 bp, Arabidopsis thaliana columbia
ttctttttttttttttttgaaacaattaattttattttttttggtttttataatttggtttctattacaacatatttacgaaattcatcgtactattaacacaaatgtgtctttctcaaaatataaactatttcgatatatcaaaacggtccaaacattcctatctatgacaattacttgatatatcattctacatagtatattagattacgatgtacaggctgatttagttcctcttacacatgtacccatcaccgcaaactgagattacgccacgtgtaactcgctactcttgacgaggatctcccataaccggtggatctctgagaagacatcgtcggtgggaagctgaaacctgcagaacggacacgtgttcttcttgcttagccacggcaagatacacttccagtgaaagaaatgctgacatggcatttcacacacatctcttccttagctcatctcttccttgcatatcacgcattctacttctccggc

SEQ ID NO: 128937 - DNA, 502 bp, Arabidopsis thaliana columbia
ctggagagttacaactaaataaatttctttcttatatcattgcaacgtagttcatatcagagcctggactgaataatacttacataaaaactagagaatcacctggtggaggaagatgtggtggttaaagatctgtctgaagtgttgtctatgatgctgcgctgtaactaattgtgcctatgttccggtgtgctgctactgcaaccgctgcagctcctgctggaccaaactgtgattgtgcctgcaacagcttagcatcaatggccatatgtgtgttgttgtttaattgatctgtcttcgggagctgtggttgaaagtaagggtttgggtggttcatagtctcaacgtctgcttggttagttgtagcagctggtggctcagtgggactgaattggtggacaggattttgtggctttggtggaaaagacgaagcttctatgttgcggttctccgggtttgtcatggtgtttggtcggaagtagcaatgaggagatgaaaccgc

SEQ ID NO: 128938 - DNA, 190 bp, Arabidopsis thaliana columbia
gaagaaaatacctttcaagggttggatatgtatagcttataattagtatctctgcaaatgaagcgggagcaatgaagctcctaacacaacagaccagatttagaataaatttttataaggaaaaacagactccacacagcctttgctatgacacaccaaatcactactcatcaccttaataaaacatata

SEQ ID NO: 128939 - DNA, 521 bp, Arabidopsis thaliana columbia
gagatcaaacaatacatactactgatttatatttaaccatcacttgtttttgtttctttttgcacatattttattgagtttttgagcaaacaccaaatccaaaataatttagaagagaaactaaagaaagaaagtcatcatcttttttcttcttatggactagtctctttagttaatatccacttgaggaactataccaccagcttgaatgatctgtttctcaagattgaacatatcttgaagctttgtctttaacgccttgtactcaatatccacttgctgcaaacatctcacacacccttcgtagttcttagcttcacaacattccttgaagctaacacacaaagttttgaccctcttggcaccaacacttgagctactacccttcaattgatgcacactagcacctacctgactaaaatctacagttcctgtcgtgtccaaagctctagccatgttactgataagcttcacacaatctttaaagaaaagtgaaagcacttcagacacaaaatcaggac

SEQ ID NO: 128940 - DNA, 559 bp, Arabidopsis thaliana columbia
tcaaagtccaaacaaaaaaatcctctcccaatctccgcttcactcttttcatggacgctctcattgctcagcttcagagacaatttcgtgattacaccatttctctctaccaacaggggtttttggatgatcaatttactgagttgaaaaagctacaagatgatggaagtcctgattttgtgtctgaagtgctttcacttttctttgaagattgtgtgaagcttatcagtaacatggctagagctttggacacgacaggaactgtagattttagtcaggtaggtgctagtgtgcatcaattgaagggtagtagctcaagtgttggtgccaagagggtcaaaactttgtgtgttagcttcaaggaatgttgtgaagctaagaactacgaagggtgtgtgagatgtttgcagcaagtggatattgagtacaaggcgttaaagacaaagcttcaagatatgttcaatcttgagaaacagatcattcaagctggtggtatagtttcttaagtggatattaactaaagagactagtccataagaagaaaaagatgatgactttc

SEQ ID NO: 128941 - DNA, 131 bp, Arabidopsis thaliana columbia
acttcagctgccgagtcttctcctctctctctatcgctcaagtggtttctgcttcgctggttttgtcttccttcgacgactcacttttgcagattctcataaattcttcaaagctttgagtcttttttcag

SEQ ID NO: 128942 - DNA, 308 bp, Arabidopsis thaliana columbia
cttcaccggagaatcacgacaccatcaaattctacggcgacatctaaggggcaatgcatcatcaaaatgcttaatggactggtggtcgctactcctgcttaattattactatagccggtgaaaatgggaggccgctggagatcttcgaggaagacacatcttgttggaacacctgcttactattatggagcaaaatcttttgaagagcttgagcctttacgaacccgtgctggtgcgggatcagcatacaccacaggcctctagggtgatataggttgggagacatctatacctgacaccttttgtgc

SEQ ID NO: 128943 - DNA, 332 bp, Arabidopsis thaliana columbia
aaaaaaaaaaaaaaagtttttttaaaaaaaaaaatcccggggggtcttttttttgccccttggggactcaaacccggggtttaaggattaaaatttgttttcaaacaatttttttttccttctaaggctttttggggggagtttccccggggggaaaaggggtaaaacattttttttttttttccctcccccaccctaaaaaaccattttgtttaaaccggttttggcccttgggcttctgggggggggacaaagcttgataaaaatttttttagggcggccagggtttccacaaaaaggcttaaaccggggcggggtttttcctccccccc

SEQ ID NO: 128944 - DNA, 436 bp, Arabidopsis thaliana columbia
agaaaaaaagaggaagcttttttttattgcaagaaatgtttcacaagaaaacagagtgtatagtggttatctagactggaagttgagagtcttgatgcaaaatgcgaagatgaaggcaaaaaagacagtgaagccaactagtactccggccacaggtcccatgtagtctgattcaaaaccatattgatctttaatgtactgtttaacagtgaggccaggtgcaccaccaaggagagcgatgggagtctcaacgtcaccgtattgagaagtgatcaaaccgtatatggtccaagcaacagggcagatccagtaataccaaacccaccactttggaattttgggtctagggatgaaaaatccagagaagaggttaaagataccataaaaggctgatgcaaagatagaagctacttgttggttaggtgtgagggaaact

SEQ ID NO: 128945 - DNA, 404 bp, Arabidopsis thaliana columbia
agaagaaaaaaacaaacgtcattatttaatttccatcacattacatatgatcatgatcaaaacctgttgagtcatcgatagatatttcatacagcaaaactcgttggacaaattttgcttaatcttaaaactaattatatccgattatcagaataagaacattctgattggtccattaataaactaccatcgaagtaaaactgatccaccgtgaaatccaactccggtacaaccaaactagactcgccgtcatccacgtggctttccctcttctgctccgacgttaactgatcggagactgacggttccggcgagcgacggcgaggcctaatcctaaccggctcatacttacaagaaccaatcaaatgcggaaaattcagcttacttttcgatcctctgagctg

SEQ ID NO: 128946 - DNA, 320 bp, Arabidopsis thaliana columbia
caaaaaaattcccctttgggaatttttggaaacaaaacaaaaaaaattttgtttgaatgaacctcccttttgaatttgtaacaaatcccattctaagatttgttttttttttaggaccccccccaaaaaaagaaaaaaaggcccgaaggggaaatcaaacagttttagggacccggtttttgggcggtttaattccttttgaggggttccaacagtgggctaacctttttcaagcaagtgataaaaaggccgggttttccctgggccgtaccaagggggctttttccaaaggcccccagcgtttaaaccgggggccaaac

SEQ ID NO: 128947 - DNA, 351 bp, Arabidopsis thaliana columbia
tttttttttttttttttttttttttttttttttttttttttttttttttttttttttttttttttttttgggaaaaaacaaaccaaatgttgtttttttttaaccaatttacaaaatacggttaaaaacccccaaagcttctaaataagtggatggtgggaaatacaactttctttaaaccttttggttcccgggggaagacttaaaaaaaaaaacttttttttttttcgacaaatttcgaggggatttacaagggggggaaacaacaaattttaatccaattttaaatttattggctttaggaggggcaaaaataaaagggttttccaaaggaacctgtttttggggaat

SEQ ID NO: 128948 - DNA, 433 bp, Arabidopsis thaliana columbia
aaaagttaataaggtttcattatttaaagttaaagcaaaagtataaatagtttagaagttgtcgtatatagaaagcaccaaaactgaaaagcaaaaagtaaaaagctgagccaaaaatgttaaaaagaatgttttaacggaagtttctgtagacaggactgtacatgcagctctctgccatctttacgaggtccttaggacgaggcagattcgatgccagtccgagttcgtaggttttggctcccacactggctgcaatgttagcagagatctttctgatgtttgcaaaaggcggatagatcagtccgttcgcaaaattctcttccgtcacttgggaggccagcgcttccgaagctgctagaagcatgtcatcacggacacgaatggcaccggacatgatcaaaccaagaccgagaccagggaaaatgtaaca

SEQ ID NO: 128949 - DNA, 201 bp, Arabidopsis thaliana columbia
cccccaaggtttttggaaaatttaaattttaccaaactggtgtcaaaagatttactacaacaagaaattttttaacatccaaagataacaacttaaaataagctaaaatcaacaaaaatttttaaagatcaaaacactttttaaccagggatgttttgaaacttgttgaggataactcctttatacttgacctggaaccat

SEQ ID NO: 128950 - DNA, 277 bp, Arabidopsis thaliana columbia
ggaaaatgggtatcaattaatttacatgtgagagttggtaaactattgaggaggagaatgagattatttaaaaaaaaagggtaatgttttgttcttctccatttcggattataagaaagaaaaaaagaattagaggtttggttttagattgtgtctctgtctttttattaaaagatgctttagtctgaataaaatttgaagcagaagaagtgttacttcattggcttaaaaaaaaaaaaaaataggactagaaccaagaaaaaaaaaaaagccaaaa

SEQ ID NO: 128951 - DNA, 464 bp, Arabidopsis thaliana columbia
gcctctgccaactttggttataattgggaataatatacagaaattaatcatcaaaacatgtttcttcaaatccctgtgggggttgtagttaccaagtgataattttgatttacaagaaaaaaaaaacagaaaagctactagtccaggttcctatacttgccaaatccagaaaagaaaggcggtatctataaattatctattatatgcatcaccatcttcttctgaaatgttggacaagaactttggcaaggatgtgatccgggggaggtgtaatagcaaatcgctgaatgagtctttccttaacataccctgtggtttgctgctagaagctgtatcaagaactctgttgatgatgttgatgatgctgttgtagttgttgtcagaaacaattcccttgggttcagacttcaatccaaccgacatttcggtattgagctgtgagtttgcagcgacgttgggatcct

SEQ ID NO: 128952 - DNA, 340 bp, Arabidopsis thaliana columbia
aaatgacagagctggtggcaccaattgggagagggacatagcggtcggggttgccagcaatatcatcgcttcgccaatttccgacttcatgaaagataggtttaaagatttgttcgaagcgctgttatcttgaaatgacacgtcagtaactttatgccaatagggtctgacaattatgttagatctctctcaaaaggcgtttcatctaatgacaataatttctatgtaataaatttattgcatgtgttagtgtgttaccatcttcagttgtgtgcaatttattaaaatgagtttgtaatatggtttcagtatcgaatataattggggtattaatgtcccc

SEQ ID NO: 128953 - DNA, 320 bp, Arabidopsis thaliana columbia
aacaaaaaacccccaattattttcggttcggaaaccattttacaaactttttttaaaaaagggcccacaacgggggaggggaacaccttaaccctggcaataaattttttacctaaaaattttgggcattagaagaaacccctttggggggagatttaacatattgggccgaccctttgggcataaagttacgggcgggttttttaaaaaaaacagggttttaaaaaaatttttaaaccttttttttatgaagtcggaaatggggaaaacgataattttgtgggcaacccccaccgctttgtccctttcccaatgggggc

SEQ ID NO: 128954 - DNA, 359 bp, Arabidopsis thaliana columbia
tccttttttttttttttttttttttttttttttttttttttttttttttttttttctggaaaagtccttcatagggatttgatgcaacaacatttttcaatttttaaccgtttaaaataaaacacccaatttgaatacaacacataccctgggccaatcaatgtttttggggcttttgttaatttacattcccaccacttatttgggaagtaatttgggaaaaatcttggttgggttttatagcttcacaaaactttaaaagattacagaggggcttgatatccctttgcatatggacatatatatctctttatgcaaaaaaaaccttttttgggttgattatcacaacaggacaatgg

SEQ ID NO: 128955 - DNA, 119 bp, Arabidopsis thaliana columbia
gagtttctagggtttctggattcggtgcttcggacattctctgtctgaatttcaatactaaatcctgatcaactcaatgatgctgggtctattgatcaaacccttatgcaatccatgga

SEQ ID NO: 128956 - DNA, 206 bp, Arabidopsis thaliana columbia
cgtattccttgtcttgctgatcattggctactctgtaggttactgtgcttccgagaaccacaagagggatgactgttattaccgtacctacggatataagccttgaacatatattatcgggttttacgacacagattatatgatacattgctggagattggatcaatgttagatgattaatatctttggtgtattgatgataccta

SEQ ID NO: 128957 - DNA, 295 bp, Arabidopsis thaliana columbia
gatggaaaatctttgttgtatatatttttttctcattacaagctttagtggtatcatgctgatcacgtttgatctctcgcaaaactttgaattacagaaaaagaaaacaaaaaaaaagttgcatattaggggttaagaagacccataaaatgagagagaaagatcaaactttataaagcaaagctctgttttgtagttcatcatcacagagttagcttctgtgaagtcgtcaaattcacctgcttcagatgtaaagctgccaacaagccctgccatgtgtctgctgatgtggcac

SEQ ID NO: 128958 - DNA, 266 bp, Arabidopsis thaliana columbia
ctcaaaaaggataaatggatttttcggggggagttttcttttctcaaacccaacaaattccaaaatttttcatcttatcatgtttgaaaggtggaaaaaccccaaatccaaattttttacgttttttaaatcaaaaatcaaaaacgggaaaaccgaataaagggcttaatagacttaaacgggccactggttgttcttccggagctgaaaaagcttaaaggcccagttttcaccttttttttttggaactcttttaagggtttttg

SEQ ID NO: 128959 - DNA, 393 bp, Arabidopsis thaliana columbia
gtattatatctgattagaaatttatttgaataaatatgctaagagcatgagacaaaatcgtgttctgtttcagcccaacagtgtcgcgcgaaacaaatccatttctaggaatatagaaagaaaaataaaacagacaaagaacaattgagaaaagacaccaacacacagctcaaagacacaaatcataattaggaagcttccataagatagagaattaggaaacaagaaacgtcctccttaagacaactgttcctccctagctccgaactcctcgatcatcatgttcttgttcattttcgcgtgggtcttggaacagttgcaaggcttgagcaagcatgaattaggaccaccaacattcccaattgaaacaactggatgctttttagagatcac

SEQ ID NO: 128960 - DNA, 208 bp, Arabidopsis thaliana columbia
cgggggtccatcatctatggcagattttgtagagcaactgtttcgctgtttactgggagatgaacaacttatgtcaacagtgggaaattcacaccattggcaggtgaggatttccgatgtaagttatgaagagcgggaggatgtttatggtgaactggaagctagaggcttatcgggcgactctttaaggaaactaccatgctatata

SEQ ID NO: 128961 - DNA, 183 bp, Arabidopsis thaliana columbia
caatcagacataaacgagagtttttttatcacaaaccaaaaaacgccctttgtttattaggaaaccgtttaacaatccaacggtacagtctcaacacttccagtggcatgcgggttgaagcaaaagacaacaggaatagtctgcattattacagacacctaaactgattacatgaacatgaca

SEQ ID NO: 128962 - DNA, 185 bp, Arabidopsis thaliana columbia
tgctaaagcatcagacgaaggaaccaactttttgtcacgggcgaggaagaaaaggacatgatgcagatgtcgaacatgaggaagatgatgctacatcatcctagcagcagtcgattgtgaaacagtctgatgactgttctggggaatgggatacacatatgcgagagcagccaatatgagaggat

SEQ ID NO: 128963 - DNA, 317 bp, Arabidopsis thaliana columbia
atctcttacccttattatatgggatttttttgaaacgactaaagtttaaaaattgccaaacgctttaaatccataaactcctcaactttttgcataaaaacatgttatgcatctactaatgacaagggaccaacaaaggtcctagagaatttaccacttacgtgatgacaccctaaacaacaattaaatactcatactaaaatttcaaattctcaaactaaaatttaaatttcctttcccgtggggtttaacaatgacccgacataagaacgagtcgggcgctccggtaccaaactggcccgtggagaccttggagg

SEQ ID NO: 128964 - DNA, 139 bp, Arabidopsis thaliana columbia
gtttgcttggaggcttaaatcgcgcttaaggtggtctcgcttgttagctcataataatatccagtggagatatgatcggcggagctatcatatgaatttcgactacggtgggtctcgccgacggggattcataattaca

SEQ ID NO: 128965 - DNA, 136 bp, Arabidopsis thaliana columbia
ggatcaaaagttaaagccttttatctctaatatcaagatcttgcacttctgcatgcaagaaaacacgaaacaaataaaatcatcttttcagattgagaatgtaatttactaccaaatatgaatagaaaaggctcca

SEQ ID NO: 128966 - DNA, 276 bp, Arabidopsis thaliana columbia
acaccaaaatcttcgattaagatgtttcgttttacaacataaaccaaacttttgggcctggtggtgtgcttcgatggcacaacataggataaccttcaacaaaagttgcttcaaaatcactaaacttgcaagtgctatgactcgaaaacgttctatgacgaccataggagagacagaggctttgcttcagtacattctttgacttgatctaataccacttgttgaatctccttctgtacttactccatggcatcactggcattgattctcttccat

SEQ ID NO: 128967 - DNA, 281 bp, Arabidopsis thaliana columbia
aaaacccaaacccctcttctcttgatggggccttattgctgggcttgcaatggaagtaagacctatggggcacaaactgcgcataaagctgcgcatacttaaataaaaccaacggttttaaatgaatgagacccatcctttatgcctttggaacaaggaaggtctagaaaaagcaagaacgttttaaatttaagaagaggaaaaggaaagaaccagaaaagggtctctcagagccagggaagagggtttattactgatagtacatgagctggtgatgggcc

SEQ ID NO: 128968 - DNA, 431 bp, Arabidopsis thaliana columbia
cctagacatcatcaatgatctgctggaagtcgaacagtgctttatcatggtgtataacggaagcatattcaatccataggcgcatgtgttcaacgggcagtgctcatcataccatggtgagttattgtctggtggcaggaccaggagtttcggagaggaaggattgcattacatggcacgtggaccatatggtacagacggaatgatgccgagacagtggcaaatgacgaacatggacttgtcgctgccagcaatgaggagcaatggaatggaagatggaacatcatcagcagctaattaccatcacagttactttggtgtggacgcttcgaatccaagttttacgtctggtattaatggctacaccgagttcaggccatcgaatggtcattgatcagcaaatggagagaggggatttgtaatgtttttat

SEQ ID NO: 128969 - DNA, 127 bp, Arabidopsis thaliana columbia
atgaaccaaccaaccatagcttatttcttttatttctctactcatacaacaaaggaagggttcatatcagtttgtgacatattgatacatagagaggtaatttataagaagggttggttgggttcat

SEQ ID NO: 128970 - DNA, 109 bp, Arabidopsis thaliana columbia
cggcaacatccctaacatctcagcaggcggcatcaccccgctgacagcttccggtgcgtacaatgccgggatcgtacggctggccgatggctggaccattatcggaccg

SEQ ID NO: 128971 - DNA, 247 bp, Arabidopsis thaliana columbia
gaaggaagctgttggcgagggtgtaaacagggatcggctagggggcgctccatacaagctcaacttcagagatgaaaaagagtctgaggtatactgcaacaagacgacgagtgaagacgagggcaagaagaccacagaaggtgacggcagggactactacttacagatgtactatgatgatctacctatctggggattcattggaaaggttgacaaggaaatcaaatctgatccgagtgaattcaaa

SEQ ID NO: 128972 - DNA, 354 bp, Arabidopsis thaliana columbia
aacaaaagtagatatgcttcattcataagggagatcacaaggtcttagaaatagaagaaaaacaaaccactgagctattatatatcagacaaggaacgtgttatgttctggctatttcaagacacaaactttcctccaacaattggtctcttgctaccagacagaaccttttcaactcactctaacatgttcttgggactaatcgattcctaatactccagtgcaaagggatggaagtgaaatcagcctaaacgtttcttaatcattgtccatattgcgtttgcgggtaataatcactaagtagcttcttgaagagaggaacaatcgcaaccatagcaagttggagctgctcgg

SEQ ID NO: 128973 - DNA, 277 bp, Arabidopsis thaliana columbia
ttcttttttttttttttttttttgatttttttttttttttttttgggggcatgatatataatttatatgccatgtaaagaaatgaaaacgaatgtgacaaaaagcaaaagccacaaccggttctgggaaagtatctttataagttcttttttataaactcccaaaacctctggtccatatatatccgggctttttttttccgtggcatatgccgttcattgggaaatatcaacaacttgtaccgttttcccgctttaacaagcgcgtttacaagcct

SEQ ID NO: 128974 - DNA, 372 bp, Arabidopsis thaliana columbia
gaaaaagggtagtgagttctctgattcataaatggaaagtgttgtgaagaacatacattaatatggattcaatctgtgtacaaaacgaaattagagatatggtgtaatccagcttcctcataacatttagcaatatggtttaaagattcggaccaagttccttcgatagaagccaaatccaagagaaaagccgcaacatccaacgcaacttggattggagctttgcctttatgcaaatcttcaaaacgaccttcatcactcactttttcccttatgaattcgatctgctcgtcttcccattgtgctatactagcaacctcctcatacggacatcctaatgtccaccacggtgatctcaatgctaccctagcc

SEQ ID NO: 128975 - DNA, 175 bp, Arabidopsis thaliana columbia
ccaggggagacttcctcatctttacgtggggagaattaacaaacgcgttctttaatagtccaacaaaactaattctccaggcttatattacaaaagatgttaaagggtacaaaccaaaacccgccttgagtatttttcttaatgattcccaaaggaacaggaaacttactttgta

SEQ ID NO: 128976 - DNA, 206 bp, Arabidopsis thaliana columbia
aaaaagaaaggtttgattgaatttaagacaaaacagttgaaggtggacactaatactagagaaagcattgggaaagctaggagaggtagaacaaagttttttgtaacttccggagaataagaatgcatttgtttccaaaaagatgggatcttttttgccttttggggcgatacatttaagtagacagattttggaatggccatggg

SEQ ID NO: 128977 - DNA, 127 bp, Arabidopsis thaliana columbia
cacagtctatatctatgcgaatataacgggaaaatcctacaaatcgagcaatcgttgatttccagtgaaagagactttaccaaatcccagacgaccaatctgattcaaccattaccactctctctgg

SEQ ID NO: 128978 - DNA, 319 bp, Arabidopsis thaliana columbia
atgggaaacccttaaattggcattaccatgaaatatgtttgagggaagttaacaaaacaccttgaacatgtccaaagaatgacagaaatgaaaaagttttaaaaatacaaaagccaacaggtttataaaaagcaaaccaaagggtttttcccagggttttgaattaaacaagaaccatttttagggttcctgagagggatcgagatgggaatccatcacatcggatagggcttcgaggaatgcagttttgtttgtccctggaagcacagctttttgggcttcctttaccatttcctccaccagagactttttggtaagg

SEQ ID NO: 128979 - DNA, 262 bp, Arabidopsis thaliana columbia
gagacaactgtacaatacaaatattccgcagtatgaatccacagaaccaagaagttcaggaactgttatctaataataaaaaggtagtaaaagagctacaccaaatatgaagacattaagttccaactgatcttcatatggctgggcattgaagctacaaaccgcaagagatccggtttattaatgattcctgtgtgaagcggttctgtttcctgttggttcatgacatgtaggaacttggctaatggttggaagtaccatt

SEQ ID NO: 128980 - DNA, 225 bp, Arabidopsis thaliana columbia
aaactcaaaaacggcgtaaaacttatttaagatggggatcataagttttacacccaacaatctctctaatcaaatcgatacggagacgacggacggacggactggtgggacccttacaagttgtaaaactagtttgtgtttgtgtttttttttttggttcttttgtcccgagaaaaaaacaaacgaactttgaaaagcgactagcgggagagaccacgaaagaaa

SEQ ID NO: 128981 - DNA, 194 bp, Arabidopsis thaliana columbia
ggaagggaaaaaacaattggggaacccctgttccaaatttcaaacaaaaggggagttttacccaagacataaaccctaacagggttaccttttttttttcacattttcaaaatcccaaaaggggtcctcaaaaactctgatttgccatatccaattttttttcatgacctttcccaataaaagagggttttttt

SEQ ID NO: 128982 - DNA, 267 bp, Arabidopsis thaliana columbia
ggtgtatccccaaaatcccaggtttgggggaaaagaaatcaagacaaagggggcccttggcctttttattggaaacttacattccacatttaaaccttttttttataaaaatgggaaaagcttatgtaatccccccaaaccaccgcgttttttaacccccgcggggggttatggaatggataatatgtccccccttttttttcccccgagacgggatcttttttgggggaatcgggttcatatttcgggtttttatataccccaaaa

SEQ ID NO: 128983 - DNA, 323 bp, Arabidopsis thaliana columbia
cctcttggaatccactgttggctgccccgtaaccatttcgagcactaccacgccaaagctgtatacatccgccatggttgtagcctcgccggattccatgtattctggtgccatataaccaaaaatcccttgagcagatcctttcttttttgcagcttgatgagccttgtcgtttctagacaaaaactctgccaatgcgaatccgcaaagccgcggattcatatctctatcaagaaatatagttgaagaagtaatgtttcggtgaatgacttgttcgtcccattcctcgtggagataacgtacagcgcaagcaagcgatttga

SEQ ID NO: 128984 - DNA, 258 bp, Arabidopsis thaliana columbia
ggggggacactcaaacaatttggatataaaaaatttcacttaaaaaatttagaaaccccaaaaaaaaaaaaaaaatctttaacggagatttttcaacgggcttaaagaccaaactttttaaagaaattcaaatttagaccaaacaattttgaaatgatcaatttagaccccattttttgaaaaagaaaaatccaatcaatcggccaaaggacctggggaagcaggggaacgagaaacctcctcgatgaggtttgggac

SEQ ID NO: 128985 - DNA, 354 bp, Arabidopsis thaliana columbia
caaattattctttccactcttggtcggatacagatggaaatccaatagaacttttttacaaactaaaagaatcataaatgttgggaaagaaaaaaacatgaagaataataacacatggattgagctcttcaataactagggtccatgtcaatgatgtccatcttgaacaacatatgaatcagtcatatcgctggcaaattgctgtccaactagaggcgacatccctgggcctgttccatgctctggggacgtatttggtacagtactgttcgactgtgacttagcattttgacgctttttccaaatagctgcaaacgctgacgcgagaactgcaaaggcggaggcgaacgtaac

SEQ ID NO: 128986 - DNA, 417 bp, Arabidopsis thaliana columbia
  unsure (1)..(417): unsure at all n locations
attataccttcttgngcataatattatcattgatgcattggaaaaaaaaaagaagtaacctcatattagagactctaccagcatataagacataataatgatacaaatctgttgggcatacattcaaaatggaaatgctgatgggaataccacggccagtgactccatgtggtgaagtagggagaagtagttcataaggaggcatcccagcacctgttctgttctttagtttcttgtccttgtttctctcgttgatcgtcttctctatcttcacaagttcttccgagaacttgttaaaatacttaaccacttggtcatcttggaaccaatgtctttggacttctctcagctcgatcaagtactcttcgtcaggggaatgcgttgagagcgtttcttggaccgccatcactttggttg

SEQ ID NO: 128987 - DNA, 364 bp, Arabidopsis thaliana columbia
  unsure (1)..(364): unsure at all n locations
atgtagaaaaangagtccaaggctctgggctgggaagttctgtacatagaaataaacttacatagaagtaacagtgacaacagaaaaatgctgcaaactcatctatcattagttgcagagggagagcaaaatgagacaagagaatcgatgacttttcaatatgattaggaagaatgacacaaagccgctttattcactcttgtttgggccacttcattcgccatcctaaagctacacagcactcatattgcaaccagtatcaatatcagtaaaagcgaatgcatgagctccgtgctaaaacctgttaatcctctgtaaaaaatctagcttgttccatcccaggtggcgataaaggagggatggc

SEQ ID NO: 128988 - DNA, 313 bp, Arabidopsis thaliana columbia
ctgttagttgataaacaattttttacattttattggttcaaagttcaaaccattgtttttacactttattccacacactatacacatgcaagagagatctaaggggcagttgtatgattggcggtgaagtcaggctcggtgggtttttgaggtagcaaaggaagagtgtagcgaggaggaaggttggagatattgtgcctcagattgtgaagcgcgtttgatgcgaaacgcgacgcgtaaagagcgcctccaaggctcaaggacgacgacacggttgcagcattgtgttctttatcttgactagcgagcgctt

SEQ ID NO: 128989 - DNA, 362 bp, Arabidopsis thaliana columbia
ccgccttaaacgcgagagaacaaaatatccaaacttctaaaaatacaaaattcactcaaaacatgacccaaaaaagagaaaaaaaaacctaaactgtttttagaaaagacaacgagcgacctttgttcttaagttcaagcaactgagagaatactacagaaaccttcaaccaaagttgaatccacccgtaggagcattaccactttggtttccgaattggaaaccggaagactgaacattctcaggagcatccacaccgccaatatcttcctcctcgtcatctgcagcccaatacgactccaggattttgactgctttctcataaatctcattattatcgtgactctgaagattctcaatct

SEQ ID NO: 128990 - DNA, 446 bp, Arabidopsis thaliana columbia
gtttctttttctctctctctttctctttctttctcaatttttgtagtttcatactctagcttactaatcaaagatgcgagagattcttcacatacaaggtggccaatgcggaaaccagatcggagctaagttctgggaagtagtttgcgccgagcacgggatcgattcgacgggaagataccaaggagagaacgatttgcaactcgaacgagtcaatgtctactacaacgaagcgagttgcggaagattcgtcccacgcgccgtcctcatggatctagagcctggtactatggatagtgtcagatccggtccgtacggtcagatcttccgtcctgataacttcgtatttggtcaatccggtgccggtaacaattgggctaaaggacactacactgaaggtgctgagcttatcgattccgttctcgatgttgttcgtaaggaagctg

SEQ ID NO: 128991 - DNA, 402 bp, Arabidopsis thaliana columbia
aaaagaagaaccaagatatacactgatgtgggataaagaatgaagctaatcataacattgatatcatgcttgagtagcttgtttaacaaaaagaatctgaaactgaacctaagttgccagattttttttttttttttttcgtatcaagcttgaagattgcactgttgcaagtaggtgtgatggtaagggacgtgtatgttccagtaacgtttgtaattctcttttccaatgtccaaccacggcttcatgaccccatcgtagggtataactgccgcttgttcgatgtcaaccgctttgactcctgattcgcgacctaaccccatcacatgccatcttttgtccaatgctaatgtttgcctatagaaagtcaaccaacctattggtaagctcccagctttccac

SEQ ID NO: 128992 - DNA, 357 bp, Arabidopsis thaliana columbia
atgggggggaacaggcattaattaagcaaaataatttaccgcatttaagttccttttgggacccggcttatttaccattttttttattgaattttttacccaagactaacttttaggggctttcaaaaaaagacttccctggaatcacttttttttttttggcacactttttgaaagcgaattcccgagagctgcaaatgaaacccattagtcaaggaatctctactacatggtctccttctagaacccgcttttaaatgcttaaagccaacaagcctgccttaggctacagggtacccgggttttaccataacgggggatgctagaaaaaagggggtcaatttggggccattgaag

SEQ ID NO: 128993 - DNA, 381 bp, Arabidopsis thaliana columbia
  unsure (1)..(381): unsure at all n locations
aacagaggcgaancttattaggtgacatcactgatacaaaaattcgagtggacgtctacaatatatcaatcctggcgttcatcatcttcaccttcagaatcagaacgaatgtctttagcgactttgcctttggcacgtatttggcttatgagcacacgatatatcaagatccaccagtagatgtgcagaatctgtaagcaataaagaagtgtgttgaagacatagtagaaaagtataaggggtggtccggtttccatcagatgcttcttgtcccagtactccgttttcacttttattgattcgtagctggtgctccataggatccagaaagggtaatagatgagtcgcaaagtggtccacgacaagaaaaataggacaaac

SEQ ID NO: 128994 - DNA, 385 bp, Arabidopsis thaliana columbia
acgcaccaccaaaaaaattgcataaacggagagcgccctcacaaagtcagacattttttaaacgtacatacaccagaatcccaattcgtttttccgggaaataaaagaagaaacttcggagaagggatcatgacgagccctcatactggtcctttacgggtcttggtgccgcattgaaccatcccgctgctgccattgcacctggatctggaaccggtgcaagattctttgcagatacatagcttgatctcccagcctgtgcttgcatctgtatggttgattccgctccggcagttgccgcttcgcctgatagaatgaaagcagatattggatcctttccagcgcttagtttctcctcaagaacttgtgaagctgggatgagcgc

SEQ ID NO: 128995 - DNA, 268 bp, Arabidopsis thaliana columbia
gggagaaaacacgtccacaggccatttttaattcaaaacacacaaaaaagggcaaaagaatattcaaagggttttagagttatagggaagttttggcacaaaaggatggacttggaatactctctcatgttggcttcttttatcacataaaggggacttaccgaaaacttgacgccgacaaaaaacaaaaaacattaaaattgaattccagttttttaaacatccaaactttttcaccatcctcacaatttagatgagattaattaac

SEQ ID NO: 128996 - DNA, 253 bp, Arabidopsis thaliana columbia
ggggaaacaaaaacatttccaatggcattatatacatctttaaacattaaaaaaaaacttacaatataaaaaagcttcccaatttttctgctaaattcagcgtggctttaaatttaacatctttgaacgaaacagagaataaaacaaaaggtgccgaaaaaattaagagaccaaaaatcttttgacaaaaaaaaaaagttttcgttcgggcacgcggtttttttcacgagcagccaaaattagaaactttttt

SEQ ID NO: 128997 - DNA, 330 bp, Arabidopsis thaliana columbia
  unsure (1)..(330): unsure at all n locations
cntnnnagtcaaaaaacgagttagttcgtgtcatatttatgaataaacccgaatcttacttaaaaaggggaaaaaaaaagaagaagaataaaaaattctaatatcaaaacaatatgtctagaaagagagacaatgcgtgtgagagaattgaaaagtgtcatttcttcttcttcttgctatcttcggctctaatgagctgaacaggagctgctggtaccctaaaccaccattctcttatccgcctctctagccggtcactactcgctttcctccacccaacttccctcgtgaaccactctacaaacgcaaccgttattaagtacttaacag

SEQ ID NO: 128998 - DNA, 212 bp, Arabidopsis thaliana columbia
gagagaagctaattgtaattttcccccaccggaaaaatttttcaagacacttgaaaccccttgcccccgttaaaagctaaaaacttaccccggggggggaaaataaagggtactaaaaaacccaaacgacttgaaggaaataaaaaattgcccatttggcccaaattggcgaaacaaaacataaacccgggggggaaaaaaaaaaatttttt

SEQ ID NO: 128999 - DNA, 245 bp, Arabidopsis thaliana columbia
acaacccaaaccggaaaaaattttaaaagatgacacaccatatcccttttaagacataactaatatgaatccaaagtttcgaaaaactgaggattctgctaaaataccattcttgacagattctccctaatttcctgaaatttttttttccaaaatcccaaggccttaaccacatttgatcccatggctccccactggatcccaggtttttttaaattccccattttagtttccaaaaatggaaa

SEQ ID NO: 129000 - DNA, 191 bp, Arabidopsis thaliana columbia
atattatcacacatttgtaaaaatcgcactaaggggatacaaatgcggtggcaaagagtacccagagagaagacgattagcaacaaaagatactatacattttcaatggaggaggtctgagacaagactccactgtggttctcataaatttgtgatgtattacatttgcgactttagaaactccaagaggg

SEQ ID NO: 129001 - DNA, 204 bp, Arabidopsis thaliana columbia
caccctacaggcgttgtcttaaatcatatatatgaattccggggcctaattccaaacggacggttcctatctttagagtcttttaaccttgaccaaaaggtaaggtgtaaagacaggcatatttctgccttgatttgaaaagaatttttgggccataacctgataattggttggctcacagatttctgcaaacattttggggaa

SEQ ID NO: 129002 - DNA, 280 bp, Arabidopsis thaliana columbia
gggggggaaaactaaaatcatatacctttctctactcaaaacttttttatacattggtaactggttaagttaaaagaaaaacaaaaaaaaaggggcgggttaaacttaatttccccttaattttccaaagatttgacagggaaaaaaaaaaacgttatcaagggggaaaggtagtaaaaaagggcccttttgttgttgcaaaatcataggaagcctaaaattcccaacactgttccgtttcccatttccggggcgtagggtaaacccgccccgaccgacc

SEQ ID NO: 129003 - DNA, 337 bp, Arabidopsis thaliana columbia
ggaaaaatcaaaggtctttaatcataaaagattacagattgaaaatgctcttctgtaattttcaaaagagatcagaaattttcaattaaagaataatttgacaaattttttttctttccccaccaaagaacaaaacaaataggcaacaacttttttcttcatctctatatctacaacacatttttgcaaaaataacaattctcgaaacaaaataaaatcttctttttcttttcatttttcatcatctaatgaacacaatgaaggggtcttttagagggaaaacaatatctcttttacctctctttgatccgggggaattaaacctttttcaccaacc

SEQ ID NO: 129004 - DNA, 296 bp, Arabidopsis thaliana columbia
acaagggtaaattttattttaacacagggggcaggatatgtgaaatacaatctgggtataaaatttaataggggtcgacaaaataagttaacacaatatttggaaaaaaaggcctttagagttgctgggaccgacctgaagttgattttaagagataatctatgctaattaaaatttattttacttatttgaccaacttatttggaaccatttggcataatttacacaacacactttaataccctaaacatgttggaacacatgcaattgactttatattttatgatgatcaaacc

SEQ ID NO: 129005 - DNA, 210 bp, Arabidopsis thaliana columbia
gggggggatgaaaatgcttgttaatagagaaatagtggtcggtttatgtttttcaaaatgaataaccttaaacatactcatcttggaaattgacgtttgaaacaagccaagcttagagaacttacaggggggggatttcatgcagcagttggggtctccttagaagatagcaacttaacccttttggggagggctttcatgacatctatg

SEQ ID NO: 129006 - DNA, 179 bp, Arabidopsis thaliana columbia
gggatccagagaacagaatcaaaggggggattgtctcagctagagaacggcgtgagctaaatatccgcattcctcttcctccaatctccgaccgacggttgtccacctcttcctcctcagacaccaccaccaccgacgctggctgtaacggaatctccgcttgcgatctcgagaaactc

SEQ ID NO: 129007 - DNA, 211 bp, Arabidopsis thaliana columbia
aacaaaaggcaacggggggttcccataaattcccaaacagattaacaagggaacttgggggttttgggcaaacaaagaagggaaatgaaaaacatttcagggtttgggaggcaggcgggggaaggaacaaactacgggagttttttttccagttaatggaattcccatccataaaccttatttgggggggaatcacgagcccccttaccaa

SEQ ID NO: 129008 - DNA, 298 bp, Arabidopsis thaliana columbia
cagccaaataaaacattttttcccagaagttgtgcaggaatcaaaagagtcagagcgacgacatactgacaaacatatttgattgcttactactaaaaaacaacttcccaagtaaagagaatgatcaacacaaacactaggcttctctgtactctctcttcacatttaggctccttgttctttcgctttccattacctcaggcacggatcatcattttgcagatgtttcttcctttcaatgtctttgaagcttcctcagcgaaagcttgagctgattctgcttcggcttctgctgcct

SEQ ID NO: 129009 - DNA, 186 bp, Arabidopsis thaliana columbia
aacaaaagaaaaaaaaatttttttacaccaacttcttctttaagcattacaacattttttattttttggggtaacttccataaaaagagcatatgatttagactttcaatacccctagaaaagcctatgggcccttattacctgagggactcgaacaaaatttttcagggggtcaggaaaagattt

SEQ ID NO: 129010 - DNA, 167 bp, Arabidopsis thaliana columbia
  unsure (1)..(167): unsure at all n locations
tttntttttttttttttttttttttttttttttttttttttttttttttttacctgaaaaatattaaagctaaagagcaatgaccctttcaaatacagaattggtacctcagatttgaggtgactgacaataaacaatgacttattatcataatccaacaattcaaa

SEQ ID NO: 129011 - DNA, 200 bp, Arabidopsis thaliana columbia
aaaaaagaagggctgcatttttctgaggggggggggacattgttttactggggacaaaacaacccgtttttgggatacaagagatatcaatcgagtgggataaatgccaaaaaggatttttccccctggttaggcccttgctaaaaatgattcaacttacaagggaacttgaagcagagttcctttgttgaagcaatttg

SEQ ID NO: 129012 - DNA, 250 bp, Arabidopsis thaliana columbia
atctccagaatttgcaggagacgtaatttggatctgttttaataaaaacaaataagattttgattacttacaagctcaggatttgacattgtgactgtgagagtaagagagaacttaccagtgaaaagactgtgtgtagtgagtgttgattatggtgaaagaagcatataatattttggtgttgcttttgagttattttttgatgaatggttcttgacagacgagaagtctttggtcactaccatcttga

SEQ ID NO: 129013 - DNA, 145 bp, Arabidopsis thaliana columbia
acctatttttaggattctaatcggcatcaacattatttgtcattatcaatcgccatatacagaaaattctattaataaaaacagaagcttacaagagagtgcccatatgcttggaatatatgtttctgtatacttcttctgaatg

SEQ ID NO: 129014 - DNA, 331 bp, Arabidopsis thaliana columbia
aaaaaaattaagcattttaatattgtagagatttggccttaatatcttgatgcactagacatcttgccaaaacatagaggtcaagagacattcactgatgtgaataatgtatactttgtacgtggaaaaataatagaaaatgtgctcattacaatctctcttgtaccttactttagctcaatcagacctgccttgtactttagaggcttggtagaaacgcatcaaacgacaccgtgtattcatgaaactgcaaatatcaaaagcagggctcactaatatgtgttacaaagaatctggaagaagcctagtacttttttaactttagaaacct

SEQ ID NO: 129015 - DNA, 246 bp, Arabidopsis thaliana columbia
aaagaaaaaagaggtttggcctttgaaaaaaaatggacaaaaaaaattggtggataccaatttaaagaattcggaatctgctacgggccaagggggtttttcattcccatttaaatggaaaaagattttccctgcccccaacgggggatttatttacagaatcattttttcacctttttttgccctcccaaagaaacaaagaacccttggtttcccctcacacattggatcccccaaaccttcttt

SEQ ID NO: 129016 - DNA, 374 bp, Arabidopsis thaliana columbia
atcacaatctatgtttgttgaaataaagcgaaaacattacaaacgttttcacatgttcgttttgatgttcgatgaaaaggtaaaataaactttttatgtttatcctgtttttgttatttcatgaggtttcaaatacccttaagatatcaagtttcagacttagccataccaaattaaaaagaagctagtttctaaggaacggttcctgcgagcataaacgtcttgtaaacaatggttcgaaccagctcataaccaccccaagccgtctcgagctctttgactacattgtccgacaataagtctactcctttttctttagcagcaccaacggcagaccacgatcttagcatccgcaagaatccttcaaacgacac

SEQ ID NO: 129017 - DNA, 152 bp, Arabidopsis thaliana columbia
cctccttttttttttttttttttttgaaaaagaaaagaaggctttcatgttatttatttggatagccatgataacacccattcgaggaggtatgaaaaacaggaattccaataaaagaagcgttcgatgggtttggcaccaactaaagattt

SEQ ID NO: 129018 - DNA, 285 bp, Arabidopsis thaliana columbia
gaaaagttttaggttatagcgaaatacatagagatagaagagagagaaaggacgaagaaagagagttcctttaactctctcttcttcctctgcaaatctgacatattgaaccaaaccaaaaaaagccctctttgattagggttttgcgtcaagattctggagagagcttttaggcgagctttgcgtatctctgatgctgatgctattgaaattggaactcttctccacttaacttggagttgttttgctttttgattgagcttttgagatcttgaaaattgagat

SEQ ID NO: 129019 - DNA, 242 bp, Arabidopsis thaliana columbia
tttcatctcacgtatgaaacctccttaaagaacaaagaaaaatcttggtgaattcgattcttttcaaagatcgccttcctaatcactttcaacaactggatcaatccttactgagtctgattctgcatcgaattggatacagagacgatgccgaagaacaaaggactgggaggaatgaacaggatgagaggaaagcacgaagctgatgacgtaaagcgagagcttatatcccaagaagatgg

SEQ ID NO: 129020 - DNA, 201 bp, Arabidopsis thaliana columbia
agaaattccctttttttttctcttggaagggctttggcctaaaaatcccatttttcctataatattatattcaaaaacatattggattttcactcgaaagacagacaaagatactttaatttatttaacaggggggctaagggaagacccctaacttacgttttcttataaaccctagaaaaattaccgattggaaaataa

SEQ ID NO: 129021 - DNA, 416 bp, Arabidopsis thaliana columbia
cttgttctacctaaagatgttcttaagcaaataatacagaagaaactctcttttgtgctactctgattcaacctgaacagttgcatgataaatcccataagacttcctacagaaatttctaacaccagtaatgatctctttaggactagctccaggctctggtaagatatgacaggacaatacgattctccctactgttatctcccatacatggagatcataaacaatcttaactccatcgattcgcttaagtcctctttcgagcttctctatgtccatatcacgcggtacgcgttccatcagtattccaaatatgttcttgagaattggtagagtagcagcaagagcaaaagcagagaaaacaagagtgcaaatcaaatcaaccaaaacccattttggttttacccaaatgatac

SEQ ID NO: 129022 - DNA, 370 bp, Arabidopsis thaliana columbia
tttgtttcacttgtatcagcaaataaactgtagttgattactaaataaataactactgcatatgcgttttcaatctctactgtctggtttctctttttctacatacaaattttgaaagatttggtgatagcttcaggaaagtaaaaatagcttctgataagcttcaagttttaaactactatttatgctcttgcgttacagcaccacaggagctcgtgatcctgtaacatcagcgctgcatatcattctaggtagaaagctcttccttgatgcaatgcaggttgtgcggtggaaaacagcatcaacctcgacgattgaaccttatattcgttatgcagcctcattcgctgggtaatggactaaacctttt

SEQ ID NO: 129023 - DNA, 269 bp, Arabidopsis thaliana columbia
ggaaaggaaaatgttccccattaaaaagggaagaagccgaataaaaaatttttttttaccttttcagaaggcaaaaaaaaaccaaagaagggaaaacctcgaaaccaatggttggggggccaatacaacatactttgggattgggttttttattatatagatatatttatatccctcggagaacttgtttttgcaactggcgaccgccgtcttaaggtgctttctatgctttctttccttgccggttttttttttcgatcttggcctta

SEQ ID NO: 129024 - DNA, 147 bp, Arabidopsis thaliana columbia
aagaaggggcataaaacaattcattttttggcaattagccccatttggaaagaaaaaaaaaatgggggggcttttaggccaaagggtaaatgggttaaaagacaatccttgcaaaaacaccacggggctcatgaaaggccccaaggg

SEQ ID NO: 129025 - DNA, 429 bp, Arabidopsis thaliana columbia
tggttcgagtagggttcataaatatagtgaaaaccaccgtttggtgatacttcgtcgtcctcgacactctcagattcatcatcgaacctgatggcgaataatcctccgcagtcttctggtacccagtttcggccgatggtacctggacagcagggtcagcattttgttcctgcagcttcacaaccttttcacccttatggacatgtacctccaaatgttcaaagtcagcctccacagtattctcagccgatacagcagcagcagctctttccagtgagaccaggtcagcctgtgcatattacatcatcctcacaggctgtatcagttccgtatattcaaacgaacaagattctcacttctggatctactcaaccacagccaaatgcaccttcaatgacgggctttgctacatctggacctccattttct

SEQ ID NO: 129026 - DNA, 419 bp, Arabidopsis thaliana columbia
  unsure (1)..(419): unsure at all n locations
aaaaaattacaaaatattagggggtaattgtgaagagtttgtccgacaaaaaaaaaatgtgaagagtttttaattatgagacacccttatcaaaaatatctccaccaaaacatttaaactaaatgtatcaaacgggctgctccgcgtccatcaggatcggttcacaataggcattagtttttgataaactgcgacagttcagttcgctaggattacggataaaaaattacgtctagatcgctttattaaataaaggggttcttactattggaggnggacttaattctttctctatcaccttaccataaaaatctggtagatttaaaaactaataattatacaatgtggtaaaatcggatagcttttacaaaatgttgtaattatgaattatgatgacaaaaatccctttagatttttac

SEQ ID NO: 129027 - DNA, 126 bp, Arabidopsis thaliana columbia
caaagaatggccctcccacctttatacgttagaaatctactcatcacccacgggcgggtcgacccaacgaccatgtaatatgatcagaccggtcagagcatctgaagcctccggcatagctatccc

SEQ ID NO: 129028 - DNA, 250 bp, Arabidopsis thaliana columbia
  unsure (1)..(250): unsure at all n locations
aaacagcccggtttacgagggggtgagtttggagagctcttttgcactgaccgcttacgnctgggtacggtcccattccttgcctcatccttcatttaacgcacccaaagtgcacaacaccaaaattaacaatctgtcttttaataccagaggatctagagtttcagaataaatcttaatccatgaaagaactgttcttatgaatctacactctgaatccatgtcactacaacaaaaacatatagatttg

SEQ ID NO: 129029 - DNA, 264 bp, Arabidopsis thaliana columbia
cgacccacaagggagaattttataaaggcatgattcttactaaacaatgaaaagtaccatcgcagagttcgaaagttgggggaaaacaaaccaagggtcataaagagagaggggaagggaacatccaggattggcccgcaccgaaaagaaaaggttcacccaaaaagaaggggaagggaaacaacatcctttagtccaaaagggtacataggggttttaacctgggaaccatcaaggggactcactggctttaggggaaggacg

SEQ ID NO: 129030 - DNA, 328 bp, Arabidopsis thaliana columbia
tatctcttctggtgtccgggggtggtccatgttaatcaactcatcgtccaaggcattcaaaacccgacaaaacatgtcgatcacaacagcacctttgcacaaatgaagcatgaaatcaagaaacaccgaggaccaaatcaaagggtactcataatagatcaaagtagccaaaacctgtgcaagcttgtttttaacaaaaggaggtccttccacaactctaccagcattctcattatcaataacctccaaacaagccattgaaaacactgatttcctcacataactcttctcatccaagctcatagatccatatttaacccttaaaaca

SEQ ID NO: 129031 - DNA, 402 bp, Arabidopsis thaliana columbia
aaaataaccactacggtaatgtgagaggatttctatacagcaacagctcttatctttgctaatcatattcttaattattttaaacagcttcattaatcgctaatgctttatttttgtcgacattcgttcatttaataattaattaatgcagcttacttttattcatacaaataatataaaatcataaaacgacgaagtaagagacacagagcagaaaaagcttacactcatatcactgagcttctttggcttcgccaatcgccattgttgtttcgaaatctaattactgcttctcaaaacccttttgttggcttttgttttcggtgtcgatcattgcttcaatctctttcctttcgatctgaatcatctgatctctgatcttttcgagatctcactaatagg

SEQ ID NO: 129032 - DNA, 342 bp, Arabidopsis thaliana columbia
cttttattggttcaaagacagtgattcatgtacagtaaaaagtcgatatatcttctgagttactctgtttttcgcctactctagttgtttgattctgtcatctttctcttgggccctcagtgttactttggattgaggctgttttctctcatttgatatctccacaaagtgttctgttaaaacatctttattgtctgtaactgttttgaactactactactaggagaaagaatgtcacatgcgtttgtcgcttatcaccacttaatgaagtgttatatgtagttattttttgcattagacaagtgagctcgttgagctcttttatggcttcttatacggact

SEQ ID NO: 129033 - DNA, 212 bp, Arabidopsis thaliana columbia
cccacgggcatattttcacctcgtcgccgaagagaatgggcgtgtcatggcatgggctgacatggattctcctaggccgtttgggtggcggtatagtcgtcttgcgcacgaaataccgagatgtccccatgggcatcgattccacccgcctaggttggatgggcgtgcttcgctggaaagcatggatccgcctaggctgtcccgagtgtgag

SEQ ID NO: 129034 - DNA, 341 bp, Arabidopsis thaliana columbia
gtaaccttgatgagaaagagtggtttattgatgtgagagcacacaagagccttagtacgattacccagagttctgaagaagcaagagcctatttccgcaaagaggaatttctgaggtactcaattccggacagagcctttgtttacacagctgctgatggtaagaagtcaattgttgctcctctgagaagaggcggaggaaagccaacctcgaaagctcgtgaccatttcatgttgaaacgcgagagaccaccacatgtcacaatcctgtgtctagtgagagatgctgccgccagattgcctggtagtattgggacaagagctgatgtttgtaccttaata

SEQ ID NO: 129035 - DNA, 250 bp, Arabidopsis thaliana columbia
taaaatcatccaaaatagtcaaaattccagcgatagaagaagcagcaccatctgagaaaacaagaacatcatctgcaaaacttaagtgagtgatgatgggagccaaacaattaggatgaaggttaaagagaccattcaaagctcccaagtccaacgatttagatagcacatccatcacaagaacaaataggtgagaagacaatggatgttcttgtcgaatgcccttttttccttggaaaaaaccaatcaa

SEQ ID NO: 129036 - DNA, 282 bp, Arabidopsis thaliana columbia
tcttaaaatacatcaataaagaggttatgatgtcaagtttgcatcaaatattcccacggagccccaactagaccatgaaaatccgatgttgtatcaggtcaaatgacctagctagaggtgtcaaaaaattatgaaaatttaccagaaaataggatttagtatccttatgatgcatgccaaaaagaattttcaaattccaagtatttctttttttttggcaccggtgtctcctcagacatttcaatgtctgttggtgccaagagggaaaagggctattaagct

SEQ ID NO: 129037 - DNA, 337 bp, Arabidopsis thaliana columbia
ccaagctcaccaagcagggaagttggctgatttagaaaacaatttcctcactcaactaatcgcagatatggaagaaataccctaccatgatccatcctctacatgacagtgtgtaacgaagcataaactgtggcaatgtttatgcagaaaacagtaatattagactacgaatcaccaacctggctaaggagttttggtttatcgatggttgaaaatgtgatctcgtgcatcggtctgcataaatagacaacaaagcataacataagtgctcatagaattatacttaaacatgagagaagatatgaacaaatacaaaaacacgtactgaacaacataa

SEQ ID NO: 129038 - DNA, 410 bp, Arabidopsis thaliana columbia
acaaccagtaaccacatagagggggatcatttatagtgtatcaaaccgtaatcaaaccaattcttgccaccaccaaaacctaatcactagtccatcacgtttacaatgctaatgatacctaaaacagtgtcaccagaatcaaatactaactaagtatttttaaacatgcagaggatggaagaaactcaccgacgaatctgcaaaattgatctgcggccgggactagatggaacgatcggatacgtcacatcgtcggcagcgccgccgcaaggagacatgatccatggtgagagtaatagtagtaagaagaaaagatggcggaggaaaggacatctcggcggcatggtccggatcaattatggagaatccgaacagagatagagatgatgatgatgatcagctgtgaaaaa

SEQ ID NO: 129039 - DNA, 334 bp, Arabidopsis thaliana columbia
  unsure (1)..(334): unsure at all n locations
gacggacgtgtctctatagggtaaattttaagatcgaacgctccgggtccccttttaaaggtaagaccactatccggacactatccactactgcgaagtgcgaaccatggttttagatagaccaatagttatttcaatcttttttgttttgaacatagatttctttaattatgtatgttgaacttactaattaatatgaactttctcatatttatatgttactattccctcttttcaaaataatagtagatttttgaatgatttaagtaaatgacaagttttcggagagaaattacagactaggcatgtgattatggngtattccgctttttcg

SEQ ID NO: 129040 - DNA, 234 bp, Arabidopsis thaliana columbia
tttcttttttttttttatggaccaaaaagatgttttaaactggtacggcacaaactttgtacgattcttcttaatttgaggagttaatgccactactatacgttgccctccctttttttttcttctttttctgctttcctcaaattttgttatcttcagtattcctcatgacgtgattcatttaaagacttcactctttctaaaattagtacccttggaacattggaggtggtg

SEQ ID NO: 129041 - DNA, 320 bp, Arabidopsis thaliana columbia
gggatagaatagttgtggcttggtgggtcgttttaggtggttgagcttagaattctagaatcccttctggattagttgcgcttattgcttatttcactggctaatgtggagtatgagtccagacgtccagcgttcagaaggcgtttaatgggcgttggatcctattaattccagagatacctgactctaccccaagggattggctgtagagagggtattgactttaacatgttgattccataatgcctgcttagttagagatcactaaagggatttaggtcagtgtctagctttgcttgaggatttctatcacgggagtg

SEQ ID NO: 129042 - DNA, 219 bp, Arabidopsis thaliana columbia
attccagcttgacacgatctatgtcgcgtggagaccttcacgctgcgcaatgcaggaaaaaaaagaagagccaaagatcaaaacaagagttcatgtgcactagtcttagtttcagtttatacaacataccttggcaatctgccgcaagaagaaatcaccataacgttttgcgggttttgattcgacaacgtagatcatgtcctgcagtgccaccaggtt

SEQ ID NO: 129043 - DNA, 363 bp, Arabidopsis thaliana columbia
gcagcaagcgtaggatggcttatgctacattgtgtcacacaagcatcaatagttacatctgctatagcaactacagcacttcctgccacaagacaggacaaagccagtgcaagatgcagattcgagtgaagccataacaccatcatggagatcatagcaagaaaacctaaaatcgaatcgaacaaaaaaaaattacatctttcattcattaagaagcaaagaaactaactttcagtgaatttaccggctaatatgaaatcagggtcgtctcctgtaacccaaaactgggacaacatcagtcaacaatccccagagaggtttaataatccaaggaatctgaatcaaaccaacgtaaatctgagc

SEQ ID NO: 129044 - DNA, 386 bp, Arabidopsis thaliana columbia
  unsure (1)..(386): unsure at all n locations
ttcccttttcataagcaggtgggggatttttattgaagtaaaacactgttttccgcttctcccgnggcctaataataaggaacaagacaacaactttcaggcttcttgtttccagcgatcgaacatgactgaaacaatgtccaagaactatcagagaatatacctttcccagtaatttttgcgcattgagtaagggtcaggaactttccaggctggaatcacgagatctttgcgggggtcaaagcaaggatgatctcctctcctctcatcagatatatcatcccagttatcaccaaaataagctgttgttgaatggttgtgcttagagttttgtgttaccccagtgaactagcatcatgctattccatatctctttaggagcatag

SEQ ID NO: 129045 - DNA, 438 bp, Arabidopsis thaliana columbia
cgaagcagacaagaattttcagaagagaagaaatgtaaatgatgctataatttctgggacactatggttgcatatactatataaatatatttatttgttgaaattgtttttacatttttttttttaaaaacttctcggacactaaaaaaattatagtttattaaaaaaaaaattacaagctatgtatgaatggaaatgaaagattatatgtatatactcttacgcactccaaattgtgaattttctttttatgcaaatctaattaccatgcatagatttcacttggtgagaacaaaaaaaaaaaggaaaaaaaacgtttttccaccaaattcatttactatagttaattggggttaaccaatcacagtcttagtttaaaaacttttatgaatattttgggtgatcccatagtaccccaagtctccatacatatgtaag

SEQ ID NO: 129046 - DNA, 251 bp, Arabidopsis thaliana columbia
aaagaccaggtaagaactcctaaaactcgtgcttcctttatttctctactttctagcgctagaatgagtattttaatggtggtttctcataaaatccaagagaggaggaagagagaggaagcatagaagaatagtgaagaaggatctgaagcaaaagaagaagtatctgaagagagaggcataacgttgagacctttgagcatggaagacatgaaagtagctaaaagccaggtaaagttaaaaaaagatta

SEQ ID NO: 129047 - DNA, 346 bp, Arabidopsis thaliana columbia
aatcccaatttcagccttaattgggtgattaaaccatctctctgaatcccaaaatcgaaggcatgtttctctgaatctgtagatttatttcatccctttcgttaacctagttagttttcttttagctgtcgttaatccattgaactgttttggttcttaatcactgtttttataggtttctctgattcgattcttcaaagtttttatcttttgcatgtccgtgttcttcgcaaaattagaactttttgtttatgtggtcttgatttaaggcgtagctcgataaatagaatgcacaattttgctttcggaaattttagatttttagatttttaaaaaacttctcgag

SEQ ID NO: 129048 - DNA, 496 bp, Arabidopsis thaliana columbia
  unsure (1)..(496): unsure at all n locations
tttnttttttttttttttttttttttgttaccaacgacaaaaatatgtatatatatatattcaagaacaatgacaggaacaaaaggttattcaacataaaaacaacccatatatgctaaattcagcaataaaccccccttaaaatattgaaagaagaagaaaatacattaaaaattattgttatgctttagagtctccaagctgaatttagcatatgttcccatccgtcttgacaaccacaaccctttctctttaatcacctgaaattgttgcccccaaacgttggtgtccaaaaatcggctgttgtttcgttagccaccggaaacgtgcttgatattgggacgagacatagaccatgtcctcttagttcgtgattctcattttcatcttgactcttcgatttaccagatatctgctgttgttgttggttcgaggcaccttgtttcatgtatggagtgcttagaacagtgacttggtcgtgaaggaacttgatgta

SEQ ID NO: 129049 - DNA, 370 bp, Arabidopsis thaliana columbia
tgggagatagtcgagaaagggtgcattgttccggagaatgacggtagtctttctcaaactcaaaaagatggtttgagagactcaagaaagagagacaagaaagctctctgtctaatctatcaaggattagatgaagatacgttcgagaaggtcgttgaagctacgtcggcgaaagaagcatgggagaagcttcgaacctcttacaaaggtgccgatcaagtcaagaaagtacgtcttcaaactctaagaggagaatttgaagcactacaaatgaaggaaggtgaattcgtctccgattacttctcaagagtgttgacggttactaataaccttaaaagaaacggagagaagctagatgatgtgagaatca

SEQ ID NO: 129050 - DNA, 304 bp, Arabidopsis thaliana columbia
atcgcaattgaactactggtgttaaattttgagatcatcaccctacattctaacatgctggtttcgtaggaccgttttaaattttgatatcaccaatttttttttaaaaaaaaaacaaattctaaaaacaatcattttgaccccaaaaaaacgatcctttttgtaggacatcttactttaagttatgaaatcaaccccaaggcggctgcacaataagagatttgaatctcatgatataatcacaacgagaatatgatcataacacccaatcatagaacctatgaacatataattctacgagcca

SEQ ID NO: 129051 - DNA, 353 bp, Arabidopsis thaliana columbia
ctcaaccttggtccatgcttggctgtcgttagtgttacttgaaacttgaaagctgtgaatgctcgctttcactctttgactatttgttgttatcccttccattttcaatcaaatatgacaacctgtgtaagtgttattgaataggaacttcccttttgttgtaaatttctatttttgttgaatacgaaaaccattcgaaggctaaacaactaaagaatgatggttttggatgtgaaattttcagagttgatatatgtttcatgagtgatgattagagggctggtgtttttggttagtatcatggtaaaataatgaatagcagatgttgacgcctggtaagctcgttttattgc

SEQ ID NO: 129052 - DNA, 317 bp, Arabidopsis thaliana columbia
tttctttttttttttttttgctttttttttttttgagacacagggacggggtttttttccggttttcttacttttttttttgcaataaaatggggacacgattttaccgcattttaagaagaagaaacaactttaaagaagaaggaatcataatcgggatactaaaggggggggagctccaaatcatcttaggaaccttttttttttgggggggggggtaatttcaagaaagacgacattaaaacataaaaagaacccttgcttttagatgtggaagcactgggactttttttttagcagcaagcaaatccattttt

SEQ ID NO: 129053 - DNA, 265 bp, Arabidopsis thaliana columbia
aaaaaaaaaaaaaaaaagaccggttccccaggggccgattttttttccccaaacaggaatccagggcccaaaccctttcccttaatttatgggcttttttcgggcaaaaaatttgggggcggccggaacccgggaaaagaaggaagggggcttctccccctgggtatgggggaaggggcctttaattttttaaacaatggggcaactttttccccaaagggggcgtttttttttttaaaacttttttcccacttttttccaaaaa

SEQ ID NO: 129054 - DNA, 281 bp, Arabidopsis thaliana columbia
  unsure (1)..(281): unsure at all n locations
gcacattcttctaagattcaattacttgtataaacttttaaactcttccacttttggtaattcgaaaagattattcttaccttgttcattatttcgggatttcttcaatttcttacatggcttctatgatgagatcacctgttaaccatctaaatatcaatgaaaaacttgcaaactacctaaaaattatactaacactttcacgtttcataagtattagtcttaacgttttatcccatttgccgtttggnggtttctcaactttttacattagctcaacc

SEQ ID NO: 129055 - DNA, 404 bp, Arabidopsis thaliana columbia
agatggagcaacggttgtgtgtggctgttaatgacatttcatatggtaagttgctacagagaacgatgatggttcacctcgattttcgggatgagtcgatgagaagaagaattgcttctcgtgagttttggtctcaaatgtgaagatgagactttgcgggggagtggaagacttcatcaagtacgatttcatgaagtctctgttgcgaatgatggattcccaatattttgatagacagaggaacctcgctagggttttggcaggtgatcttatgagtatctccagaatgagatcaaggggaatcggatctgagatttctccgattgttcttggatcgtcgtagatattcttatttgctatctgtgtttccatggcggagatatacgaacgtcgcaatacctgta

SEQ ID NO: 129056 - DNA, 316 bp, Arabidopsis thaliana columbia
ccccaacaaggttaacatttgaacacctttgtaaatcaacacgttccaggcttgagcaattgtcaagaatagcgtttaaaccggtatctgacaacccgttcccacaaagctgtagatggcgaagtttcggcattgtttcagcgattgctagagcatcatcgtcattctccttttgaggatgcttgttcagtttcaaagtcttcatatttaaacaacactggcctacaactctgagagactctactgaaaatgagcagtatgacaactcgagttcttcaagtggaagtttcacaactgcttcgacaaatccatcgtc

SEQ ID NO: 129057 - DNA, 388 bp, Arabidopsis thaliana columbia
  unsure (1)..(388): unsure at all n locations
acggataatgttaacatgcgttgcggaggttgttttgttgccatcaccggtgattcctgctacaaatgcgtggaatgtgattatattcttcacaaagcatgtgctagtcttcctcggaagaagcgacatttgttgcataatcataaactcactctacaggttgacgaggctgcctcttcagattttgtgtgtacagcttgtagaacgtattctaatggtttcaggtacaagtgtttcgaaggttgcgaagatgatgttgtgataatgttcggcngtatgttccgtatcggaaccatttcagcatgatctgcatccacatcccttatattggacattggaaagttccaaacgatgtcaagcttgtggcacggaaactgatgctaatctc

SEQ ID NO: 129058 - DNA, 394 bp, Arabidopsis thaliana columbia
cttctccctcactcacttgggtaatttctagaaacaaaacggcaaagtctcgagcttaattaatggcttccccgacgataagaaccgtcgcaagttacaacactcacctagagtactccgtcgatttctttggagacgagttcatcgtcaccgtaacgtgggattcttccgtcatcagccgttggattcgcaacgtcctcttcaacaaccgtttctcctctcaccctctcgtcgttggagttggcgtccagtggacaccgtttagttattactccgatccaagaccgaataactactacgccgatcctccgccgataagatactactcagataatccagcggatattctccagttatgcgtgggtaatcgatgtctcatcatccagttaggtta

SEQ ID NO: 129059 - DNA, 402 bp, Arabidopsis thaliana columbia
atataatattaattattatttttgggttcgagtcctttttaaaaaacacttatgccaatctttaattcttgaaaaaatgagatgtaataacttttttttttttgggcaaaaactgagatgtaatatgtaataactaaataaagaaaagtgtacccaattgtaataaattgttaaccttaatcagacatgaatgaaaaattagtcatcaccggtccaagaccttttgactttgggtccagtgggaccatcttcttcaagcacttcacgagggattttgttaatcagatttctgaattttttccgcaaaagtcccggcaatgactttgcgataccttcaaggttcttttgaatgtcatgtgggacaagtggtccccatttcctgaaatagttgagccacggtgg

SEQ ID NO: 129060 - DNA, 548 bp, Arabidopsis thaliana columbia
aataattgacaattcctgcgacctgcgtgtgtctccacttcaggtcttgggatccaagaagcggagaaaagagccaaagagtgcgaatgatatgattacaccatttgcatttcttttagatgtgtctaatgcagaagtcccaactttttcatatttggaaagtttctataattcaactcttattcttttttctctttttttttgtgtgtatacactatgaaccatcagatttgagcaaataattaatctgatctataacgaatggataataatacgtatgaaatttctacaaaatatttatggctattttttttttgtcaatgaatttgtggctaatatttatcaacctatatcgataacctatatattgaaaattatatcaacctatatattgttgagaaaataaagaacaaataaccttatcgatatatactacaaaagtaatgatcatatcttatgttccaaataaactgtaatcataccgagtacaaaaaagacatttaaaaaaaaaaacgtaatcatttgagccaaataaactgtaaacatgt

SEQ ID NO: 129061 - DNA, 374 bp, Arabidopsis thaliana columbia
aacctctctatagtgcaaaggcttcagcttagatctctctttgcacatttttccaatggttccttatagttacagaatctgaagtcctgacatgttagaaagtatattgacaacgtatcatctcttttttctcttttataagacgcatcaccctgcatctaacataagcttctactttggtgtgttacagctttcacatggaccagaacagtgggctgatgagtttgcttccgggagaggacagcaagaaacagccgaggaccaatgggttaatgcagttttcaaagttgaatgctgatgactggatagatgaatttgctgaaggtcccgtgggtgatagttcagctgatgcatgggcaaatgcttacgatgag

SEQ ID NO: 129062 - DNA, 226 bp, Arabidopsis thaliana columbia
acaggagtctctgctggtactggagcaaccaccacagggcagcaacaccatggctcgcttgaagagcatcttcgtcggtctggaagttcatctagctctagctcggtgagattcttttcttttcaaataaaaaactagatataagttggagtagttaacactttcccgcactctcatatttacaactatatagatacaatgaaaatgaaatttcatatttgttgtt

SEQ ID NO: 129063 - DNA, 369 bp, Arabidopsis thaliana columbia
atcaaaagcctaactcttgggagttctgaaccctttactcgattaacacttttttggatcccccttaagaactcaaaactctgactctcttttctttttttttttcttttcttttcattctcattctctttcccattcaatccatacacaatcccaatcctaaatacaagtatccacctagtcctagctaacccaaaaagtgtgggctaggtctacatgaaagactcctcttgtcggctcatacctaatacgttaaaccaagctcaatcgaaaaagacctcataatcacacataaatgatctttggcttgaaataaggataggctcagggctatgggaaactgctctaaaaatgagagtcagctacttg

SEQ ID NO: 129064 - DNA, 371 bp, Arabidopsis thaliana columbia
ttgaaatatggatacatttggaatttttatggtgtgttattcaaaatgtaatataaaagtaatcaaatgtaaagttttaatattgcaaagattattaaatttataaaccaaaaatctaaaaatatgaaataattctgaatataattttgttatgaaattcataaaaatgaaaataacaaaatgtaaatttatttgtaaattttattactttagaaaataagatatttattataaaaacatcattattagtcttacaaaaatttcttattccaactttaattataaaagccgaagtgatgagcttttaagggtcgtctacatgggatttaaaacgaccaattaaagttagcaatcacactgaatattttagt

SEQ ID NO: 129065 - DNA, 318 bp, Arabidopsis thaliana columbia
cgtctttgtactcgcggtgtgactttttggacctcgtctcggacgaacttgaatcggcgccgtaactgtggttgcttttgttctgagaatcttcgaagtcgctcatctttgggtttcgacggagaaggacgagagagatgaaagaaaagagcgatgaaggcagatcgagaaagagggaatagcagagaaacgaaggagatagcaaaaaaaataaaggcgagatttttctacttctacaaaacaaagcgcagtaaataataaaggaggaggagaagttaccttgagagttgtgtgagttgacatgacgtcaagtggaga

SEQ ID NO: 129066 - DNA, 240 bp, Arabidopsis thaliana columbia
caaaaccaaaaggggtttcacttcacacaataggtaaacaaagggcgaagactttgtaatgatcccgttgtaaaagtaggtcgccaaaacagatgagaaactaacccctaacacttatgagtaatttttaagttacggtccctgtttccacgttggggaccgtagtttttgtttttgccccgatcatggtcatagtcataggcacgctccttgcctttttccttttttgggtttttgttt

SEQ ID NO: 129067 - DNA, 379 bp, Arabidopsis thaliana columbia
tctcaagattcgtcggaggatgaagtaactgttgaagtcaatgggtttcatgttcttccttcacaagtaagtactaaataatccaattctatgtgctcgaacaaaaatttatttatcatctctttaattttaagataattcgactatacttgaccatttttggtttacattttacttgatcacaggaaaatttggtcagtcaaatgttaaaaaaacatccagatctgacttcaaactttgatttaaagaatcaacaacttaagaatgcttacatggatgtcctcgtcgacataagtgagacattgtcccagtcgacaaaggcactttcatgggaagacctagataaagcagagagtacgcttttttgatcttacgaaag

SEQ ID NO: 129068 - DNA, 463 bp, Arabidopsis thaliana columbia
gggattgagattgagtatgaaatgggaaagtttgagaacgggttcgaatctttaggagaaaaaagctgaaaatcatattgaggtctagtgaatgtttgggaagcatagaattgataagatatactctagaaaaaagggcaccaaaaacagaaaaaaaatcataagagccattagagtttaagaaaaacccaatacactagactagactcatagagcttaaggaaagtttctccttaagatcaagagccaaagaaatgaaagaaaatgagttgatccaagaaaaaaaatcgaaatatgcctttagtgaaatatggtagacttaggatcatcattgggtttagagataggaccatctacttgttattcacggtttatgtcattgggtagatgaggtgctattcttgtatgtataggttggcacttacatttagcattcttctaagatcagtcttttttattgaga

SEQ ID NO: 129069 - DNA, 474 bp, Arabidopsis thaliana columbia
gcggacaatgtcttcaaccgtcaggggttttgcattcccatcaagggtttccttgttcttgtgagccagtattgatagccaagcaagaactgcccagatcccatctttctcacggatatgatccgaacctgtcgaaaagcttctttgtgagttgtgtagggttgttacggttttaaaacatgtgaagatctagcaatagaagctcaccggttccaaaactttcttctccgcatacagagcacatcccagcatccattagattgccaaagaatttccagcctgttggaacctaaaatatagaagtattagagcaatagactatgttacgtgattgcaatgaatagaagctagagaaaagcttcacaatgacatctacctcaaagaacttcaaacccaagttttttgcaacgacatcaagtgcagctgaggtcggcatgctcctgcatacgaatgtgaaagttgagaatttaatga

SEQ ID NO: 129070 - DNA, 441 bp, Arabidopsis thaliana columbia
cattgaagatgtcaacgaaaggtgagaaatcataaacaaaggcgacggatacaacagttcaaccacgagtatcagcgaggaagaagtacaacaacagagtaataatataatgacaaggtctagctttggaaacagacctcatatgtctaaggatgtgagatgggaagctattcagcatataagggcacaacacgggcttggttcattgggtcttaggcatttcaatcttctgaagaagctcggctgcggagatattgcaacggtttatctcgctgagctcacgggaacaaactgtttgtttgctataaaagcgatggataatgaattcttgcagagaaggaacaagatgtctagggctcaaactgagaaagatattctcaaaatgcttgatcacccgtttcttccaacgttatacgctcacttcacttcggataacttatc

SEQ ID NO: 129071 - DNA, 315 bp, Arabidopsis thaliana columbia
gactcagaaatgagatttctggtttcttacagaagactggtgaaagcttatgtgaagcatgggagcgtttcaagggttacaccaaccaatgccctcatcatggctttactaaagcctctcttctcagcactctttacagaggagtcctaccacgcatcagaatgcttctggataccgccagcaatgggaatttccagaacgaggatgttgaagaaggctgggaattggttgagaacttggctcaatcagatggcaattacaacgaggactgtgataggagcgtcagaagaacagctgactctgatgacaaacaca

SEQ ID NO: 129072 - DNA, 385 bp, Arabidopsis thaliana columbia
tgtgagtgcatgtaacaatgaatgtgagatttaagctggcaccaactttgagttaactctttccgacgttctttatgttggttatgatgaggtaactacatttctactcttagcataggaaaataaaaagcatgaatgaatgtgaattttccttaatcctaggaccaatgtttcaaacccaaggttggactaattaaataaccgtaattgaccggcaaaacccctaaaactagtacaaccggttcacattggtttatttatttttcatttttatttttatttttattttttcaagacttggctttatgctttaacatcacatcttctattagaaattttttatacttcctttttctcaacacgtttaattttattttatatttct

SEQ ID NO: 129073 - DNA, 375 bp, Arabidopsis thaliana columbia
  unsure (1)..(375): unsure at all n locations
gagtccgagctagttgcagaagtttaagtgcctgagatagagaaggaagcatctgaggaagatgtgcaagttgatgaagaggtcccgatagttcctacaagtagaagaaggaacaccatgaggagaaagaaagaacctaccatagaagagcactaccaatatctcatggagctgagttttgaggggacaagatatccccatagacctaccatgcaagctttggggatatgagagatgttgactacctcatggagatggccaagctggagaccttcttctcctacaagtatgaaggatacaaaactgagagctgccaattcctagccactntgaagctccatttctatgctgaagaaagggagagagagctgcata

SEQ ID NO: 129074 - DNA, 277 bp, Arabidopsis thaliana columbia
gaggttgagagctcacacacgatggatttcgtcaaggctacgctacaggacacggaggggattccaccagaccaacagagactcatcttcgctgggaaacagctcgaggatggtcggactttggctgtttacaacatccagaaggaatcgactcttcacttggttcttcgtcttcgtggtggaagcttctgagctttgtggtcaaaactggtgttgtacgattgagcctcgtgcacttgtgtgctgatgtctgcaaaagaagaacactttctctatc

SEQ ID NO: 129075 - DNA, 274 bp, Arabidopsis thaliana columbia
ggggaccaaaccccttttggattagggaaaaaggttccccctaaactttaaaaaaacttttttggggaggaaaaaaagcaaaaaaacccccgaaaccaagaggtcccatggggccccctaaacacccagatttggaaaaatattcgtttccataaataaaaagccctttgattcccaaggttttcgaaaaccagttggattttgggtttttttttttttgggaaaaaccccggggacgacacccccaattgaagggaagggtcggaagggggct

SEQ ID NO: 129076 - DNA, 316 bp, Arabidopsis thaliana columbia
caaactcctaaccaaacccacattgttttagagtttataacgaccagacccaaaaaacatcaacagacgtccctctaagacatggtgatcgaatgtttttgcaacccgggaataattataatgaaccactgattgcagatatatgttgggtgataccatcttctcaacacacgaaacagttttgaaccacaaaaattgggtggctgtgcttttcgtttgcgaatcctaaggatgttaaaggggcacaagcacttgaatgagagaacctcacaaatggtgagactctggttttctttttaggcgacccaacgtgtga

SEQ ID NO: 129077 - DNA, 474 bp, Arabidopsis thaliana columbia
tttataatattattctttatatatatggttgacaagtcaagttaataccaacatataacttgtacacaattactaaaagaaaacccacacgtgatcataatgttcctttcatacttccgtcttttagtgcaaataacactggtcactccacagtagctgttgtctcatatgtcaactagcatataagttggttctttgatttttcaaacttcttaaatgtttgagagctacttaatattacgttgttatactaacataatagttttgactcggcaggtctttgaattatctataggtgctgcgtgcagactaacatggccatcggaccgccgaatggatcaagttttagatgaattcaccgatccagcaatcattgtccgttcttaataaactctccatagacagagttcgctaataaaacttaatttaaaataataaacatacccaatacatgacttatgacattgctgaaca

SEQ ID NO: 129078 - DNA, 285 bp, Arabidopsis thaliana columbia
tcaccacaacctctctcattgtcggccgctgatctgagtatggattcaaacactgcctaaccacctccaacagtctctcaacaacattttcctgaaatgttttcagtgtcgggtccacaatatctcttgtgggcttgggttcaagaagcatagaatccgggtctggtaattttccactgatgatttcgaataaaacggcaccaaagttaaagacgttggtatggggatcaagcaacgagggctctagaaggttcttgctcgaggaaccctccttagagggaaata

SEQ ID NO: 129079 - DNA, 302 bp, Arabidopsis thaliana columbia
ctaagcaaattaccaggaggtgagcttttatctgccgttgtgtctccaagacgtttcttagtgttttagactctccttgcttcatggagagacatcttcgtgatgatcatgatgacggtgaatgttgatacatcaattgggcctcagtgatcaaccggcccatttcaaggaataacgacccagccccgaccatcactttagaactcgagccggcccaccgggccgaaacccggcctggtcaagatgtgagttcggctgcgcagaaaaggggtactctcgggaattcaccttgcgtaccctac

SEQ ID NO: 129080 - DNA, 412 bp, Arabidopsis thaliana columbia
  unsure (1)..(412): unsure at all n locations
catttaagtccacttaaattgttgggtgaagtgattgtctactttcagacacattctttttctgcttctctgagactctgtcttagtttgaaatcttttttggtctgttttgcttcagatgcaattcctacaataaaggctatgcgtttgcaaatgtttgtggcaatgaaggctatgccatggtacactcttcttccaactgtctccgagagtatgattgaacgtggttggaccaaatgttttgctagcataggcgaattcggttggattctgtattttgtttacatcgccatctatcttgttttcgntgagtttggtatttatttggatgcacagagagcttcatgacattaagcctctctataagtatctccatgccacccatcatatctacaacaagcagaatacactc

SEQ ID NO: 129081 - DNA, 460 bp, Arabidopsis thaliana columbia
aatgaacagtagctttggatctggagattggattgtgatcttatgctttaactattttctgcaaactttaagtttgttcattaagggtttggcatcgaagaagttcatgaaaggctggtaagcaaaagtatcaactttgcatttgatcaagttgtcacagattcatgatttgtgctcatagtttgaaatctcaactgctttttgcatataaaactctcaattcaattaccatattcctctttctctctcagattactggcagctctagcgcgatttttaaatcagatcatcccgccatgacctcacaagcttgtctcttcagaatcagctcaaaggtatacacaaaaccacacgaatctttaacaaatctgtttgttggtgctctttgttattaaattcgatttgttttcggatttgttcagatctttattattagcatcatgtcgatggattctctctg

SEQ ID NO: 129082 - DNA, 388 bp, Arabidopsis thaliana columbia
cgtgggacacaatcacacatgaaaactatacaaatattattccctcatgttaatagcgattagtggaatgattgccaatggacaatgcggccttcttatcccttgttgttttttattgttttctttttcttgtaaaaaactttgatactgttttagaattaaaaaagaggtaaaaactttttttcttctaaacgatgcacgagttctttaatgatgaagattgtgaaacttgctatactcatatgagatgggacctgtattttttttatttatatataaactattattctctcactgacaagaaattcccaattttgattttgattcatgtttttaaataacaatatctttttaaaaatatctctctatcttgcttttttaaaaacac

SEQ ID NO: 129083 - DNA, 482 bp, Arabidopsis thaliana columbia
  unsure (1)..(482): unsure at all n locations
cttagttgccaaaaaaaaaagataggagattctgatagtgagtgaagatcatatgaattgacagggaacttttccgaatggaacagaagttgctgtgaagaggctgtctaaaatttcaggtcaaggtgaagaagagtttaagaacgaggtgcttcttgtagcaaagctccaacatagaaatctcgttagacttctggggttctctgttgaaggagaagaaaagatacttgtctacgagtatatgccaaataaaagtcttgactattttctctttggtaagaaacatatgatatataggattagattctctgaaacatttgtttttgatctcttacccatagtctaatggctctatacgcttggatgtgcagaccatagaagggaggggtcagctggattggagaacacgatacaacataantcaggggagtgactcgagggattttatatctncatcaagattcacggcttacaatcataca

SEQ ID NO: 129084 - DNA, 295 bp, Arabidopsis thaliana columbia
cagaattaatcaagtccaatttttttgtgacaacttatacttatcaaaaatccaaatggatttggtttaagatcctgttgttgcatgataatgaaaacgcaagagctagagttgaaaaagcttctaaagtagtgtcattataaagcttcaaaaacataagagatccacgtacttagatccacatataacgagcaagtaaacacattccccaatagaagcttttcacttaaggggaatgaatctggaagagtgggttgaaccaacaccaggcctaccgtgcttgaccggtttgttt

SEQ ID NO: 129085 - DNA, 266 bp, Arabidopsis thaliana columbia
acactcgaaagctatttgatcattataccatatgaaaatccatattatgaaccgtttgattcctgtttaataagcgacttggttactacgaaaccgggctccttgcatttgggctctttttttcgctcaacgctttagcaaacgcgcctatgatctgctgctgggactcaagcatcatttggcaatgcttgagctccatctccattctcgacttctccatctctctcatgatctgcatgttcgaattctccaccctcacaaacatt

SEQ ID NO: 129086 - DNA, 152 bp, Arabidopsis thaliana columbia
ggaaacacgcagtcgcatacatgtaatttgccaattgagtcggttgaaacggatcaaagaaaatatgagtattgggtgccttacacgcgatcgaaccaggcttgcaacttgtcaattgacctccatcataaacgttaggacaacatgggctt

SEQ ID NO: 129087 - DNA, 360 bp, Arabidopsis thaliana columbia
cttaaatctctactacgacattatgttgtacatgaagctaatatatttagtttacatgtttttgtacacagtaaaaatttatagacctatgtccccctttctctcttcttcccacccaacgcaggaaccgcaacgtgagagcggtcaagccgatccaatggagagacagagcgaagtttctctgtaaggggacaccaaaactcagaggtctcttaaaaatggaagaagctaaagtttgtttggtgagtgtgttttgtcatgaaaccaattgagagcaaggcattcttatgggtgagaatacaacaggtgagtctcgccgtgatctgatagagagtaattttctggccacattcctttttc

SEQ ID NO: 129088 - DNA, 354 bp, Arabidopsis thaliana columbia
tattctttttttttctcttgcctcaacaaatttgtaattgcaagttttttcaaatccaaaggaaagaatctcaggcacaggaaccaaaggtgacaataaaatatgataataggggtatcgctaaattacggcgagacttctacaactgtacttttgaaaggcacggcaacagatcttttctagctggataggccattcctctacaagaacccggggattaacctccatggcggcatggaaatccaacatcgatacattagacaccgctcgcttttgttgacttgctaaactcaaacaaggctcgatcagccttctcatatatgcattcaacccacgagtaagaagattagcaga

SEQ ID NO: 129089 - DNA, 374 bp, Arabidopsis thaliana columbia
tctattttttttttttttttttttttttttaaataaatccagttcttgggtataacagaacttgctttgataaaaatttacacttacacttgatatttcacacaaaccaaataccaaaggtacaaactaattacacttgacacaaactttatttagtattctgctcgtatttataaatctttcttaagcaatatgaacaacacgtgaggactgaacgaaaccatcgacccgtttcttaatctcatcagggtttgcgcccacgagtttgtccatcgcattaccatccttcaagaacaagaaagtgggcatcgcctttacctttagttgacttgccacttccttaacttcatcaacatcaactattagaaacagag

SEQ ID NO: 129090 - DNA, 354 bp, Arabidopsis thaliana columbia
tcttttttttttttttttttttcgtttatgagttgggcaagcagagcggttatttatgttacagagacaccatgcagactgaacatttgtgtaaaaaatttcgtcgaagctattagtactcctagaactaatccaatctaaaatggggtgttcttctacaaatgatcacctagaataaatcactcctcgactaactaaaatcttctcttcaatgagggtttctttctcgcctaatgattgagattgatgttattaaaaacttcaaacgcacccgtacatgaatcacaaaacgcgttgcatcacccaagacgcgacagccaaaacgccaatcgaaaacacggcaaaaagagttgg

SEQ ID NO: 129091 - DNA, 327 bp, Arabidopsis thaliana columbia
cagactaaccacgtactggaaggaaactttaaaaatatgtttcatagtcgatatctagagcataaggatcagagaatgacatcttggcatgcgctagagagccttggaatagtattgagttcttttaggatgacagattcttctttctttatggaatcatccaagcatagggtcagtttcttgaggattgttgaattctcaagtaagtaactcactagtttcatctccatcgcctctcctttcaatggcctttctatcttaacatactcgagagacgataggaaaccccgaggtacagacaagatattaattccctccttctcccga

SEQ ID NO: 129092 - DNA, 345 bp, Arabidopsis thaliana columbia
tttattctttcgtttttttgttatttgaaaaacttttaatactttagatgttattttttatacaaaacatgagatgcatttgaagaatttttggtttattatacattaagctgcaaatgaagacagttgaagatgtaacaatatgaacatgtatgagagttatgcttctggacttttcaactaagtaggggggagtttggcacatcatacaaagtacaaactagtaagatggttgcgtgaggaatgaaaggaaggtgtctcgtatgtctacttcttgtgggttaactcagaggagcaatggggtctatccatccttcataatctttgggagaaccagcaccaggc

SEQ ID NO: 129093 - DNA, 284 bp, Arabidopsis thaliana columbia
tctattctttctttttttttttatatgacggaagggagtttttgggtccttcttaaatttgtggaagattcaaatggataaaacccaacattagttgagattgagggctctttgtgaaacatggagcacagtacacattggattgaacagaaaggttttatattaactcaggggatgaagatgacgacttccctgataccggtttggttgcatctaactctttgtttccgcctttagtgtgtcgtgagtttgttgttgcctctgatttactacctttagcacca

SEQ ID NO: 129094 - DNA, 321 bp, Arabidopsis thaliana columbia
ataaacgtaaaggggaagatgcatttgactgtttcaaagaaatgtctagaagagccacacgagagtttacatatagtagagaggccatgtctctgagattccagataactgataacaatggtcagatttatacaatcgaagatgacagaaaaagaaaacagtagttcgtaataatcaggttagctgcctgatttgctctgagcttggaacataagaacatacaggtgggaaacaactggtgtatgcttcttccccaatatccacttttttgaagtatccgttcttcccaacaacgtaagccatgtcgcgatcggtagcctc

SEQ ID NO: 129095 - DNA, 417 bp, Arabidopsis thaliana columbia
tctattcttttttttttttgttttttgacatagaaaaatatatgaattttattctttgtgtacatacttatgacctctctctctcctataagcaatggtgcaaagaaaaatgatctacacacccaaaaaggttttcaataaccttagaacaaagcacgagcatgccccatatatgattgatactttgcttggcatgttcctctgttcttgtctttttactttttgcccttttcataaacaataattaaatgttcaaataatgatgataacaatcaagtcttgatgcttacgcttggcgacttttggtctggagctttaggtcttcgatttttcttagaacccgaagccgaataagaagaagatgaaggatgattaccacttgattttgctcgaatgtgtgaacgatgattatcaggc

SEQ ID NO: 129096 - DNA, 270 bp, Arabidopsis thaliana columbia
gggaatcgacaagataattaaaaaagggcaagagcttgaaaacttatgtacattgggattaatataaacaataaaaagacttcaagagatctttggaagaaggaaaaaaaatacatccataaaatgaaccgataccagcctccgactacaactccacaccatcatattctacttataaaagagcttttcatattctactatataatacctgtaacctttttatggtttactttataatatctattaattattattagatagataataagg

SEQ ID NO: 129097 - DNA, 119 bp, Arabidopsis thaliana columbia
acattgtttacatgggtttttcaagtacatatatcttaacccttttagacaagtttttgctgctataaccaaatcttcaacttaaacccttgaaaccatcggtaagtcttgatcactgg

SEQ ID NO: 129098 - DNA, 260 bp, Arabidopsis thaliana columbia
tcttttttttttttttttttttttttttttaggagtaattatgaggctaatgttccattttctaatcatttgtagtctgtttcatttgggtttacgtttgttatttctaaccttatccataacactctaattgaaaataaatgagtacctttattagttgttagactgggagagatccgccattggcacccgctgtaagattcagaatcatggtcggagcctttacagcccaagcattaggagcttgattcaaggaagct

SEQ ID NO: 129099 - DNA, 192 bp, Arabidopsis thaliana columbia
aaacccaaggcaggcaagaaaataaaaaccagttgcatcggatctctcattgatgttattacccttggcgggattttatttgaaaggggggatgaattaaaaaagggcatcatcaaagccggacgtaaaagtccggacggtgttacaaaaagaaacacaggatttggtaataaaatgagcttcaacacacgt

SEQ ID NO: 129100 - DNA, 258 bp, Arabidopsis thaliana columbia
tctattttttttttttgttgttttatgtcttttttttggaaaaaggaacttttcactgattataattgagtttgacaggaaaaagaagattctactctttaaaattatctaaccacaaaagcgagtatttaaagggttggtctttttctttttttccattgaaataacaagactttaagggtttgcactctggagagtccactcctttccaaaagactcaatcctttgacgttataacgagtaaacccaatgcaccta

SEQ ID NO: 129101 - DNA, 362 bp, Arabidopsis thaliana columbia
gggcaaagatgcaactaaattgaataaaagaacaaaaccaacagattaacttttcatacaaccattcccactagttgttagttcctgtcaacgtaattctagaagccggaaacatagagtaagagagaagagagacccctgttatgcaagtaagtaacaattttttggattgagctttttttttttttttaaacggtttttttccgaacgcgtttttctaaacctcccacgagtcatcctgattggctcctccatcactggctcctttggaccttccgggtggggattttcattccctgattctgcctttccttccactttttttatctgcattggttccacttggggggttgactgggggg

SEQ ID NO: 129102 - DNA, 352 bp, Arabidopsis thaliana columbia
catgtcgggcattttatttgactcttaggagtacatgctgtatttatagattaaataatagagttcaagctcattaaatacagtccgttgaggatacaatgcttcagaacttgacgccacggaacagcttcaattgtttcttgaagcgcttagcttggccaggggtgaactcgttcatgcaagcatcgtcagtgtagtccatgaagttgtggatagggtcaacaccatccgcagggcagctgtcagagccaacagggcatccgaaggcggggccagcttcagcaggggtatcggccacgcggtcacccttgccatcacatcctccttggaaggtgtggtagagaccaaccca

SEQ ID NO: 129103 - DNA, 156 bp, Arabidopsis thaliana columbia
cgggagtgtcggctctgttatcatcttctgaagaaattgaataacagagtctaacattataatgtagaactacaagatggaatgatcagattacatataagcttatttgggtaaaactgagactaacactaaaccccataagagaggaagtatgaa

SEQ ID NO: 129104 - DNA, 389 bp, Arabidopsis thaliana columbia
atataaatgaagccaaaatcgatcactacaacaaactcataaacatgagcaacgagtacgagtatctgttcaagcttttgttgatcggtgactcctctgtaggaaaatcgcgtcttcttctccgattcgctgatgatgcttacattgacagctacataagcaccattggtgttgacttcaaaattaggacgattgagcaggatgggaagacgattaagctgcaaatttgggatactgctggacaggagcgtttcaggaccatcactagcagctattacagaggagctcatggaatcattattgcttatgactgtactgagatggaaagcttcaacaatgtgaagcagtggctgagtgagatcgatagatatgccaatgagagtgtttgc

SEQ ID NO: 129105 - DNA, 473 bp, Arabidopsis thaliana columbia
ttcttttttttttttttttttttttttttttaagaaaaaagttacttcttagttcttagggaatattatatatgtacgtatatgtaattaattatctactgtatcatgtagctctctaattaattggaagaggtcctaactaatttccctaatcactatacgaccccataccaaaaaaatacacacaaatccaccccccaaccaattaaaccatctatatttgatttaaatcaacttatccgtggcctccgatctaatgtgttcgattctccggcgtaaccttctccggtgatcgtgaattttccacagcccatgcctctagaatctgtcatcaactgtgttcctttcaagaatatatcagacagagcaccctgtacagcaacacggtaaaagagctcttctcctattgaactggccgcgacaatgagtataaactgccatggggacattccgaagaaaaagcttcttagttc

SEQ ID NO: 129106 - DNA, 193 bp, Arabidopsis thaliana columbia
gacactacacaaacttactttattaatcctgagtttgtcatacgaaacaaccctaaacagatagatagtctttgaagcaaaccacaggagaacactgctctgcaggtggtgactactggaagattcacacgcttttgacttaggtttgagaatcatcatggaacacggcttccccaagcgaaaggggactttt

SEQ ID NO: 129107 - DNA, 223 bp, Arabidopsis thaliana columbia
agttagaacaaagaaataggtttgagacccctatgaatatccattttacaccagcgtcagattgtgtgcactccaaatacatttccatcacaatattatttaaccgaaatggggagcgatcgccaatagatggacacttaataggtgaggtgtggaaaacatcggcatatgatcagtcttttccatctgaatcactaaatccgccggataattatgggtcatc

SEQ ID NO: 129108 - DNA, 415 bp, Arabidopsis thaliana columbia
tccgtttttttttttttttttttttttttttggggaagattcacaattatatataacaagctgcaagcctctttcaagttgctgcttcagcaggagatgagagttctcgaaggacaacaacggaatcaccaatttcaattgtttttccaattccatcgccgaatccgtctttccaaaccatgttctgcccaaagtatatctttccatgtggtttactctttggctgtaaaactctgtctgacctgaaagtcctcaaagactcaattggctcttgacctccaataccagtttcttgactaatcgtaggtaccttgcagcgagagcataattccacaccgtgaaaggtgaaaccgtttataaggatctctgtccataagtcttcagcaaatggctcacatccatcaacaaagatgtt

SEQ ID NO: 129109 - DNA, 168 bp, Arabidopsis thaliana columbia
gtctaaaagggaactgaaaaatactcaagaccccaaatagacataaccagcactgaacgagctttgaggtccaacctaactctatgttttcttaaaagccaaatgaagatgtaacagaccagaatggccatcagactgatatcaaaaacttgtggaaggccaaaaact

SEQ ID NO: 129110 - DNA, 197 bp, Arabidopsis thaliana columbia
gaagacgccagaaccacaaacgattttattatgcatacagcaagtattacaactcaaaccacataaaacattacataatcaaactttattcccatagttctcttcttaatctatagtgcctcaaaaacttgaggcagttcattacaaacgcaccatggtttacttaaaatcatacatacataatgcattacatgcat

SEQ ID NO: 129111 - DNA, 250 bp, Arabidopsis thaliana columbia
gttggttaccgtggtgtaattgattaattcaatgttcggcttcggcacatgcttgtatcccgacaaagttttgatccatgtacaaccaggtcacataatcatacaataaacaaccatgactcaccataagtttggactatcagttattacttttattaagaaaacataggcacaaatcttagaaactgaccttgaaattacgatctacagatccatgcatagataagacataaccgatccagctctcctt

SEQ ID NO: 129112 - DNA, 211 bp, Arabidopsis thaliana columbia
gcatgcatctttttcttacattttgggaacaacacatggggaatacacatggacagcacaccacagaacatcaatgtgtaaagaaagatcccctccttcatcatcatttacacatcctttttataaagcatgatgaaatcgttcctgctcatgattggtcaatgcagaacaactgctaactgcttctctgtggatagggtgctgttgctgc

SEQ ID NO: 129113 - DNA, 456 bp, Arabidopsis thaliana columbia
ggtctgaatgatttatgaacataaaagagaaaagttacgtcgcacaaatctgtaaaataagcgtgtggatctaaacaatgacaaggagacttttgactttttgttgttgttggtctccttattttagaatggaacagctttgtgaatctttctacagcccaaaccggtgaagaatctgaccggtattctcccaattgttttattttcctcaggctttcttttgtttcttcttctggggccgaggtggcgggaagatagaacggaaaagcaatgcagcagataatgctcctacgaaagaactgatccagtagacgtagatatggtcccatgtgttgtgggagctgtacatgtatgcccatccaaacgcaatggcagaaatttgaatgatgcgtcgccagcacagaggccatgcgatccgtcgagttatcatgaatcatcagagcaacgggcagagcc

SEQ ID NO: 129114 - DNA, 100 bp, Arabidopsis thaliana columbia
ggattctaaacaagtttaatgtaataagtatgtataacaaaagaaatgtccaaaggtgcattatacatttgcctttagccagaaatttaagagaactgat

SEQ ID NO: 129115 - DNA, 469 bp, Arabidopsis thaliana columbia
aatgtaactaaacctgattttattatcataccaattcttggtacaacgatgacacaatctttttagcttcatcttactttacagaaactgaaaaaggtctataaacaaagaaaagaaacaagaactaatcaaatcctgctctagtggttagtgatctatatcattttaactgatacattcttgaggattggcatagaagtaatcttcttccttcggtctaacggagataactttccgatgtgttggttctcccattcgtcgtccttgatgggcatccttgacagctactgcaaactgatcccaagagagcgttttgttgttatgcaagtctaaaagctccacaagtctcttccggtctagcaagattgttttcttaaacccaaggtacctccgatgaccttcgacaacttttgccatgtttccataataggtaggaataaaagtgttgctggctacagatactatgaaa

SEQ ID NO: 129116 - DNA, 249 bp, Arabidopsis thaliana columbia
aaaacaaaacattcctggtatagattaaaaaaaataaggggcttatggaaacaagcgagcccttaaaatagggtccatctcaggagggaaaaggaaaaaaaactcttggggacaaaacaggaaattgttgaaatacaaacccataaagactgatagtaagagagtaagagagaaagtttttagtcgacttccttaattttgggacctgcacctccggcggaagggggaacatcctcgtccattcctcct

SEQ ID NO: 129117 - DNA, 340 bp, Arabidopsis thaliana columbia
ggagagggaccaaaagattacaaagacttttcatatattggggtgccaacgtccaaacgacttaaaacatactcgggatattattcctcaatgattttattacagataagagcacaaaacttcaaatctttatatcattacacagcgatacgagaaacattttaatttcatgaattagttggtatagttacttataactccgctaggctccagtgccttagcttccggcgccggctctatgtccttagacggcggtaccggtgctccggtgagctccaacggcaaatcattagccaaccctttaaggtaaaaagtgtagaacagttttgtcggatacaca

SEQ ID NO: 129118 - DNA, 227 bp, Arabidopsis thaliana columbia
atacggctgcgagaggacgacagaaggatacggctgtgagaagacgacagaaggatacggatgtgagaagacgacagaaggggacacactagaaagaaaaagctcacaactttaacctttctggagagagaagaacaaaagagggagagggagagaaatggaaggcaaataagaagatgtacgagtgggagctaacaagtttccggagaggcagcccatcggtacat

SEQ ID NO: 129119 - DNA, 187 bp, Arabidopsis thaliana columbia
gggattcatcaaattattatttttgatttagataagatacatgagcataattttcatgacaagaaaacagaaacataacaaacaaagatagatgcacgggttttctgcccttctgtcgtcttctcgcagccgtacccttctgtcgcttctcgcagccgtacccttctgtcgttttctcgcagccgta

SEQ ID NO: 129120 - DNA, 172 bp, Arabidopsis thaliana columbia
aaccagaaataaccacagacgttcttgatcttgacaaacataaaatctcaaaacagtatcagttcccttctgtcgtcttctcgcagccgtacccttctgtcgtcttctcgcagccgtacccttctgtcgtctctcgcagccgtatccttctgtcgtcttctcgcagccgtat

SEQ ID NO: 129121 - DNA, 103 bp, Arabidopsis thaliana columbia
gaatcatgattctctgttttaaccaatatcaagcatttttaagagatcacaccatgtcacaaagtagatagcttaaatatgatagaaacacaagagcaagaac

SEQ ID NO: 129122 - DNA, 177 bp, Arabidopsis thaliana columbia
atgaacgtgaaaataactggcaaatgctctgatcatgatcataggtaaacattttaacaatctcaagctacaattctttttttcctttggttaaccagatctttgttttatatatgtgttggtgtatattacatcagagcagaacacaatgttgcactataaaatctattgggattt

SEQ ID NO: 129123 - DNA, 109 bp, Arabidopsis thaliana columbia
cgggaaacataatttcagattcacgaatttgagtctgaagtgctcaagatcaaaaaccaagaataatcatttacaggaaaaatgccgaggtgaaaatgcttaaccaagc

SEQ ID NO: 129124 - DNA, 204 bp, Arabidopsis thaliana columbia
aacatcaaattatcgggtaaactccattattatcatacgctaattacacagttgtctctaacatagtttaccattatttatagtttcaacatattagtagattacagaactacgcttgcgttattgtacattttaaactccttcctgacattacaagcatagaaattcaccgttgacaagtctattgcccgaatttgggttttg

SEQ ID NO: 129125 - DNA, 407 bp, Arabidopsis thaliana columbia
gggttactgatctaggaatgcattctctaaaccatgatcatcaactgtaatttgttcagaacattgaaaaacagaatccgaagatataaaatagtcacaaactcaaaagcaagacttaggagtttcggttatttaaaagaccctcaggttctcttagagatggctatcaggttgaagttgagagagcccggattcttctcgatcatcttctttatcacttttgttgcgtccttcaggagggtagctggaggggaagcaccgtgtgaaatcggtcctgcctttcttccatcaagttcatagagctcaccttctacacaagctaaacaaatgaaatgcgtgtctgcgtcttctgaagcaggtgtatcaccagctataacagctacagaatgagcatcttctatttgact

SEQ ID NO: 129126 - DNA, 283 bp, Arabidopsis thaliana columbia
tacggcggcgagatgacgacagaagggtgcggctgtgagaagacgacagaagggtacggctgcgagaagacgacagaagggtacggctgcgagaagacgacagaagggggaagccagaggtttcagatatagtaatcttcaaggctcctccaattttgctggaatatccggaatatggctacagttccaatgatgtattcataaaaaggatagtggcaagtgaaggtgactgggttgaagttcgtgatgggaagctctttgtgaatgacattgtgcaagaaga

SEQ ID NO: 129127 - DNA, 204 bp, Arabidopsis thaliana columbia
acaacatcataacagaaagcttatttaaaaaactttggcttgggagtttgatccgcctaaacataataaaatgtttgttccaaaaagaaacttattacaaaccctttcatttgtttacaagatttcagacatttttttttccgggggggacttttcaggggtgagctgacgcttgagtcatttcccaaggatgattttgggcta

SEQ ID NO: 129128 - DNA, 456 bp, Arabidopsis thaliana columbia
caatggtaaattaagacggcttttattcttagttttcatttatttaaataggaaacaagtacaagaaaagctagcttggaatcaacgatttctacaaactagggaattgggaaaagtgggagataggctcctaaaccttaggaagaccaatcctccaattattagcacaaaaacacttaaaaaacagaacacaattggttccaagctccctggttttgcattatgcaaaacttaacttggaaagtattttgtgttagagaaatcttcaaattcaatctccatcttcaatgtatcattcacaagaagacctttagaagtatccttaagatcagcaaatggtacaaacttctggaatccccaactgtttgcttgatccgaccagctttcaactttcttctccatgtgtttagaatctctctggtttataatccgtagcttagcttttaggtaaatctt

SEQ ID NO: 129129 - DNA, 344 bp, Arabidopsis thaliana columbia
aagctcaaaagatctgatataatgaagctgaaagattgcatccgagtagcgcaagagactcacaacaacctaaatactgataagccagagcaaactgttacaccagatccaaaagaacaagttgtatattgaaatgaaagatcagttactgagctttttctttggcttgactttaaacgccggtcactgcaaccgaaattgatcttggatggaccagaaccggcgagatcatcgctggttgaagagctaccaccagcgacacttgctgttataattgcaccagacccgatcttgtccaaaggtctgttaccctcctttaaatcagaaacccacttatcaagacc

SEQ ID NO: 129130 - DNA, 264 bp, Arabidopsis thaliana columbia
aagggaaaagtatctcacagcttcacattcatgttttattcacaacaagatcaagccaggctgcctgaaaaatcacacaaacaaaacccattttaaaggttttcagagaagaatcaaaacttttacagattaacggggggaaaactcaaaaacagtaacatcatttgacgacatttgtaacccttccgttgaaaaaaaaacatttgaaggtttgacgaccctttccaacacaaacccaggccttaaaggcgtcgggggggtaaa

SEQ ID NO: 129131 - DNA, 239 bp, Arabidopsis thaliana columbia
ttttttttttttttttttttttttttttttttttttttttttttttttttttttttttttttttttgtctccatggaaaccatccgttttgggggggtatgatttttccccatttaaaaacagcctttgcttgaccaataaaaacaaaaagtcccctgaaaacatgcctgaatttacaagtaaggacccagttttgaccccataaaaaaaagacattggaatgctaaggaagcttgggg

SEQ ID NO: 129132 - DNA, 320 bp, Arabidopsis thaliana columbia
aaaaacggataagcgttacttaactatttacgatcaaaccatacaggttcaaaataggacttcccgcgtttgaaaaacatgaaatcaatctaacacatgtagacttatatacttttttttgagggcgggggggtaaggtaaggtttatgaatgaggcaggggacatgtaaaaactaaaacccatccaaaattagatgaacaaacttcaaattgcgaccggggtaccaaaacaaagggggggggaaactgtattaaccatgcttttttttaacgatcacgatctacatttttgatcaaaaaataagaggggaggaaccggg

SEQ ID NO: 129133 - DNA, 337 bp, Arabidopsis thaliana columbia
atcaacaagaagccattagtcttccatcatcattttataataacatgttactttcactacacgttaaaattcaaaacctaacaaagtttttggggcacaaactcaaaaaccaataaaacaatgattccaaggttaattcccagatggtcttccttgggcaccattagaatcttgaggattattgttaccagggcctcccattgatcctccaaacatttgcatcattgatcgtaatgcacccgataaatcttccggcatttgctctgggcctccgagatctatgttgatattcccgcctacatgtatctcaggctcatctgcaccatttttggtacca

SEQ ID NO: 129134 - DNA, 173 bp, Arabidopsis thaliana columbia
aaaaaagataaggcatgactttgttttgattcaagaaataaaaacccaactgtggtacaaggggcgtataaaaccaaacgatttcatttactgtggttataaaaccctttggggggaattttgaccaacaaaatgttaatttggggggggggttttactttccacctttcccg

SEQ ID NO: 129135 - DNA, 292 bp, Arabidopsis thaliana columbia
cttaaaattctcattttcataatcatgattcatacatatccagagaaatcataaaagagaagacatgttcttttctttttcttacaaacgtttagaaacacgatacacaaagcaggtcagagatttggatatatgtacatatagaaatgatctcgtatgaggggggagttttgttttcagccatggacgatgagtcgtttgccgcaggtggaacagagatgacgacgtttggatttattagagagaggaacgaagcagaatctccactggctatttacgtcaaccacttgaa

SEQ ID NO: 129136 - DNA, 205 bp, Arabidopsis thaliana columbia
gacaaaaggttgatgtaagaccatgacaaagatactgaaaggggattatacaaaccactgcctacaacagggagtgcttataaagcctttaagaagaactgagatagcttgtctgattttatcatatgttggagttgcatcaaattcggcaacagattcagaatcaaaaccacaataccactaaccttgcattaaattcttctta

SEQ ID NO: 129137 - DNA, 387 bp, Arabidopsis thaliana columbia
ggggcattaaagaacttccattaggcatacactagctaaagacatctcacaaacggtttcgagagttttagttcagccctacaacatctctcaggacgcgggaacttcttttttagagttgtagagaaaacgtcttctgatacaactgactaacaaagtcagaagaaatcactataaatcttacaatggaaccttgcccagcacgttgctcttgaatttccatatcttcatgagtttcttcacagtagatttggtatatcgactggtgctactaaaccacacgtctcacatctgagattgaaaagaccattgccctcctccgcgagagctgtgtcaggacttttgcagcagacgcagattacgaacgcatcaatgtatttccggaac

SEQ ID NO: 129138 - DNA, 238 bp, Arabidopsis thaliana columbia
ccaggaaggccaatccaacttcaaaaatctttatggatacctttttttcatgtatccatctagttctagtcttggggagatatatccaggactaaatgagtgttttttttgcacctgataaataaaataaaaggtgtttgggaggaagctttttttgttgtagcaggattcaaatggaagagcttttccatttttattttaccacctaattggccttggcagtttgaagcatttccac

SEQ ID NO: 129139 - DNA, 470 bp, Arabidopsis thaliana columbia
gcaacccaaaaagtaacaatttgaattacttccgcaaatctaaaataatatctagtgaagcgaatatgtgtttctttgataatcggtgcgatcagaatctgacggtggtggtggatgtggcgtggtggatggaggctgttcctccacaaatcatttctccggcgaagccatcggtttctccgattcttgagacgattttagaaggcggtgagaccgaagaagacaatcaagaacaagaaaacgaggacgtgtaaattgtaatgatcattttgttactcggtcttgggtttaagatagactcttgttgttgttgttgttttttctataactgtataagatgagattttgtattgtatcttttgtacaatcaaatctcagttctttgtgaaattttcattcaactttcacatcttgtacgctcggtgatctgttgatatatgctcacgagttggtaattaaagacacatctt

SEQ ID NO: 129140 - DNA, 373 bp, Arabidopsis thaliana columbia
aagacttataagtatatgttctctattatacttgatccaatcatctggaagtccaagaacaattcttgaatcaatggaacaaaacaatacatgtaacatgatgagtatgggggtctattctaagctacaagccacatgaagaatgttggccaaacagtgagtgcaatcgaagccaaagagtaagtccatatgtaaatagatcccatctgatacgttaccaagtaagccatggagagagcaacataacccattccatatttctggcaactctcaggatctccaaagggacctcctttttctttacaaacagctgggattataatcagtggcatattccccaaattcccagcagcacaacaaccaagaatgagac

SEQ ID NO: 129141 - DNA, 274 bp, Arabidopsis thaliana columbia
ctctgtaatatacaaactttatccactaatgttgatgatgcaagcagggaatcaaaattgcgtgcagaacaaaatgccacacatatccttgtccttataacacaacatggtgtcaaacaacaatcaacttctctataaacttactctacttacatcttcctcattcattcttttcccccacccatgcagagctttgtgggtgttcatattatgggcgtgtataacatattagatccctgcttataaactttggggagccatggactgctgttgt

SEQ ID NO: 129142 - DNA, 175 bp, Arabidopsis thaliana columbia
cgtttgcttggggaaaatgataacattaatttcagccaaagcaatatatacagaaaaaagtagagagagtgaatcaattttggtggagaaagagaagattggagcatccgtacgtgtacgcatacccgcaaggtaatggccgctcgggagctctgactccacaagccggaggagt

SEQ ID NO: 129143 - DNA, 387 bp, Arabidopsis thaliana columbia
ctcaacttctgtaatattatcccaaaattttgaaattaagaaagaagctgtgttacaacaaagattactacaacgagaaataaagaattcaagaaacatatgcaatgcgtctaaaaactgctctgaaagtctgtccaccatttctagcaactttctgtccttcctcagtagcactgcatagaagctcaacaacaggatccgaaacaagctcttcttgtgttagagattcaaacatcggatgtttctctaagcaagacttcatccactctccaagctcctctacatcagtgattgtgtaaataatcccaccagctctaagaacataagcatactcatctaacaaatgagtactaatcactctcctcctatgattcttctccttaaaat

SEQ ID NO: 129144 - DNA, 456 bp, Arabidopsis thaliana columbia
aataaaaatcataagcctcataagacaagtttgctttgaaattggttcagtatacaaatagaagataacaagtatacaatgaaaaatgagcgtttgaaggtaaatactgagtacaaatattcctccaaattcacaattgagggtgatgtttgcctagaatcataacaagccaacttttctctgaatcaccattgagcatcctgtgggaacaactcagaaatgaagcctagaaaaagttacaatacaattatatcaaattcaagaatacagactgacctagatcataatgaaatagaagcccctccaattatctaatgacaaacagaagagtcatggaaacctgttatgagatgccccagcaggaaatgaattggagcttcagctactgcgtctgcatatatataagcaagtagccaagttctgcattcagccattcacattttagggtacttaaac

SEQ ID NO: 129145 - DNA, 473 bp, Arabidopsis thaliana columbia
aataaagatttctgttgagttattaattaacattgtatcaaattaacaacagagaaaccaacatagagaacaaaatggctcacaacatagccattccaactcagttgattcagcgcgtaaaccgataccaactcaggcttgaggcttcagggcttcatggaattcataaggtctctaataaattatcagtaccttggagctccaccaagtgtagcttcaggcaacttctctattgagtacttgcgattagtcacatacatgatgggcacaccaggaatctttcgaatccttcgctttaagtctctatcacatgtagccactatgaagcatttatgctgagtaactctgtcaacgagacagtcatcagcatatgtccctttgtgtatacaaggtagtctttcgaagtgaggatcttcgcaatccttagagctacacgatacttctgacctaacttctctaactcagccatgaca

SEQ ID NO: 129146 - DNA, 380 bp, Arabidopsis thaliana columbia
gagaaccgaatgcgtggtcgtttttatttatatacaaaccacacaggacaaaagcaagccaagagaagaagagatagagcgtttgttatggttgcttcatctacacggaagcttctttgaagctcttggtcaaccagatggccgtctccctcgaagacaccctctcggctccaaagggtttaagcagaaccccgagctcatcgtaccgttcctgctgcaaaagctttgcactgaactccagcagtccctccagagcctccgcacgctgctgatacgatgacgtgtcgaaccttctctgttttacctccgaaactgaccttttctgtacagtacacttgtcctttgtgatcgaaccgttggaattgtcctcaccatgaggc

SEQ ID NO: 129147 - DNA, 186 bp, Arabidopsis thaliana columbia
gaggtaggcggttcgacatcaaccagctcggtggcgaagattctatcgatcccgggctgatttacatgatacaaggcgtattacctatgctgccgacaacgactcctgatggagaatcaatgagaaatgggggagaaaagaaaaccatttggattgtagaagacgaaggaaagctctccaataaag

SEQ ID NO: 129148 - DNA, 627 bp, Arabidopsis thaliana columbia
gtaacataccactgactgctgccgctctagctgatcctaacgcccttctctttttttttgtgtctttcgggttttttgggaaacctcacccagatattgggcctggggtcaactttaattctgtggtctatgggcccgctgctagtcccataatccttttgagttaacgagactaatcacggttcttgacttatttccaggaactggtaaaacttgctctagcatctttctccccctttttacatttctaaaaaggttttttaccaactgggttatttacggggggtagaccaaatggaataaggggtacacaccgccatgaagcttttgtgccacgaacctggcaagattggttcatgccagacgtgtgagcccctttcccccaaaacagacctttcaaacattaacggtaatggggaaccccttttccaatagggaaaacactttatcaacggggttgaatttttcaaaaggccttttttttttctccccaaaggaagcgttatggccttttggtaaaattaaaagggaggaacaagccttctcacaaggcttttgaaaaaggttttaacccccggaaaacccccagccttcccaataattgcccgttggcccagaaacccttaa

SEQ ID NO: 129149 - DNA, 641 bp, Arabidopsis thaliana columbia
tatggacgagcttgacgtcgcatgcacgcgtgcgtaagctgggatcctctagagcggccgacctttgctttcgagaagatgtattagatttgtcagatcggaaggttctactaaccaaaaggtaattgagttttcaatgtaaacacacagaaaaacgtgcattttcaaaaatttcagatacaaagaaactaggtgtcaatggattagctttttaaccgggctgtcttgagagggattatctgaaagtttgataacctaacggggcttgtgaaccgactagatctggtccgcattatgtagccaaagatggcattcatgggaacatattgctgagatcatttcataacgtacttggactggcttgcttataattgatcccgaacttcgctctatatatagcttgcataaaatctacccgtgccaccgatttttctcctttactagcagcaaggcaagcagcttcattgacaatattggcgagatcagaacctacaaattcgggagttaaagaaccaaccatatcacatatgagaaatgcattttctcggacgcgtgggtcgacccttaaatgtacgaacgttacctgcaggcgtaccagatttcctttatagtgaggtaggattagagcattggcgtaaatc

SEQ ID NO: 129150 - DNA, 495 bp, Arabidopsis thaliana columbia
ctgcaacatatggccccacgactagcgcctgttttttaccagtcctgtggggaacgcaggggcaaacttggaccaaaaggggagtaaaaacttagcaagtacttagattggcattggttcaagctggacttgggcagataccccagaaaaaactttaagcacaacttttaccgacccaagattgaatttttcagactaacaatgatacgacgttttgcgggccttattcactgccttctacgcttctaatagacttaaaagcaagcaactgcttagcgactatcggaagcaccgatctagcattgatcaaccctcgttgctcaaatcttgctttagaactcggcctctcggttgaaaacatccaaaagttagaacggttacacaggctttcagccagtttactgctccggttcccttaaatcttctaaacttaaatcccgggaatgcatgtaaaatgacctaacacttacgctaataagaaccttttaaaccccc

SEQ ID NO: 129151 - DNA, 802 bp, Arabidopsis thaliana columbia
agctatgacgtcgcatgcacgcgtgcgtgagctgggatcctatagagcggccgacctttttttttgtttttgaaaaatgtagaacctttatggatatgattgttaatgagaatgctgatacaaaaacccttcatcagatcttacttagcttttagcgctcgattggtatcgtgacatgactaatgttgtacatccctgctgatgtaatcaattaccttgttgagcaccatatctgcgtgatgcttctggtctgatattgacatggcaagccaatagctctttttccactgtgatagcccatatgtggagctcatgaacaggcaccacttattgcattttgagcaaacctttttcgaactttgtggcgtcaatctctctgggtgtactctacatcaatacttctagaatgtttcgaattatgttgatggatgttcctaagacaataaccgaaaaggcaagtgtgcatatcatatccactatcttccattccggaattgtccaaatgatatcttctccaatcataacaccaacactctggatggaatccctaaggacatgcagaaaagctccttggagattgatggtagtatttcttttctattttgctgcgacatggattcttagatttgtccaacaaaaggctaaaaaacattccccatgaagcatgatgccttgtcttgttccattgacccatgactaatgggcccatgtttcaatgaatcccttgatgaatggttgatgaagatggaaaaccagttccccccacattgggctttattgatttgggggatgggttcattgg

SEQ ID NO: 129152 - DNA, 709 bp, Arabidopsis thaliana columbia
cacgaaccagcttgaggtcgcatgcacgcttgcgggagcttggatcgtatacagcggccgacccacgcgtccggtttttttttttgatcatgaggtaggcgacaaaggcgctggttttatttattcaccgacgtaagcatattgaacaataacctcggtaccggatgaaatggttgaattcacctaaaacattcagcaggggaaagatttaccgagaaatccgtagctctgaaactgccacaaaagaagtgcttgattgggactccatacttaacattttggccgagtgatggccatcctcttctacattgcgatataacaggacaacaaactctccatgagaaaaagacaacggggattgttccactctatgattacccaattcaaaaatacggatgcaaccctatgctatgccccatgcccggtgattctactcccggagctaagcccgtagaagaagcgaccggcatcgcgccacacatgggattacatccgtacttctgattggggtcatcatagctaggtgcaaaaaccgggtgcgtcctctgatgaactgttgctcgccctgtttccatcccccggggaaaaggattaccattcacccggccaaaactgaaggacacctttattaaaagccccattgtgttgggatcccagcccccgctaaaatggtaccactttccctagaatgtttcggataataatacaa

SEQ ID NO: 129153 - DNA, 696 bp, Arabidopsis thaliana columbia
agctccgacgtagcatgcacgcgtgcgtgagctgggatcctatagagcggccgacctacgctttcgttcatcattaaaaaattaagcaggactaatccatcgatatattcctacatactatcaataggcgcattgacgccttgacatttaatatctggaaaaagagatatggccttaattttctaactacacaacactaaaacacgaaccacagtttaaatatatcggaaacgatatggtctgggatggctccttcggattgatcctagaaccataacacattttactagacttctttgtttgcgatcttcaggatgttaaacttgcaaaacgcacaacgagagtttatatgataccatttatcggtgcaagggcattgaaagtgatggtgacaagggagtcctctaagttcaactccatcttcatattcacagagacagatgcaatattccgcgtctagtggagaaagcgagcgttcaaaatgagaatctgttccactattccgtcattattccccgagctttgcctgaaagctacttaacattgccactttttgtaaatctgaatttcgggatttcgatctatgtcgttcttcgaatgctccctcctgggcggcaaccgccgtttagaattggaacttattcattggaaagacaacatctaaaaaagcaggggcctgactaacacacagcctat

SEQ ID NO: 129154 - DNA, 784 bp, Arabidopsis thaliana columbia
gaacgacgtcgcatgcacgcgtgcgtaagctgggatcctatatagcggtcgacctacgccttttttttggatgtacaatttttgcctttattgtccatactatgaaaagattgacgcggctacatatttgctcggtaaaatattaaatcttacaacattgcatctaatgagttaccatacgataatgtggaaagaaacatcacaatttctacttgttcttactttctttgaactctttaggtaacattcaacaagaacaccgaagagattcaagtgtgtgaattgaaaccgatgtctatactttttagaaaccaagttaatgaccttaacactgaaaccccagaggttatgtgccaaagtctaatctctagcaagtttgtttggagcgacttatttgcagtcagtaaagtactttgctgttactcccttcaaacttggatgcagagcaacataacatgtagctggtgcttcctgaggcatatttttctccaaatagagctttattaatttcgggaacctcattaaaaaaccagtgtgttggaagaaattggcgagaatgagacccaggtgaaactgaatttgctgatgtgttcactcctttatcctgaacttgagggagacattattaccaggcaaaatattggctaagctacatttgcccgaaaacatcgcttatgcccagaaacttgcaaagtgtatttgggggctggctgaaattaggattccctcttttaggaaagaactaggattttgaatcttacaggattgatacctttcaaaaaat

SEQ ID NO: 129155 - DNA, 938 bp, Arabidopsis thaliana columbia
tatagaccagctacgacgtcgcatgcacgcgtacgtaagctgggatcctctagagcggccgacctacgctttcttttttagtttttgttttcacgaaaacatacccgaaggtttgtagtgctatttttttagtaaaaacacattccaatcgtgttctttttttatacaagccgtttacccatatttacacacactcttatgtctataagacaaaaaaataactcgggaaacagctggacaaacccaaccaaaaactccagtcttcgcagagcgagcactgatgtacggacggaacaagaaaagacctctgcctattaaaaaagcctaccccctgttctggtctaagaaaatggcaatacgtgttcagaatcggatgcttaaatgcaaccctaagtgacaaaccctctacgccagtaggagttactgttttgaactaacaaagcgccctaaactttaataggctacaagcaaaggcacattttccaaacactcagctgcaggaataaccccagtaaagactataaaaccccgacggggacccaaacggctgtgtctaaaccgaaccgcttacttgaacactaacgcttactcgagagaacaacccaatgctaaaatggttgcacacttccaactcggctcagggcgggacccaccactctgaaatgcgaacaatcctattactctacgttgcgaccaacccctgaaatagggtggcccctcctactcgttggagcatatacaccgaaaataattatcttcgcctacacaacaatgggcacgttaactactcaactccgcttgtgaatattctcgttgattcccacaccacacccctaattagacgacgactccacagaggcacacacctcccttaatataaataacgagtggatccgccattacaaacattcttgagtccgatgcatagccatcaaatc

SEQ ID NO: 129156 - DNA, 880 bp, Arabidopsis thaliana columbia
tgacgggaagccctggaaccgcaataacaggggctcgaaccaacgcgatacgttttttggatatataaactccaaaatactcacagcggaaccctaggaggcaagagtgctgacaaaagaataggaatactatcaaagagcataatccactataccagcagaaaacagagaagtcctcataccagaaggcaaatacgctagagacgcaaaggaggacgatgacatgtgggtagaaaaacgaaaagaagaaatagatgggagtctgaccgctatgcaaaaaaaataaaacgagataaattgagtgcaaatcgtccacaggaataaaagcgagttgagagaacacgcagacactaaagataatacaaaatgtgacaaagaactatggaatgaagaacaaaagagggaaatgacatatatacagggacaactatgggaggtccactccaatatgaaaacatacacggcccggcggataaaacggagaaacatattggacacacggaacgtggaaggagatggtaaggacgatagtaaccgaggcgtacactaattaacagctgagcactagccatgagtaccattcaacaggagagcatgcgtaacatacgggaaagagaaataaacggcggcgataaaacaagaaccgtcaacaccagcattgggagagctaatctatacagaaaacgcaggaaagaaaggaaagcacaaaggatggaaaaaagggacagaacggagggtagtaaaaaacaataacacgatataccataggggaaaacaagacacttgattaaaaccttagcgaaaacaaccggctgagcccactaataaaaaacaattcgaggcataacgcttcataacaaccgaggcgatatgatacaat

SEQ ID NO: 129157 - DNA, 778 bp, Arabidopsis thaliana columbia
agacgagctccgacgtcgcatgcacgcgtacgtaagcttggatcctctagagcggccgccctttttttttttttttagactaagaattcatgaattagtaaacaatggaaaacagtaacaccggcccaaaagaataacatttggtgtgatctttttttctttttccgctatgcactgaacttaagtttttatctgtggctgtggggtgaaacaattttaaccatttacaaatggatactatgaattaaagacaaaacctacaaaacaaaaatactaattcacctaaggtactgatgaaaccgaaggtcgatgatcttgcctttccccttctacatgtcttggagctggaccaaacatgctcaagaacaccggtaaaaatacaaggccgcgtaagaaaccgagaaggactagtgccaattacatcttgaagtaggacaccacaaaaacttttgattttgagaaaccgagcacaatcaccccaactagtttcgttaatgtaatcccactgaaaactgaagctcccttcccacccaacgccttttttatccgatggtttctgtccccagtgccttatcgagaaagcgtgtgtttatgtgtacccaaaaactaaaccgttatgcccacggacatgattagattttacaacccgatagtgcgttttaactgggatattaaaaagaattgccattaacctccccaggcagagatcaaataattgaatccattctcggacttaggtttttaaaaacgcgcgaagccggccccccttttataatca

SEQ ID NO: 129158 - DNA, 668 bp, Arabidopsis thaliana columbia
actgactgctgccgctctagctggtccttaacggcgccttcttgtttttttttcaaggagcaagctcccataaggctttggggggcgacaatctctatttttctttgaagaagagactaaacagcttaggcaaaacactcataacgtaaaaaagaacctttcgaccgttatcgggtggtcctgtttctttcagggcatactagaacttcttctttgtcttcctcttcttcctttttcggggatcataagatagaggaggcccggtgacttataggactcaactttgggaatatactggtctctcctggtttggcttccattcatgggaaatcaaggattgcacagcgactttattctaggagcctaccaccacctggactgttcttgctgcggcttaacgaacggtcaaccgcgataaagagcccagaagcctggtgattcagagaaggggaaaaataacggccaccttgtttacacattaatatatgcggaaagaaagtggtctcggcggccaaagccaaacccctttaaaaaaagcggcgttcaaaagcctccgccctacgggggtcctttccatagccggaacgccgggcgggttcccaccccctggggaaattttccccggaacccgggttacccctcgtgcaggggccgtatcccaaaccttt

SEQ ID NO: 129159 - DNA, 611 bp, Arabidopsis thaliana columbia
actataacgagtttgaggtagcatgcacgcgtacgtgagctgggatcctatagagcggacgacctatgcgttcgtttttttttttttttgatctttttcatactgttgcgattgtgttttgccaaaacttaatatgtagacaggccttttgggaaaaatcgggctttttcttttatgtacaaaaggtaaccaccaaaaaaatcatggggtattggtggtcggacattgtgattcctttggaagtacaagaggttttagcctgctctccatgaagatgccctttacgtacggatgggttcttaagaatttatggtagaagaggggttatcacaatagggcggaagcttttacatgcccactcttttttgaggcatctcgcttgggagtaatgaccacagccctgaggatcccctaggtcttggttaaaggagtggaactgctattggctggccaatttcccccatgcacccttagagtagcttgtcttgcaacatttttttgacaccattatgttccacacaccacgatacatattaaccatggttggacaaaaaaaaagaaaaaagattcctattgtcgtgcaccgtgctgtatttgccccctttcccaat

SEQ ID NO: 129160 - DNA, 649 bp, Arabidopsis thaliana columbia
  unsure (1)..(649): unsure at all n locations
gcgtttnnnnnnnnnnnnnnnnnnnnnnnnnnnnnnnnnnnnnnnnnnnnnnnnnnnnnnnnnnnnnnnnnnnctttgtgtttgtttttttttttttgatttgatcattttttatctttgaccgtctgcgttggtttatttatttattgaaaagcttaattgacgtattttactattttaaagtaaattgtggaataagccggaacagggataacgatattttaaaagcggggcaaagttaaaaaagaaaggaaagttcccgtcgcaggaaaaatttataaacggggctttcagtctacatctccggggatagtttcggagaagtcaccgggaacagaggcagaagctggggttcagaaattttcggcggtgaaatcggacaccggtgcaggaaataacccttgtctgcgagaccttttttttcctccgataatggcgaccgcttggcgagagggatcgccttggcttccggggggtccctgctttaacggcggtacgggacgtggaagtttcagcttggggaaatcaataccgcctggccgcaaaattttctgggttttcgggggagaatcttggactcttcggcggccctcaccacccggttaggggtgggtatcgggctggagagtggttccttgggggggtgggg

SEQ ID NO: 129161 - DNA, 679 bp, Arabidopsis thaliana columbia
acaaacgagtcttgaggacgcatgcacgcgtacgtaagcttggatcctctagagcggccgaccttcactttcgtttttttttttaagcgaaagaaactcttttaagcctacaacgtttgccttataaatggcaagagttccttaacagcgaccgcgatcgctttatcaagggccaccacaccgggaagaactttttcttttaacagatccaagctggcttcagcatcagtggagatgtgactcatgaccgctgctactcctactttctccactgtatccactgagtctccccctcctattatcgctggcgctcatttttgacttagcactgctagttaattcactatcgcctctgttccagccgcacacatttccatctagaagactaccataggtccatcccaaatgactgtttgagtcgtgtccacagctccgtcaaaagttgtcaatgactaaggaccagtgtccattcccataaatacgtcctcaatgcctgatgcagccacaatcttcctgttggcttcaggagcaaagcttgacggcagcctacaacaatttgttggacaacaaaactaggagaccccttttgggctctttcgcgcttttgtcagaggaatattattgctaccccaaaatctcaaagccctttgggccttttcttcgcaacccaaaagaggcg

SEQ ID NO: 129162 - DNA, 757 bp, Arabidopsis thaliana columbia
gacgagctatgacgtcgcatgcacgcgtacgtaagcttggatcctctagagcggccgcccttttttttttttttttatgatgctgtgagaaatgagttcctgttgggagatcgaggggttgaattcaccatcgtccgtgtactgaagctgtattcttattgtaggagtatgatgacttattccacactacacgactgttttcgtaactaattgtgacgtgtatattttgtaaaactcttgtatacatgtatctgatggggcgccattgatatggttcatcgaactttaccacaatccttgggatttaacctgcattacactggattcttgtatggaaccttgattggctatactattcctcgtaaataaggtacttactcttggggaggatatctgatgggggccactctggcgcgggggggataccatcccatccaacaggtgcattctctcctgtctcacagacgcgaatgaacaagacctggacgtgcacttttaatatgaaatgccgctcctttgttgaaaggaggatgttcaactgataggaaacggatgctgttgaggaacttgtttttttctacaccaactatgtcggccgtttttcattgcgcttatcagggtttctttgggaagaggttataaagggggtttagggtagcacacctggggaattactttcccccgagtggaggactttataccctggtggccgcccttataggctttggttcctttattcatacctagacttttcttg

SEQ ID NO: 129163 - DNA, 789 bp, Arabidopsis thaliana columbia
ctatgacgtcgcatgcacgcgtacgtaagcttggatcctctagagcggccgcccttttctttcttttttttttttttggagaaatgatacaaatagctgtggtaaatcaaaggttgtggacatgtatggagcttttttgacatgaagagaagctgctaaacatttcactattatcaaagaccacttaagtaatgagatcttcttatgatggtacaaaccttacggaacactatatcctatgtaaaagggggaaaaaacttcaatcataattggaaaacataatgtgacattagcagagaaagagagaactaaattccattctcaacagcctctgtcctttgtaagacaggaagatccttatgggtgtaaacgattccattgtctccatccacaacttgtccctttcctcttattatccatcttgctgccaataatccttcaactccaactggaccacgggcatgaatcctgcttgtgcttattcccaccctcagcaccaagtccgaacctaaaaccatcacagaatcttgtgcttgcattgtggaaaacaacagatctgtccacttggcggaggaatattattgctacttcactttcttccgccactatgcaatcagtgtgtgccctttccatgttgggggaatattgatcttattagccaccattttacggtctttttacaaattatcaaaacgggtgcaagggcctttgggaaacctgttaacttcgttgggtggaaaaatgaatattttggtgttcccgggaaatattttctaggttttttggcaa

SEQ ID NO: 129164 - DNA, 838 bp, Arabidopsis thaliana columbia
acgagctacgacgtcgcatgcacgcgtacgtaagcttggatcctctagagcggccgcccttttttttttttattatttttttttttttatttcctcgtgacataaacgatcattaattagactcatagttccaatgcataaaaactaggacaagccattaaatccagaaaacacaggaatttgctacagcaaaaacattctttctttacactcaaaccacctcacagatgctttgctttatttaagaaagacaacacacgaaagttaaacagaaagcattttaagttccaaccatatgacaagagaaacatatttactcaggtacaaatttcttcctgagctcaaagactaattcagtaaccttcttaggatcaggccaggacttatccaccctcttcctttggaaacccttgttaacccaagcgatcagattcggaacctcagattcgatactgaagttagcaaacttcttgtatgctggaaaccatgggtagaatccaatcaacgcaatgtttaccatagcaaagtcatcgcctctaaagtaaggtttgtctacaagcttagacttaagagttttgagattttcaatgaaatcccttttccctgcgttttggttcctcaccccttttggaggccccccacctttttttttgagacattaaagcaacgcttactttggcaaatgaaaaaatacgcacccaaaaaaccttagccttggaggcgtttttctgggggtctcgggatcacccaaagggggaggggataacggggttatatttgtgggaaaaaacccacacacctcttgatcaaaattgttacctgaaacaccttggggttg

SEQ ID NO: 129165 - DNA, 887 bp, Arabidopsis thaliana columbia
  unsure (1)..(887): unsure at all n locations
acgagcttgacgtcgcatgcacgcgtgcgtgagctgggatcctctagagcggccgcccttttctttcgacaggtgttttttattttcttctgtagtgttttggtttaatttggttttttttgggaaccctctttccaaatgctgacttgctggaaaaatcaacccttatttttccaaagattgcctccatttcagctcttttgttaacgatcaaaagatctcaaaaccgataggttgcatttgctttttaaaaagttttccgggggatcttggccccactttgtctgcctaaccggcgataattttttctaaggccccccgaccaaccgaaggagggggggtttcacaacgtctcacagttaaaattggagacccgctcatgaaaaaaccctgtggtgcgaggccttttgcttcctcccgtggtggcgtaattcttggcgagaggatcccctttcttttttaagccttaaagattcattcttgttcgcccaattgtcttcctttgctttaaaaaaccgagttttttccagcaaaaggggggttcctaaatttcttcggggccacctatatggagggtcccctttggcataaaaaacccgcgttttttggaagagttttttcttttcataccacgcgtgtaaagaaaacttttatttcccctccgtccccgccgcggaggggtcttttatactctccgggtaagaaaaaaatattggcggcctctcggcggattatactgcncgcgggcttctgtgtcctcgcgcaatatatttttttataattaaaacttctctcctccggggagaggtattttcccccggcattaatccccctattaccctcctctcctcaagtggggcgctagtcaccatatcctcccctctttt

SEQ ID NO: 129166 - DNA, 443 bp, Arabidopsis thaliana columbia
attaggacaccatgccgctccggtaactgcaggcttacggggtcgcctacgtacgttttatttagacaaccgaacataatagattatactacgacacctagaggtttagaccgatctaaatattctccgttatgttaatcatactttgttttgcaaccgtcatcgggttgtagtatccgtgatatgtatcgataagagcccaatggtagtaaactacgcttcaatatggagtcgtaacagaaactcaggactctatcctattaggtaactattatcgtccgatattaggcaaaggatctaaaagaattgactttcagggtatcaattagcggtttcccggagcccaagaaatgtctgtatgatcgtcctctagtgttacgggcaggaaaatcctcgctaccaatgtcacagaccgacaggtctatcatgacattttaattcat

SEQ ID NO: 129167 - DNA, 714 bp, Arabidopsis thaliana columbia
agctacgacgtcgcatgcacgcgtgcgtaagctgggatcctatagagcggccgcccttcgctttctgtatttttttttttttttgtctcccaccttaaaatatgatcagcgccctttgctcacaaggtttcccatttattggccatacccgaccaaaacgaagccgttttgccacaaaataaaatgtcattggtttaaaagtgtaacgggagaattaaaaatgtacttatcactcttcatatggactggattcaagggaatattattcttggaaatccctcaaaaatgggaaatttgactttgatttgtgaatgacgcccatacttttcaaccaagggagcttgtcttccaatcgttcctttaggcttcaagggttataaccaagttccagcttatccttatcacaagagtttgacccctgttggcttacaactgtcactgtcgcgggactgataatcgaaagctttcctggagcccgagaggttcagacagttacccatccgtatgcgttgctggcccataggggaatgatagagcttggctttttggtcccagtaattagggcggccctggcaaaaataactttgaaagaaaccttctccccaggcgagttagggttttttcaaacaaaccgtaccttttttctatggggggagggctggcaccccttctcactaatcttctttgaacctatgggtttagaatgggtagtta

SEQ ID NO: 129168 - DNA, 732 bp, Arabidopsis thaliana columbia
acgagctatgacgtcgcatgcacgcgtacgtaagcttggatcctctagagcggccgcccttttttttttttttttttttttttttcggggaaaacaaagctgaagatttgttgagctttttttttggttcaccacggaacaattgtcttcttactttttaccaacctttttcccatatatatacacacatcaatcgtatcagaaagaaatcaatacagtggaaatagctgtacaaacacaaacaaaaaatcgagtcatgtgagagtgagactgattgtgaggcgtttaaaaaactgtgcctcaactgactcgaaaattcgaacccatgttttggtctcatgtcattggtgttggcgttgagtattgtttcctttactgtgacctttagtgcctcctcctttgtacaactttgggtgactgttctgtccatatgaagagttcttgacgcctttggttcctgagagggggctcgttccaaacactcgatgttggtttctcgcacctttagttgaaactgcagcgggggcgagtggagtgttgaatgaaccgtttctcacagtcacggagcgaggactttcataaaaaggttgcacggacggggtggtggccccgttgatgaagcccactccgcgactactttaaggactcgttgtgttgagcaaaatttcccggagcgtgggtcgaccgggaaattcggaccgggacctggaggcgtcccagctttccctatgt

SEQ ID NO: 129169 - DNA, 603 bp, Arabidopsis thaliana columbia
aactatagaacagcttgacgtcgcatgcacgcgtacgtaagcttggatcctctagagcggccgcccttttttttttttttttttattttaaccccgtctcaatttaattttggtctccaaatcctggattacacaatgagcaaacattcctctactgaaagagtaaacttacacaaccaccctattttattgttccaaccccaacttgactattacctacttgaccttaggatcaaccctcgtaactttactcccattaagccacactgggttttcttcaagaaaaaaatcttagcgtgtaatgccatcttgaaagactggaggtcccatggccacccctacttgctatggtcaactgtggacgtcccccgcccatacgagacttatatcatagccgaggagcttgaggtcccggttttcgctgggaaaaagaacaagattctccgcatgattgattaaggcaaaccgcacacaacattcccttttggaacaatattgaggagctcgtcattttcgcgattagaaacttgttttttttatcttgcacaaagccgttgaatacgggtttatgcaccgacagaatacaagctgccagcgggccca

SEQ ID NO: 129170 - DNA, 635 bp, Arabidopsis thaliana columbia
acacagagggtagttgcgcacgcacttgcggtatatctacagaatagcgttgttaacaagacatgagatgaccatcggtacaccggcataccggctggcagatacgatgacccatatctgcggatgatacaatccgatcggtgatgcgtcagcgcccaacccgactgcgttaagctagacattacatgatcagcttgaaaccttgttggcagagctcttgaaaagagacacattttccaggtgacttcagtacagtctagagggcgcacggtcggtgaaaccatgcggatgggtagaaaagtggcatctcaccttgagaatgtgtgtaaggtcgcggtaaacatggaatgaatgcagccggttgcctggaaatggaagatttaacattttcactagatagctcaagcacggagaagtgacattatctcacactgaatatcacaactcgagttctgtagccacagcgtccgctagttttacagacaacgccggtgagaaaaaactacaccctgagtcaggtcttaatgaatttcagtcctttatgctaacagaagttgaattgtgtctcatgacctttagtttaatcgcgaggctgatcttagacaaactactatttgtgaactagtcaactgaca

SEQ ID NO: 129171 - DNA, 729 bp, Arabidopsis thaliana columbia
acccatgcaccagcaccgacgtcgcatgcacgcgtgcgtgagccgggatcctatagagcggccgacccacgcgttcgattttttgttttaaattttatccacccgcaagaaagagctgctctccagagggtgtatctaccaagggctcaataaaataaggttcgtcgcttttaatgtaacccatatccaattgccaagcgcaaaaccaatatttcttgtgaaacgctatcgaagtccaatactacaaactggttttagcaacttctcaaagcaattttattggttcaagtaacttgtggtgggatcatgtggaaaagcatgaacagccccataattggccttgaatgagacgttataggctctatgacccctgtggatactatatgtgctctggagattaatatcgcaaatggtatgctgggtttagaaactgcctaagaacctgcaggtgttctttacaacactccgagaaagattatcccaatatactggaattcgagagtctcctgggccacacttggttagggggaagagcgctctcccaagagttcccttcaaactcgggatactcttccccgaagtcaaatttgctggtaagccgcccccctccacaccataaaacgtgcgttcaatcctaccgcggtaccaatttatttggagtttgggcgtttatttctcttgggccgaaaatttatgtatccacaggcgggaagacactttctttatcta

SEQ ID NO: 129172 - DNA, 789 bp, Arabidopsis thaliana columbia
ctatgacgtcgcatgcacgcgtgcgtaagctgggatcctatagagcggccgacctacgctttcgtttttttttttaattttttcttttacaaagaaatcacgcagcttttagtacgttactcaaaaggtgttatccttaaaaaactatctggaggacacatgcccaagtgtctccctactttaaacaacggggctttgataactaaatatcgcgtttaaacctcttttttagctctctgcttatgagggaattttttttgtcttttttgatgctgggaccaacacccccatagctccgtgggggatttttaccaccggccccttgaggcatttagcatcaagatggtggtgccatgtaagtttttgaacctccacctcccttttccttagagccttgccctactggtgggacccattcactttgaggctgttgatgatccaggggggggttcccaaccgctgtctggtatatagcgcgaatgaccggcgtctgattcctaaacggtgtttttaggaatagaaaccaggtagatggaccttgaaaactctgtgcttctatcattgtcacactaaagccaatggccggaaccgttgaaatattttggggtggatctttccagactaccgttagttccatacaggattcaattgaaatgctgtcattttgcccaagcaaaaaacgtttttggaatcatttattaacttcctcggtggttccgaaaaacgcgtcgtccccccccaccccttatttatgttgtggaaaataacacgttttggccaccgttgttt

SEQ ID NO: 129173 - DNA, 796 bp, Arabidopsis thaliana columbia
acgtcgcatgtacgcgtacgtaagctgggatcctatagagcggccgacctactctttcttttttgaattttatttttttttatcctttatccaaggaaggggaatgacattttgtttaaagctggctccgctttgcctcaaataaaaaaagaccaatcatgtcgtttttagggaagttgttacatcccaatattattcatttttatttttaataaaggcatcggtttcttgaacctaactactaaaagggcataggtgggatattttgttcttgcccgaaaaatgtcttgggaacaacctttgtttttatcttcaccaatctggcaaaatggcctttgaagtactaacggccccagattttaatttcgattaagaaaacctttgcgttggattagctcgctccgaaatctaaatcattgtgctacagatttgcctgtcttggaattgcttgaaacataaggcccccatggccccctttttttttttttgcccacaagtgatttttttacattattgactagacattctttccaccggttctcgtacaaaaataaaatgtaaagggtcccctttttatgaggaaattggatcccaaatttcgtgggtttttgcagtctatctcccctcagaggggatgtcccataacaacaaaatcatagggttttccctttcaactcaaaagaccttatggacaacttcgcactgtatagatccctctttatcacaacgggggaaataatttgcctccctttctggaaaggaatatttactcctagaccccacgagctttttgtga

SEQ ID NO: 129174 - DNA, 334 bp, Arabidopsis thaliana columbia
aacttgacgtcgcaggcacgcgtgcgagagccgggatccaatagagcggccgacctacgcgtacgatttttatttttacggcacaaccaccccgctcaaacgcacggggggcagcagcaataccaccaacggcccccacggcaaggggacacggaatggccctcgaacactatcagaagtcctcacgagacaccaaatctactagtgccaagatgacggaccgcacagctagtttagagacccatcaactatatactacctgcagcttgattggagaggaacgagacgccctagactaaaacccccaatgcaaagagcaaacaccaccccccca

SEQ ID NO: 129175 - DNA, 742 bp, Arabidopsis thaliana columbia
cccgttacccatagacgagtcttgacgtcgcttgcacgcgtgcgtaagctgggctcctctagagcggccgacctacgcgtccgtttttatttttttaaggactaggctcgagtagtttgagctgaactcacatgatgctcaaagtttccaggcttgatatgacttgtgcctcgggcaaggaaatctttgcatatcgtgaaacaggagcactcattccgttccataaagaataccagttctttgttctaagatcataattggctgtctttgggtcataccgatatatatatgatgattctttgggtcactcccatactccttcagtagtggccgaggacacgttactcgtaacaagagaggacctgctttaatgagccgttacaggcatttgaaatggttgcttgcacgagtggctagtgattttcatcattgtcgcattaagaccattagatggcttcttatttaacaacgtgggctttgttcaactgggtttttgctcggacgcttgggtcgaccccggaatacgggaccggctcctgcacgcgtgcaagctatccctaaactgagctgtaataggacttggcgttaatctggtgctaggtgtttttctggggtgaaatatgtggatacgatcaatggatttcaccaccactataacggagcccgtggaggccattaaagtcgccaaatatcccctgaggtggtggcctttatattgaagcggagaggacatgactcttct

SEQ ID NO: 129176 - DNA, 832 bp, Arabidopsis thaliana columbia
cactataaacgagcttgacgtcgcatgcacgcgtacgtaagcttggatcctctagagcggccgacctacgctttctttttttttttttaagaaaaaacatcccgaaataaaagactgttttactacaagtgcggcatgtgttcgcgcattactcattaataggtctacattattctgtaccaatccatatggccatccaaattaaatgtcttttatcaccaagctctcgcatacaaaagattctgtttcgggcttgctagcccagaacctaagttaactgggacatctgacttggtccttctgcctggcgaaacccatcccgttgccttcatttacagagaacctgtagcttaaaggttatgataccataaacatgcctctggtgcactaggatactaacagcgaagagtttgatttgacgttgggcctctccttagactactcaagtgttattaacgaaatacgtttagaaaacatctatatttactgcgtcctaacacctcttgatcaactcatatggaaagggatgcttaaagggagcctttgaaacggcataaccctatacaccctgactttcatcccataccgaccataatgcccttgaagtgaacttaccttcataaacctgggcttctccttaggaggcctttgcctcaaccctttttctcccgaacactacaaaaagaatttacccctcgaaactcccccagtcatcttttcctccacatcaatacgttatactctttttaaagtgtgaaatttagggggaaacggcctccctttcgcataggccgcaattacctctcctccccctagaaaaaattatttctca

SEQ ID NO: 129177 - DNA, 780 bp, Arabidopsis thaliana columbia
agcttgacgtagcatgcacgcgtgcgtgagctgggatcctatagagcggtcgacctacgctttcgtgttcttatgtgctaaacaaccaaggacagatcttaagtgacattgattttagtttgtgaagttaagtgacatttaccctaactagtcatagtgaaacatcttatgaacgaactattgaacaaacaaattgtctccatataaaaactaaatgatcatggcttatttgatgggaagtcttaacgaaacttttttttttttttgttaagaagttttattttgtcttaaaaaccaaggggctaaatgaatcgatcctgacaggggacatatacataatttggattggacaaccaaacaggggtatactgctctgtgtgaacaaacgcatatcacgaaaatcttgtcggggtgttctattctgactaaacgtgaccccccggttatgatccattaatttaacctcttgcgtttcaactgaagaggaaaattctctagtgatccgactaatagtttcgattagacccgccatccttttggccatggccatgaaatcttttcgcgctgcgggagcacttttggagaatgcgcgttaatgataacccgagaagcccggccagtgtggacgggggtttcaactttgcaagaataaaatctttttgatggggtggtgagttttcggggaggttttaaacctcaaaaggaacccggaccccgggggtggcacccctgaaaattatccgaaacgggtacctgcacgggggaaccaaatttttcttt

SEQ ID NO: 129178 - DNA, 773 bp, Arabidopsis thaliana columbia
acaaacgagctatgacgtcgcaggcacgcgtgcgtaagctgggatcctatagagcggccgacctacgcgttcgttttataaattcaagcaacatgttttcttcaagttttactaaagcttgacaccatcaatagccaaagagatatatttataatagctgcaatttgctttatttactctgcttcagcttcttcaacagaagtttccattagaagaaataacgattccaactgctacaccaacaagagaaagagcgttcatgagtgctgtacttttgagaatttatctgacagcgtgacacgtgggggataaggctcctcgcttacctattgttactttgagagacatcacaacgttggcaaaacactgttctgagcacagtggtgatcccattgagacaaccttgatgctcatgtgcctcgagaccaccatatgagataaatccagttatgtgaagaaactttgatctcatatttcttttgggtgtgtgcggatttggacacaatgcctgaacttgaacatgaaatcactgatggtgctgctgatgtagccattccttgctgagaaagaaaacacgattctcagattcaatagatggttataaagggaggagaaatttgaagagaaattattgcatgggtgaataatacagaaccgtggggcgacccgtaaataccagaccggtatctgtacgcgtaccaagctttcccttatagtgagtcgttattggaacctggcttaaatatggtgatagctgtttcctgtgggaaata

SEQ ID NO: 129179 - DNA, 665 bp, Arabidopsis thaliana columbia
catttgacgtgcagcacgcgtacgtaagctggatcctatagacggccgaccttgcttcttttttttttttgattaggctaatacaaattctaatacatggtggatgatacaatacaaatacatggcgcgtttacatattagcccttcacttatattatactttggaaaatttcccgttaaagttaaagctctttggcgttattcttgttttaagccaagtgtatatgattatttttttacttcctgcacaccataccgtaaccagaagacgctatacgggtaccatccaaagttgcatattcaatctgtgacttaacagaatcaaactctgcttgagacttaaagaaaacgcaatttttacaggcattggagagtagagaaaatatcttgaagctgacttctccaccaacaactggcattgcgactccaggctttacccgaatttggaaatcagtcctgtaagtcccccccaagattccataaaccttacgtgaaatgctaaagaaagttaattgtaccttcagatgggcaaacacaatcatctgcatggtaactttggcctcaatggataactggaacttcttctcttttgtcaaccttggaaaccccccctttggaccccataagaatctttcgggccttctttgcccactttatgaaaaata

SEQ ID NO: 129180 - DNA, 770 bp, Arabidopsis thaliana columbia
caccagctatgacgtcgcatgcacgcgtacgtgagcttggatcctctagagcggccgacctttgcttcttttttttttttttataaaactagaacgtctcgtcgttatcttggagtctatgcttttttcttcgtggttcgaaagctcatggcccgaaaaatatatttgaaatatgagacgttgtatactttcaaactcaggacaaattgtttcataaggtggagcaaaagaaacattcaccttgatttaaaaaaaatgctttgaaaaaaatatgaacatttccattgttatcatcgggaactttattgacaaagagatctctgagttcattgacttgttaatatgctgatttctgctgccctaacttgggcgaagtaaagcctgctgccgtggcttatttagcggtaaatcggtcttggtgatcataccgaagtattttgtcgaggaaatcatgctctctcgggtgaaacatacagtgcctgactgtaagcgtttggttaatttcgaccacggtttcctgttatgccgcccaccaagagcttccagttgtgggtcaaggtattatgtggctccttttcaaataacgcactcaatttttaagtccccaagtccctttggagagttccatttaaccgcgatacctgttttgtatttgggtccatagtaagaaatgggtctccatttaccgggaattattctatcgccctttgacaataacattactcgggcccgagagagttttctccccattattatccacaatggatatt

SEQ ID NO: 129181 - DNA, 803 bp, Arabidopsis thaliana columbia
ctaccacgtcgcatgcacgcgtacgtaagcttggatcctatagagcggccgcccttcgctttcgctttcatttaaacttctttatactccggataactaactgattctctaagcttcatagcaatgaaacactttgaattcgcatttcggcgatatagtctctaataacaacctcgccgtgtgctcttgcctcaccaccgcatcttctttctccaccagaaccgatccgacgatcctatcgtatcctcctacaccaccattagccacataatcaaccaacgccgcctgtactggtcccatactaggattatacgccgccgattccatataccaacctctgtacactttccccgcacaattcaccagcgaaactccccatggacataaactatacggcgcgtacgatttattcgccgccgctaaagccgtttgttttaaatcggcggatgaatcggaatttccgttacaaattgaattcagatctgagattttgagatggttatcgtgagattcttaaaaaagaggatgatctttcccgagaaagatcgccgggaccgaatttgtgtggacagaaattttccagacataagaatcccgtctgaatagggcgccggaactcggaataggcgggatatgatcggaatcgggagataagagaattttggttttccagggtggcgccggcgaaattttctttggaaggaaattgaccggccaatgggcccaccattggttgcggcgggcagaacacgttaaaaacaaatttgagaacgaacattccaacccgtttgcaattgtggaaa

SEQ ID NO: 129182 - DNA, 335 bp, Arabidopsis thaliana columbia
atctctccgggccccccgttgcgcttcgtttttgtccctaattggccttcctaaactccctttatcgtggaggctgggatttctatgaacattcttagtttcggtattttctcctttttgccccattgggttccgttcctatcgttcggggttctctggcttttcgcagttgcgcactttttgctctcggccttcgtcccccgaactcccttttcttcccaagctttccctcttcgccccggttcagttcatcaacttcttaccacttttccctttccgatttccctaactgctcgctacagccttggacctcttctgccttacccccccttaac

SEQ ID NO: 129183 - DNA, 339 bp, Arabidopsis thaliana columbia
accattgcccaaacaccaattaggagggccaacaccctactgagacgacgagcaatacttatagtggccgcgggccggccatatcgacaaggaagcacgcgagttttctattttttccaacgagagatgacgcaggaggtatcgcacacaatagggtgtggggtgttagtacaagcagctcgggtacgacacaagggacacgagccataacccataaagacggactagcgaaccggtgcgaggctcccgacaaccctcagaactaagcagcgcgcacaagtgatgagattaacgctcacgatacgaggagtagaccgcaagcatcgagaatcgtagacg

SEQ ID NO: 129184 - DNA, 751 bp, Arabidopsis thaliana columbia
agtcttgacgtcgcatgcacgcgtgcgtaagcttggatcctctagagcggccgccctttcctttcatttttacttattcgcgtggatctattgctaatgtcaaattgggaaaaacatcttctaatttgcatatatatacgttgcttcaatggtcttgagatcaacaagacctaaaacagagttttccccccaactcttctctcaattctacttcttatgagtcaagaatatctgagaattaacttcgtaagtcaactccttctgctcaagtcgaaatcctttaataccgacctgtcgggctccatggcatccttggaaacctgatcctttgtaactttaataacatcttcatcagaaaagatttttgaaccaattccacttctccgagattcctcgatgaccaaggtttttggaataagctcgattcgtactttcaatactctcggttgggctggcatgcttcttgaaaggcacatatgtatttggagtgcctagcgctggctatcctcgaggatactaggacgaattataggtgcctcctccatcacccttggttgatgctcccttgaagacccccatcgctcatgacacttgtcatcaatattcgcacccttattctcaccaaagcctcagacttatcttgtccaatcttctattcgcacgtacctcaaccccctaactcattccgcatctatggaacattcccactcggcaggagaacttctatccacagcatatgttgtgattcgcc

SEQ ID NO: 129185 - DNA, 1009 bp, Arabidopsis thaliana columbia
cactataacaccagctatggacgatcgcatgtcacgccgtacgtgaagccttggtattcctactagcagcggcacgaccccttttctttctcttttttatacattatttcgacgagcgatccatattgtctttattcacaattatcgataacaacatcatttctacaaattgcactataatataacatatgtcatacaatgcgtcattgacgactcacacaacgactatcaagtacaagagttttatcaccctcacaacttcgtctcatctaagattctctacactcttttatgaacgtcaacgacatattttcgcaaaacttaactcttcgtaggattatactaccttcctgcgtcacggtgcgaatatcacctcttaataccgtatactcgtcgagtactctcattcggtatctcttggcaaattactgctgcatagttgtaagctattaaataatccagtctatcatttatcgaaaaagcatattgtttgacacacacatttcccaccttctttcacgtgaattcactctgactgagcttaaagatttatttggacatataccttgcatattagcatgcgtcaacaatatcattcccggatatagagacctggttactgcatcactttgcaaaaggccactataatggcattttgcgtaatgccttaaagcttggcctcttctcggaggaatctttggtccaacttaatttggtgccctccttccatgatcccttgagttgatgactgactttgatgaaccccatacttctcagacaccaatgtattaactttttgtcacccttattcccaacaaaagctacgaattattctgatccacctcttcattcacatcaatcttaacccttatttcaatccgaaactgtgtaacttccaactttgcaagaggtttcttttccaaacaataacttggatttggcctttgcctctggggtcttcacccaccctttaatgctccattctcaaatactacacactctattattt

SEQ ID NO: 129186 - DNA, 806 bp, Arabidopsis thaliana columbia
  unsure (1)..(806): unsure at all n locations
atttcgtacnnnnnnnnnnnnnnnnnnnnnnnnnnnnnnnnnnnnnnnnnnnnnnnnnnnnnnnnnnnnnnnncttttttttttttttttttttttttttcggtgaaaacaaagctgaagatttgttgagctttttttttggttcaccacggaacaattgtcttcttactttttaccaacctctttcccatatatatacacacatcaatcgtatcagaaagaaatcaatacagtggaaatagctgtacaaacacaaacaaaaaatcgagtcatgtgagagtgagactgattgtgaggcgtttaaaaaactgtgcctcaactgactcgaaaattcgaacccatgttttggtctcatgtcattggtgttggcgttgagtattgtttcctttactgtgacctttagtgcctcctcctctgtacaactttgtgtgactgttctgtccatatgaagagttcttgacgcctttggttcctgagagtgggctcgttccaaacactcgttgttggtttctcgcacctttagttgaaactgcagcgggggcgagtggagtgttgtatgaaccgtttctcacagtcacggcacgaggacttccatagaaaggttgcacggacggggtggtggccccgttgatgagtcccactcgcggactactataaggactcgttgtgttgagcaaaaatttcccggacggcgtggggtcgaccccggggaatttccggaaccggttaccttgcagggcggtacccagccttttccccttaatagtggagnctcgctatttaataaagtttttggcggttaaatt

SEQ ID NO: 129187 - DNA, 712 bp, Arabidopsis thaliana columbia
  unsure (1)..(712): unsure at all n locations
tnnnnnnnnnnnnnnnnnnnnnnnnnnnnnnnnnnnnnnnnnnnnnnnnnnnnnnnnnnnnnnnnnnncttttttttttttttttttatttaaacaacgacgtaattcatttttggtcagcaaacagtggattacacaaagagcaaacaatctaatacagaatgcttaaaatttcaaatcaagcatttttttttgttcaagacacaacaaagctattaccaacccaaccttaggatccaaaccacttaatattactccaactaagagacacgcgaattacatcaagaaaaaaaacttaccgggtcctgcagtctcaaaaaacttaagcacccatcgtcacccctcattgctactattaactgtcgacgacccacgcccatacgagacttatatagtcaccgaagagttcgacatcaaggactttttgggtcaaagcaccatgatccatagcataattgtttgtcgcaaactgtaaaacacaactttcagaaatagattgagcactcatcttcccaagatagaaaccggattatttaaactgacacccagttactacggttatctatgacatataaagctgcggcgagcccctaaacaaaaggcgccctctttaaactacaaataaaaacgcgaaccttggtccaaagggaaatttacccgtggagccacccaaacaaatggaggaacacccaaccactttaaatcccgtccg

SEQ ID NO: 129188 - DNA, 756 bp, Arabidopsis thaliana columbia
  unsure (1)..(756): unsure at all n locations
tnnnnnnnnnnnnnnnnnnnnnnnnnnnnnnnnnnnnnnnnnnnnnnnnnnnnnnnnnnnnnnnnnnnctttttttttttttttttttttttttaaattgttacaacccaaactatagtctaattgtggtagggaaaacccaggcatagcttatatggtgcatcccaaagaccaaaccagatttccaacttccatgtcaaagaaaccaacctggagaaacaaaggaaactgtttaacttgatgatattagttcttcgagatattcggacgaatgaatcggagaatacccttctggcagtaagctgctgcaactgtgctggttgcaatggttgctcaacttcaaccttttattttgttttctggccaacctctccagctgctagagccactctattgaatgctcctggggcccagctcacaccagttaacacgttaacggttttttattacagggctttctgcactgatcacagtctggttcgcaggtgcatacacagacttggtcctttctgaaacctgaaagttatggtgcaccgccttaattttttggtgaaacaaacttgtcccaactggaagtttctggctaacaccgattttttggctttagtgaagcaaactcctgcggtggccggttgaggcagaaacctatgttttctctataaaaaaaacttggaccccgggtgggtttcaaccccggggaaaatattcgggacaccgggtatcccttgggagggcgcggcaccaaaaatttttttc

SEQ ID NO: 129189 - DNA, 628 bp, Arabidopsis thaliana columbia
  unsure (1)..(628): unsure at all n locations
ctatggacgtacgncatgtcaacgcgtgacgataagacttggcatcctaatagcagcggtacgaacctattttttattttttttttttttgtcaaaaatggataaaattaagatgaaaaaaacttggggatgaataacagataataaagaaagtaagataaaaattgaaaattaaaaaaaaaaagaaaaaagaaattatgaaaaaattttagaaatatgaagaaataaacaaattgaaagttaactgatatgagtaataagaaacatatctgacaagaaaaactgaagaaaaaaacgtaaaaaagaaaagaaaacggaaagtaattatcattaaggattgaccataaaatatgtcaaaaaaaaaaatttctgtaaattaacggaaataaccgtaataagggaaaaaaaaaggtcgaaaatgtttaaagaaattagagcaaaaaaaaaattcctatttgctatttgtgaatataaattttgtaaaaaaaacgaatcatgtgtttctcggggaaaaatgtaaaaccgcgaaaaatttccataaaaaaaattttacaccggaaggaattaatagtaaaaacttgggggtggcaaaaggggaagagaactttaaacataatttttaaaaaaa

SEQ ID NO: 129190 - DNA, 774 bp, Arabidopsis thaliana columbia
tacactataagaccagctatgacttcgcatgcacgcgtacgtaagcttggatcctctagagcggccgccctatgctttctttttttttttttaaaccatcaactctctctctatctttcacatatctgcaggcgagaaaggttatgactagaaatacaaaaacccccacccataaaaagaaagaaagagaagaatcctctcagaactaaaagaataatacaaaagtcgatgatgctgcgacaaattccattaatatgaaaagagatggagaaggagcgctacctatgtctccatttgatcaagaagcatctgctggtccctgcactcgctgctgcaaaaacctttctctcccctgtatatgtagatgtcctgtttctgggcaaaattcttcttgcaggtgaagcaacggcttataaaactctcggtgctcttggtctccatggctggctggcgtaaaggaacagagcaaggagtatcctccacgaaaacagagttgtccaagatattattgatggtcgggttaggaccgagagagatgacgcccgtgtagtcctccgtctggtcaatctcgctcacgggtaagaccttcctttggacacaaagactaatttaacacgggggatatctgatgcccgttttagttccaaaatcagctgaagaagggatctggactctgagctttgacccaaaaaggacctttttgtgacaggttctctagaggggttttggtacagtatacgttttcacgagatccggttgcccaaaactctggaa

SEQ ID NO: 129191 - DNA, 1017 bp, Arabidopsis thaliana columbia
cggtacgaaccaaaaaacatgaatttaaatttaaaaagggaaggacagcgagacagtagagaggggggggacgcaaatggcgggaatgaagaaagagtaaggggcggagggagtatgaacgagaatacaaaccaggagaggcagacacaaaaaacaacgaaagggaaaatacaagagagaacgaacaccacgtaactaattgtgaaacaggtggagcgacaagacggaagttcgcagcgacgggaacaaatatctacgggccgaggtgataatgccacgatcttgagaagaagaaaaagaagggcaaacagaagtgacgaacgagaagaggacagatctcgcgcaagataaggacaagatagagagcgcggacagagaacgacgggatgggtgaaacaaacatgagcacatcaaagcatgaagagaacgccaagatgcgaacaaagaagtgtgaaaaagtagggcgaaaacaaaaaaggagcggggacgactaaaggggaactagactagaaccagggcacagacagaataacgaggaccgaaagtagacctgcaggaaacgccgcacaactgatagctccgatgcatagagcgagtggcgagtacgatatccaagagatatatcgcacgagttcaacatggatgacgaaggtcataagtggagaacggagaaacataaacagactgcacagcatgagaaagttgtagaggacaaggcgaatgcgacaggccaggcgacaaacgagcgagacagaattaggacgcagaagacagaacgaatggaatagagcgccggctcaagtgagaaccagtaaaagggtcggagaacatcgacagaaaggaaatgagaacgcagcgaacacgacgaggagacgaatacgcacaggacgaaaagaggagagacaagacacgctacgaaacgtgggcagtggaggaatctgcagctccactcaatacagcaagcaccgatgaaccgcacaaagtcgaacgtacataacaaagaagtagcgagcggag

SEQ ID NO: 129192 - DNA, 725 bp, Arabidopsis thaliana columbia
cactaggagatggatgaacagcaacgaaggtagaaaacaaaaaagggcacgaaaaataggagattttctttacaagaaacgagcagaggagaaggagagtaaagaaggagaagaggaacagaaaagaacagaggaataacgaaagaagaaaagcaaagaacatgagaaaaagaaacggagagcggagaagagagaaaaacgcagggagagaaaaaaagaaaaaaagaaagagcggggaacaaaaaaaaaaactagagaatggacgagaaccgagaaccgagagaggagtaccagaaaaaaggcagggcgacagaaatgaacacccccaaagaagacagaatagaggtggaagagaataaagaaaagagacaaaaaaaaggaaaacagaaacagaagaaaagtaacggaaaaaaggaaggaagggacacagaggaagacagatcaagcgggataacagcgaaagaaaggcaggcagcaaaccgacgaaagaaagcgagtgtacgagaggggaaagagagggtcagagctagatgacgagaaagcgacgagcacagaagagaagcgagcgcgagggaagcaccgaaagacaataaccaaaaggaaaagcacgaactaagagagaaccaaaagaagggacgaaagaggaagacaatgaacccgaagaagaaaaagagcgacccaaaggcaaaagagacgggaacaagctgaggagaaagaggaagagc

SEQ ID NO: 129193 - DNA, 947 bp, Arabidopsis thaliana columbia
  unsure (1)..(947): unsure at all n locations
aaagaacgaaaacgacggaagaagaagaaggacgaaaacgaagaagacgcgacggaaagagaaaagaacaccacggagaaaaacaggagcacgagcgagaggacgaaaggcacacgagaacagacggaaaacaggacaaaggaaaacgacgacggacgaagaacacaacacgaaggcagaccaaggagaacaacaacgagaacacaaaaataagcaaaaggaaaccagaagaagacgaaggcgaaccacggaggcaaacacaacgaacaaacgccgcaagaggaacgaaacacgcagaggaaggaccgagagaggcgaagccagccgaccgacagacaaancgagcgacacgaaaacagacgaacacacggacgagagacaaagcaacaaaagacgacgaaaagcacacgcgagcgacgnacaagagaaacgcaaacaacaacgaagagacgggaacaaaaaacaggcagcacaaaaacggagagagacaagcaaaaaaaaaaagagcaaagaagcacaaaaaaagaaaggagagaaaagaagaccaaggacaaaagaagaaagaaaaaggacgagagcaaaaagagaacaagaagagaaaaaaaaaagaacaaagaaaaaaaaagaagcagaagaaagaaagaaaagaagaacgcgaaagaaaataaaacgacagacaaacgagcaaagaaagaaacaacacgagaaacaaaaaaaaacgacgacaaaaaacaggaaaaaagcgaagagaagaagagagaaacagcagacacgaaggcgaaaacaaacacggaccaggccagagaccaagaaaacaacgagaacaagaagaacaagagagaagaaaagaaagacaaaggcgaacccggcacagcaagaagaacaaaaagacaaaaacgaaaagacaaaaagaacaaagacagaacacaaagaaaggaaaagagacc

SEQ ID NO: 129194 - DNA, 792 bp, Arabidopsis thaliana columbia
ggcccgtctgccgtaccggaccggaattcccgggtcgacccacgcgtacgcgccgatctagcactatcctctgctctctctctaaaccttcgcttaatttggctaaacctctgactggatttctttctccttccactgcgtcgacgtctcgaaccgcattcaccgtcgctccgaaattcgcggaatcagtcgtcgaagctgaaccggagactaccgatatcgaagctgtggtggtttccgatgtttcggaggttactgaggaaaaagctaaacgagaagagattttcgctgttattatggttggtggacgccaatacatagtgtttccagggagatatctctacactcagaggctaaaagatgcaaatgttgatgaccagattgttctcaacaaagtgttgcttgttggaacaaagacacacacttacattggcaagccggttgtgaccaatgccactgtacatgctgtcgtggaaagtcaaggcttgaatgataaagtggtagtcttcaagtacaagcctaagaagaagtaccgtagaaatatcggtcacagacagccgaatacgaggattaggattaccggaatcacagggtatgaagagtattcagcctcgcccaatgttgcagttggagaaataaatctttgacacaaaatgtttcttgaatgttaaaacccttctgaccttctctatggaatttgtaagggcccctggtcattttcatttcctgctggagaattcccttttaatataataaaggaccccttcttttttggcccaaaaaacaaaaaaa

SEQ ID NO: 129195 - DNA, 833 bp, Arabidopsis thaliana columbia
tggcccgttgcagtaccgctccggaatttccgggtcgacccacgcgtccgagcaactgccgctctttcttctttcttactgtctcagatccgcctttgctacttcttcagttcttcttcttcaacaacaacaagaagtaataattagggttgagaaacttcgaattccgaaacaacagagagacgtactagttttagccatcttcttttcttagtttcatcgaacttggtgttacctcaataggtcgacgctcaaatcttgcttattctctggtttttagagcttcttttagattctttcgacatgccagccagcaaaaagatttcggaccggaatcacttagggcaagtgttcgacaagctattgaatcagattggagaatctgaagaattcgagttaccggagtggttgaataaaggaaaacctactccttatatcttcatcaggcgcaatatatacttgacgaagaaagtcaaaaggagggttgaagatgatggaatcttctgttcttgctcctcctcggctactggttcttgtttaactgggtgggggaggaattgccattgtgggatgctattctcaagctgtttcttcaggttgaaggtgtgggaaggaggggtaacattaagcggtgcaacaaccacatggtagaagaaggaagttattcacacagaaaaatgccggtcaaggattgtggcaaaagaaaaaatccaagctggggaaagttagtcttggaatttgttggagaaaagttattgttataaaaacttttggaagaagagggtttttggaaagatgaaaacacccgtgtggctggacaaaacttttttttt

SEQ ID NO: 129196 - DNA, 828 bp, Arabidopsis thaliana columbia
accggaatttccgggtcgacccacgcgtacggacctcaaatcgtacttttcggttcttcaattgttcaatatagttttactgatcgtggctggggtgccactctcgctgacctctactctcgcacggctgatatcattcttcgaggatctgctggttggaattctaggtttgccttgaacgttcttcaccaagtattcccaaaggatgctgtgatacaaccttctttggtgatagactatttcggtgggaatgattcaactcatcctcatccttcaggtcatggccctcatgttcctttatatgaattcatcgaaaacatgaggaagatgggtgaacatcttttgagcctttctgatgaaactcgtggcattttcctcactcccgccccaatgaatgagaaacacatcgagatattttttggagatgcaataaaaagcccggagaaccagttgtgccatgcatattcaaaaaaagttgaaaatctatgcagagagatcaatgtggaagggattcgatatttggacccgcgatgcaagaaccaagaagaatgggttggaccagctgctttaccagatgggaaacccatttcacttgcggaaggccaagtgaaaaaatggtggttcaaagggaaaatttggaagggttcctgaaaaggagaccgttttggaaaaccaaaatcttttaacccggaaaaaacattaccccgggtgaaaaatttccctatttcgctttgggaggcctccaaaaccttttttaaagccttttcaatgggaccccacaagtttttacccaaaaaaaccaaccctttttttggagagcccccccca

SEQ ID NO: 129197 - DNA, 911 bp, Arabidopsis thaliana columbia
  unsure (1)..(911): unsure at all n locations
ttccgtttgcagtacccggccggaattcccgggtgcgacccacgcgtccggaactcatctttcaatctctcttgattccaatccattcttctttaagtgccgggttctcgggtcggatcttctaagtctagctagggataatggctactgtcactactcatgcctcggcctcgattttccgaccttgtacttcaaagccaagattcctcaccggttctttcggtaggttgaaccgcgacttgtcgtttacatcgatcggttcatcggccaaaacgttgtcgttcaaggttgaagctaagaaaggagaatggttgcccggtttggcatcgcctgattatctcaccggcagtcttgccggtgacaatgggtttgacccgttgggtctagcagaggatccagagaacttgaaatggttcgtccaggcatagctggtcaacggacgatgggctatgctcggtgtcgctgggatgcttttgccggaagttttcaccaagatcggaatcataaatgttcctgagtggaacgatgctgggaaagaacactattttgcatcgtcgacgacattgctcgggatcgagttcatattgtttcactacgttaagaacagacggtggcaagacatcaagaaccccagaaagtggtgaaccaagaaccctttttttcaaaccaataccagctttaccttaacgggtggaaggttggggataccccttggggggaaatatttttaaccccgccttaaacttttggctttcttaccgcaaaggaaggcccaaagggaccaaaagtagctttctgcaaaacacgggaaggttttgggccttattgtttggcgctttcctttaaagggtttaggccgggttttaaaccaccaaattgcngtacttgggaaaaaagggaacccattttgg

SEQ ID NO: 129198 - DNA, 1079 bp, Arabidopsis thaliana columbia
  unsure (1)..(1079): unsure at all n locations
gggcaaatcgcgccttttnggagttttacgccacagcaatgcacctctttgtatctgcgacgggctcatatcctcagagtacctcttgtaattttgcacgacaacactttttgaagttttttacgagacagtggcccgcggcactgtgactcccggcggcttaggccacgagcgtcgcgatacccctcgggctggatagaataagcctatatttcgcacggtgttgtctgagctggcgcccgattccccccggtaatctgacattctcaggactcattgggtaatacctaggaaagaatgcctaatgttggctcttgcccaagggaatcgtgcagcttaggctgtcaaactattccggggcgatcggcgtgtggtactattcgatcataagcagtagcacgtccggattaacgcagtcgtagccgctccactgcggaacacacgtcaacctgtcacaaacgcggtctagctcggtgtcatgcttctatgcggccccagtcatagatgtcgacgagatacgttgagtgcgatagcgcggctcgggccgcaccgtgatgcagaacgtagcgtcacataccgcgagagactcgggactctctgtacccgatgatctgtatatatatacagccatctgtccgcaatatccttgaatgtgttgctccacgtgcagcgtgtatctatccaggagttgttcgcgcggtgccgtccggcggctcgcagctcgcaatcgcgtcaggcgatgctgcaaactgtgtagattgtttcctgggaacctagcagaacgtgagcagttgttggtgtgacttcggttatcatgaggactgcgaccagatcgcgaaggaggagtcgacttgatttccacccgctagcgaaatacagacggcaggatgtcggactccattgggggggccgttccgatggattaaagccagctattccgtgggatgaaagacaactcccccctagatgatactcagaacggttagggaacgctttgatgtcctcctcttactgtcttacgccctgaggcgcgcaagagtaaggatctttcggacaaaaccccttttacgagcactggg

SEQ ID NO: 129199 - DNA, 849 bp, Arabidopsis thaliana columbia
ttgcagtaccggaccggaattcccgggtgcgacccacgcgtacggtgagatcgtatataatggaccaactaaacgggttcatttggtgactgatcagctgaccaataaacccaaaggatatgctttcattgagtacatgcacacccgtgacatgaaagctgcatataagcaagctgatggacaaaagattgacggcagaagagttttggttgatgtggagagaggtagaaccgtcccaaactggcgtccacgcaggcttggtggtggacttgggacctcaagagtgggtggtggtgaataaattgttggggaacaacaaccgcaaggaagaaccttccagtcagaggagccatcgagaccacgggaagagcgtgagaaatctcgtgaaaagggaaaagaaagggaaaggtctcgtgagctgtctcacgaacaacctcgagagaggtctcgtgacagaccgagagaggataagcaccacagagaccgagaccaaagaggcagagacagggatagggacagcagacgtgatcgtgaccggacccgtgacagaggagacagagaccgccgtgaacctgacaagggacgggatcgcacttgaagggatcatgaccgagaccgcagtctaaagaatgaggcgggattatctaaggaggtggatattgagcatgaagggtggtggacggcccccccctgagatattccctattccccggggagagcccaacagaaattccgggggttcttatgaagaccattaaaggggacaaaaacccggttcagggattgtgttccaacaaaaaggtggaaaaatgaacttcccattttaaaggggccacaagccggctaaaa

SEQ ID NO: 129200 - DNA, 493 bp, Arabidopsis thaliana columbia
ttgctgccaagagaataggagaacagttttggacttttttggaaagccgagaagactgccgcagtaactgtagctggactaaggtggcgaaaattcttgtcgcataaaaagcgacctgaaccaatggtgtaacgactgccccgctgtctgcgacatggacccggtgaaattgaatcctccgtgaagatgcggagtcccaacggctagaccgcaagacctcgtgcaccttcactatagcttcgcagagacaaccttgatcgaatgtgtaggataggtgggaggtcgagacataaaaggaccaatcctgaaagaccactctttcagttaagggtgactaaccgccgcaccgagaattcggcgggaggcgggacactgcgacgtgggtagattatctggggcggatgcctcctaaaaagtcacggaagtgtgccataggaggctctagctcagattctgctcgcgagcgttatggcataagcctgactgacctgtg

SEQ ID NO: 129201 - DNA, 855 bp, Arabidopsis thaliana columbia
  unsure (1)..(855): unsure at all n locations
tgccgttccggaccggacttcccgggtcgacccacgcgtccggaaggaaggaacctaaatcggaatttgggtgctccatcaatggcttcgattttggctcgcaggtcactgaatactctccgtgctcgacatctcgttttgtcagggcaagctttacagggatctcatctgtctagactgcagtcccgtggtatatcttatggcagcaacaaagatgatgaagaagcagagcaactttctaaggaaatctccaaggactggaatactgtctttgaacggagcataaacaccctgttcctcacagaaatggtccgcggtttgtcgctgaccctcaagtacttctttgatccaaaagttactatcaattatccatttgagaagggtcctctgagccctcgcttccgtggtgaacatgctcttcgaagatatcctaccggggaagaacgctgcattgcctgcaaactctgtgaagctgtatgtccagctcaagcaatcacaatagaggcagaagagagggaagatggaagccgcagaaccactangtacgatatcgacatgacaaaatgcatctacttgggtttctgccaagaagcttgccccgttgatgcaatcgttgaaggacctaactttgaattcgcaaccgagacacacgaggaacttctttatgacaaagagaagcttcttggagagtggagaacgatgggaagacaaaaaattgctgaaaaatctggatgtcgggagagtcttcttcccggttgaaaccattttctacaaacaggtccttttggtttatttcaaaccttggtttttttccccgggggaaaacatattttccggtggcgctttctgtttttg

SEQ ID NO: 129202 - DNA, 794 bp, Arabidopsis thaliana columbia
tggccgtctgcggtaccggtccggaattcccgggtcgacccacgcgtccgaaaattttggtttcaattaggttaatattttgttttcatttataaaattataaatcataaatcaaaaacttaaatgcccatctctacctaattacaataacaaggggaaatatctaatggccggttatccgacctattgataagctatttttatttaagctttcaatgcttgttatttgtttgcacaaatgcgtttgtctccgttcgatgggtatatttcacaaaactagtttatctaacaagttacaatggtttctttttaaatgtgattttttttattttacaatgttttcccatgtaaacttaaacacatagattgaaaactagtgaggtcttatgcaaaatattactcgccgtgcgctttattgtaatcggcctcaaaaataaaacatctttaagtactcaggtggtgctagtgtactcactttgtcaccacccatattcgaactcgcatgttgcgtgttgttgacaaaaaaaaaaatctaggttgcattgtggtactttagggtaaatatgacttgtgtagaagtgttgaatcatcgatttacccaatccggtcaagattgaagacccatgttctctacaacaaaagaaagatggggttgcaagtataacttttttttattcaacgaaaaacattcaaggccttcaaggatgccaagagaggggaaccctcctttttttggcacactcgcaggaaccccttggttctttttcccacctaaaaaagggccaacaatcccc

SEQ ID NO: 129203 - DNA, 830 bp, Arabidopsis thaliana columbia
attgcggttccggaccggacattcccgggtcgacccacgcgtccgaactaacatggaaagaaggcttccatgaacctaatgggactgctgtattttgtggggcgcagctatgccccacaactctggctacacgtggacaggacgcgcaaattagagcttctgagtacaagtgaaggcatccacatgcgttgagaaggtgcatggagaaccacatcatcagcagccacgaccgaacaagcagctctcatactgagcgtcccccgtgctatactagtagatgagacacaatatactttccgtacctctgaattatccatcacacgcctaaaggaaaaatgtacaaagaatcactgccttgcatcgcttagctatggccgaactgtacgctgagactctttcaaaaacactgcagaaagacgagagagatacttctataggccgcgcatgctatttcttatccaaccatatggcctatgcagctacgttgctctagttttactttatcaattggaatgcgaaacagaaacgtcgcgattgtgcttttaaatcccccgatgcgacggggattggcgccatacaacaccagaagaactcttttcgcatttcccgtcgaaaaatgcttctcctggaccctttaaaaattcagaacaaagaccattttttggtcaccccaatcgctaactgaaatcggcaccctggggcaaggcccccttacttgaaaggattcccaattctttggcgggagcgcgcgctctcatttccggaagttcgtataaacatgctttctgaataggggggcccacccttgaaattttccaaattttatttgg

SEQ ID NO: 129204 - DNA, 753 bp, Arabidopsis thaliana columbia
gcagtacccgtccggaattcccgggtcgacccacgcgtccgagacgaagcccatcaaattaaacaagaaaaattccattttcctttattgattgtgagtgagaacaaacatttaaagcttcttactcaaagtttctttctttatagatctcaaaaaattcgatatttttctcgattcatccgccattaaggttttattgcgagatcgaagagagaaggagaaaatgacgcatagagtagatcaggaatatgattatttgtttaagattgtgttgattggtgattctggtgttgggaaatcgaatatcttgtcgagattcaccaggaatgagttttgcttggaatctaaatccactattggtgttgaattcgccaccagaactactcaggttgaaggaaagaccattaaggcccagatctgggacactgcaggtcaggagaggtacagggcgatcacaagcgcgtattacagaggcgcagtgggtgcacttcttgtctacgacattactaagagacagacctttgacaatgttttaaggtggctgcgcgaactgagaaaccatgccgattccaacattgtgatcatgatggctgggaacaaatccgatctgaaccacttgagaaccgttgctgaggaaaatggtccaaagttgggctgagaagggaaggtcctctttttttccgggaaaacattctgcttctttggaagccaaccaaacgttcggaggaaaggcggttttcaaagaccccttct

SEQ ID NO: 129205 - DNA, 813 bp, Arabidopsis thaliana columbia
gcagtacccgtccggaattcccgggtcgacccacgcgtccgaatgattttactcaatcatctccatgttgtgagaatcttgttctgattctacatgaaagctttgctcgtaataatttcaacaaattcgttgactctacaaccaaaaccctcatgtgctaactttcaagtaagtatatgtagttttttgctcgaaataacaaaaaaaaataagaacaaaacatcatcttgtgtttgatccaattcttgaatcttgaaacattcttttgagctctctataactatttaaaaaatggcggatggatacgagaaccatgctcctgaaaaccttcaggggaaatatcaagcaatggttgtttgttgtattcttggaattggatctctcttttcttggaatagtatgctcactatcgcagattactactatcaagttttcccggattatcatccttcaagggtattcacacttatataccaaccaattgcccttggaacaatcatgattctcgcataccgcgaatcgaaaatcagtactaggaaacgtatccttaccggttacatcctattcacgatatccacattcttgctgatagtcttggatttgacaacaaaaggacacggtggaatcggacattatattgtcttatgcacaaatgttgcttcttttggccttgcggagccaaccgtaaaggaggattggtcggtgattatttttgatgtgccctgaacttatccagcatatatgggccggtccggtattgctggtgctctaacctcagtgcttaaggtaataacctaaagccacttttgagaa

SEQ ID NO: 129206 - DNA, 1227 bp, Arabidopsis thaliana columbia
cccaggagaaatgcagcacaagcgcacgcgcccgcacgcgccgcacggcggccggaccgagaaaagagcaactttggcaagacccaacagcgacggcgcagaggcgcgagggcgagggaagaagcggagaccgggacagcagagggcggacagacccgcgaacgcagcgagggaacaagaggacggcggccgaagacgacccgccggaaggggcgggcaacgagggctgcacgcggagcagcggagcggcggaggacgccagaacgacgaacgcggccgcgcgccacacgcgagggtacacggacacgaagacgaagacgagacgacgcggcgaagccgacggggagcggcacaggggaccgcagcaggaggcgcagggcggggagacgagcagcagacaggcggcggcgggccgagggaacagccgtcaagcgccagacaagagagtacaatgacgggggcgaggacaagaggcacacagtccgagcggagagcgaggaaacgagacagcgtgacacgcgcgaccgacgagggacatcacggagacgacgccagcaacgcaacgaagagagcccacgccgcgatgaaagagactgactcagcaccgggcacgccacgagacacgcagcgacgcagaaggacgcacagagggaggaccggacacgaggcggatagagcggacctcgacgcaggaacccggccacagcgagagcgggagaagcgacgatgccacccgagggagaacgggaccggactacagccacagcgaagcaccggggacaaaggaggagaaacgcgcctcccggagacaaagcacagcggcgcaatcacggcgccaggcactcgcggaaggaagcggaggcgagcagggaggggagccgcgaggaaagcagaacgcacgctgagggcgaacgcgaagacacaacaacagagaggaagaggaggaagcgacgagaaaggagcccagagcgaagcgagacacgggaacacgctcagacgcaccctgagcaacagccacagaattcggaagggcgggacccaaagagagacacgagcgggacgacgagacggacacaacagcaggcgcgcgagaccgaaacggacagcagacaggagggacccacgcgggagacggcagggcacaaccgacagatgcacgcaaacaaccagaaccaagacgagcacacacgacgcgacagcgcaaaagggcagaggggagaagaggcg

SEQ ID NO: 129207 - DNA, 601 bp, Arabidopsis thaliana columbia
aaaaggaagagaaaaaagaagaggaacgcgaacaaagcaaagccaatccagggagaaagtgaattgaaaccttggaaaaacccaggaaaaagaccaaaacacacagaagagaaaagaaaggcacggagcgaaaagaacaaaagagaaacaaaaaaaaacgagaacagacacaagagcagacgaagggaggggagaaaaacaggaaagaaaaagagagagaaaggagggaaagacacaagagagaagggaaaggagaaaagacagcggcggacacaggaacggacagacaacaaagaagcggagcgcgacgcaaaagaccagcggcgaagacgcccgagcaaccaagagaaaaaaacaggaagacaccaacaggccagcccaaagcgcggaagcgcgagcagaacgagaaccaacacggaaggaggaaagaagagaggaaaggcaaagaaaaaaaggagaacgacacaagcgaacgaccaggagaaaagaagcaaaagcacaagggacaaaccgagacgacgaaagagcaggaagcacggcaagcgaggcacagaggcacaaaagcagaaaaacagccgccagaggaagcaaccggaacgag

SEQ ID NO: 129208 - DNA, 689 bp, Arabidopsis thaliana columbia
ttgccgttccggaccggcattcccgggtcgacccacgcgtccgcaagggagacaggaattcagccggctctggttcaccatatgcttacggtgtgctggacagcgggtacaaatatgatatgtcagttgaagaagcttccgagttagcaaggagatcaatctaccatgcgacattccgtgatggagccagtggtggagttgctagcgtgtaccacgttggtcccgaaggatggacgaaactatcaggagatgatgttggggagctacactaccattactaccccggggcaccagctaccgtagaacaagttctggaggaagcaacagccgaataaaaatcctgattagttgtctaatcggtcactccctttcttgatgccgcattttgtggcagaatatacctgaggtgtctgtacctgaagctttgggattctaagcaaactgatctgaaatggtgctcgcggattattctctataagaatcctctttttcctgcaaaaagaaaaaaaaaaaggggcgggcggctccctagaggaatccaaagctttaccgtaacgcgtggcaattgcggaacgttcaaaagggcttcttccttattaggggtgcacccctgaaaattccaaaattccaactggggcccgggacgaatttttaacaaaaccgttaccggggaacctggggaaaaaaaa

SEQ ID NO: 129209 - DNA, 826 bp, Arabidopsis thaliana columbia
  unsure (1)..(826): unsure at all n locations
ttgccgnaccggatctgaatttccggtgcgccccacgcgtccgaattcttggatttgagagttcactttttccgatttgattcaatgatgataactcgcggcggagccaaggcggcgaaatcgctgttagtggcggctggaccacgtttgttctcgacggtccgtacagtttcgtctcacgaggctttatcagcaagccatattttgaagcctggtgttacatctgcttggatatggactagagctccgacgattggaggtatgagattctctagcacgatcactctgggagagaaaactccgatgaaggaggaggactcgaatcagaagaaaacagataacgaatccaccggtggagacgccgccggaggtaataacatgggagataaaggaatcgcgagctattggggtgttgaacctaataagattactaaagaagatggttctgaatggaagtggaactgtttcatgccatgggaaacgtataaagctgatatcacgattgatctgaaaaagcatcatgttccaaccacgtttcttgatagaatagcttattggactgttaaatctcttcgtggcctaccgatttgttcttccacacgagatgtggatgccgacctatgatgcttgaaactgtaccaccaatacctgtaatggctggaggaatgttactacactggaaattgtttcgacgttttaagcaaattggacgaatggattaagggtttctttttgggggcaaccccaaaactgaaagaattgcctctttattgaacttttcatgggaaaataaccaaaacacctaaattggtacccaaaaagaaac

SEQ ID NO: 129210 - DNA, 790 bp, Arabidopsis thaliana columbia
gcagtaccgctccggaattcccgggtcgacccacgcgtccgcatcaagatacttctcagcttggttcatctttaaaccggaaccaaatcacagaacatcatggctcctccctctgccgtctcgcctcccgctcgttcagctgagcttgccacctctaacaaggctcccgtcaacctttccaagaccgccatgaacacgacggtcgaggagatgattggccaatgggacagcttcaagtttgctcccatccgcgagagtcaagtttcgcgagccatgactcgtcgctacttcgaggacctggatcgctatgccgagtccgacattgtcatcatcggtgccggttcctgcggcctgagcgctgcttacgtcctcggcaagaagcgtcccgatctcaagatcgccatcatcgaggcctctgtctctcccggtggcggtgcctggttgggaggacagctcttctcggccatggtcatgcgcaagccggccgatgccttcctccgtgaggttggtgtcccctacgaggacgagggccactacgtcgttgtcaagcacgccgcgctgttcacctcgaccatcatgtccaaggtcctctcgcttcccaacgtgaagttgttcaacgccccctgcgtcgaggacctcatcacccgtccctccgaggagggcgttcgcaatcgcggtgtcgtcaccaactggactcttggctccatgcatcatgacgaccagtcttgcatggaccccacaccatcaacgcccctttgatcatctccaccacgggcccatgagggcccca

SEQ ID NO: 129211 - DNA, 430 bp, Arabidopsis thaliana columbia
ccatctgcggtaccggaccggaattcccgggtcgacccacgcgtccgcatggaacctacataataccaccagtcgactgaatcgctccttttctctgatgccatgatcactattgcactgacagcatacctggccccacattgggagatcatgaggaggaagactggcatctcttcatataaaggatctagaccgctggcagaaacaacagtggccgcatcttctctggtgaccccatcatgtctccatggcacgtgccccacagtacgatctcactcttcacttcattagacaaagtacactcgacgcgcggatagacaagcaatcatgcaaccgaaggtacattccaactgtaaggtcgaaaacgcacgaacacactatgccgtatgcaaacctgccgttacatgacttcgatttgtcttccgcaccc

SEQ ID NO: 129212 - DNA, 812 bp, Arabidopsis thaliana columbia
gcagtaccggtccggaattcccgggtcgacccacgcgtccgcagaaaaaaaaaaataaacacaaaatttcaataaccatggagggtgttagtgcaactatgcataagttaaggccttatttgttaatgatctttttgcaatttggagcagcaggaacatatattgttattatggccactcttaaccaaggccagaaccgttacgtcgtaattgtgtatcgtaatcttgtggctgctcttgtccttgcaccttttgcactcatctttgaaaggaaagtgaggccgaagatgacactatcggttttgtggaaaataatggcacttggtttcttagagccagtcttggatcagggttttggttacttggggatgaacatgacatcagcaacatatacatctgcgatcatgaacattcttccttctgtcacatttataatagcttggattttaagaatggagaaagttaacatagccggaggtacgaagcaaagcaaagatcattgggacattggtgggtcttggaggggcactagtaatgacattgtacaaaggtccgcttattccttttaccggggtctaccccgaatatggatcaacaaaacggacatacaaatagttcacaagaccataacaattgggttgttggaaccttgttgattcttctcggttgtgttgcttgtctggtttttatgtttacagtcgatacaataaaaagtaccctgccatctttattatagccttatagcctacccggggtgtcaaactttgcggtacccttggggggaaaacaccctaccgatggccgttggtggg

SEQ ID NO: 129213 - DNA, 786 bp, Arabidopsis thaliana columbia
ggccgtctgcagtaccggtccggaattcccgggtcgacccacgcgtccgcggacagaagaacaagatcaccatcaccaatgacaagggtcgtttctccaaggatgagattgagaagatggttcaagaggctgagaagtacaagtccgaagacgaggagcacaagaagaaggttgaagccaagaacgctctcgagaactacgcttacaacatgaggaacaccatccaagacgagaagattgtgagaagctcccggctgcagacaagaagaagatcgaggattctattgagcaggcgattcaatggctcgagggtaaccagttggctgaggctgatgagttcgaagacaagatgaaggaattggagagcatctgcaacccaatcattgccaagatgtaccaaggagctggtggtgaagccggtggtccaggtgcctctggtatggacgatgatgctccccctgcttcaggcggtgctggacctaagatcgaggaggtcgactaatttgttggacattgacctctctctttctcctatctctatctctgttacttgcttttttttgatctgttaagactttttatgttggggctttttttaaagaaaacccatttttgtgggtgtttttttggggtaagtacttatttttggaacaaaatgggttggggtttctttttccccaatgtttaagcctttccgaatggaaccggaattaaaaatttaaaaaatggttttgggcccctttattttcttcttccttaaaaaaaaaaaaaataaaaaaagggggc

SEQ ID NO: 129214 - DNA, 765 bp, Arabidopsis thaliana columbia
tggccgtctgcagtacccgtccggaattcccgggtcgacccacgcgtccggcaacgagaaaaaccgtccttgatgacaactcatgcttgcactctagccttaagctagctaaacctatctcgcgcactactagaattcaaataaaactctataaatagaaaccctcatgagatctcttctttcctcatatacactcatacacaccacgtgaacaatctatctctctttctattgcttttctatatatacagaaactaattaattgtatctgtaatggctaagttaagcttcactttctgcttcttgttgtttcttctgttatcctcaatcgccgctggaagccgccctcttgagggggctcgggtcggggtgaaggtgagaggcctaagcccttctatcgaggctacgagtccgactgtagaggatgatcaagctgcgggtagccatgggaaatctccagagcggttaagcccaggaggacccgacccacaacatcactagttattttgtgtttttcaatttcttcgagatgttaattacgttatcaataatttgggttggcaccgaagctggtttttcttttttggcaataaaatgtgccgaaatttaaccgtttgggccaataattcccaaaaactccatacacaaggttcttgggggcggggcccgctttcttagaaggggattgccaaaagccttttaccgcgtaccgcccgttgcccattgcccgaaacgctcaatttgaccttccttttctctaattag

SEQ ID NO: 129215 - DNA, 708 bp, Arabidopsis thaliana columbia
tggcccgtctgcggtaccggtccggaattcccgggtcgacccacgcgtccggaaaagtcagaataagaagaagaagaagaagaagaagaagaagaagagaaagagagtcagagacgacgacggacgaaacgacgctattcttacgctttcttcgatcgtcgatttgattttttcccttccttcttatttttctcggttgaagtagaagataaagcatcgatacatgatggctgattgataagagttttctccggagaggttcggagttttttttttagaaaggaaacagtaaaaaagatggcagtctcttttcctcgtcttccgaggtggttgtgtggtggtagtaacactaaagatagagagaagaaagagtcaattcctaaaggatcttcttcacttagtccttcactgaagaagactactactagtaagactggttcttcctcttcatcagtgaagaagaccaagagaggatggattggaagaggaggatcaggatcaggaggggaagaggataagattgggaatgtggtgtttcctgaacctgatgatccagagtggtcaaattggttgggttgagccacatggacccgggtttaaaggctgaggatgatgaatgggggcgggctttgtgggttttgggttccttcttttaccaagaaaaggtttatgggattgggtgttcaggggggaaattcaagcaatttc

SEQ ID NO: 129216 - DNA, 157 bp, Arabidopsis thaliana columbia
gacgcaccccacgaacgcgcgcgggcccaaggaccccgaccagtgccaacgagagccccagcgcgcgaacaccacggccagaccgccgaccacacaaacccccccccacccaccccccccgcgcgcggcgccatggacatgcaaagccacccacaaa

SEQ ID NO: 129217 - DNA, 724 bp, Arabidopsis thaliana columbia
accccaccggaattcccgggtcgacccacgcgtccgctcagacttcatcaaatcgtttctctgcttccgatccgaaatttgcggcggagaaaagaagataacatcaacaaaaaaatgatttctctattcatctcaaacttttcaaacttatcaaacttatctccgacatttgataacatgaacatgaacatcccatcgaagaagatcgtaccggtaccgacaccgagtgagaaagttgtctctttggtatctcgaaccggacgagatctgcaacgttacaacaccgcagggtatcgtcaagtcgtcggatgtgtaccatatagatacaagaaacacggaggaggagaaattgaagtgcttttgataagtgcacagaagaaagggaaaggaatgttattaccaaaaggaggttgggagattgatgaatcaatagaagaagctgctttaagagagacgattgaagaagctggtgttaccggtcagcttgaagaatcacttgggaaatggcaattcaaaagcaaaagacatactatgattcatgatggtcacatgtttcctttgcttgttagtcagcacgtttgagatatggcccgaaatctgaattcaaaacaacgcaaaatggggtttcttttgtctgaaaccgaattggagttggtgtccacaaattccctgggatggaaaagaaagcttttttggaaagccttttcatttaaaccccggaaaa

SEQ ID NO: 129218 - DNA, 231 bp, Arabidopsis thaliana columbia
ccacccggccgccaaaaccagggccgaagcgagaggcacagcacgagtttcaaattttccgaaacgccgagagcccagcaacaacagacggggcgcaagcccgaagaaaaggagacagggagcaccgacaccacacggacgcagggccccaccgcaccgacgaggcgacaccaaaaagacaggggcagcacgcgccacacaacagaggacagccaacaccgcgcccagccg

SEQ ID NO: 129219 - DNA, 490 bp, Arabidopsis thaliana columbia
  unsure (1)..(490): unsure at all n locations
agacagctcgcgaggagcggacgcacaggtgcgcgcgcgacgtgaccgacaccgcaccgacnacgaaaagcagccggcaggccggaacgacgaagaggcgcgaaagagggggggggacgaagcgtaaagcaaccagacgccacccccgccccccgccgggaggggaagtggaaattcgaatgaccgtttggcacanaaaccccccncaacgagtaggacgaacggccccgccgaccgaggcccagcagggggagcagcacccggcagagcatgacaatattttcacgaagaggcgcagcacagagaaacaagaaagcgacgggggacccagcaccgaggcactgaccacgcgacgccccaacaacgcccacaggaccgcaagggcagaaacacagaaacacaacagcgccgccacaacgcggaagagacgaagaccacggaaggaacaggacagcgaggccaagacgaaacgcggagaaccacgcccgac

SEQ ID NO: 129220 - DNA, 725 bp, Arabidopsis thaliana columbia
  unsure (1)..(725): unsure at all n locations
gcagctgctagtacgggttcggtgttttttttaatccaatccatgccctctagtagtcttgtttctccgcgtcgtcgcccgctaataatccattgctgtcgtatcgtacgtcgctctcgcctcatcgatgtcccgatccgattcgtgtttgtttgcgttttgttttaggcgaaaccaaagagggcgccgacgtagaaaacgtgcagccgctgctcctcctctccgtgtgttcgttctttcctccctatttgcgtccattcgcgcctccggcctcccctgaatcggtgagtccaaggaagtagttgcgggtcccctcgaccgattcctgcaaaggtgaggttctctcaggttacgtgaagtttctacaatcttttgtcgatgagacgatgatccttttatgactgtccatttccttctttcttttgtgtccatgccatcaaagtctcatggtttctctctctttttttttcctcaatcctatcccgttctccttatatgcgcgcaattcgagctctgctagcttgctgtgttcattctttacagcatggtagtcatagccgtctgatcttgctgttctgaacatgtgaattgcttttgcagtgcaggtccttgtataccatctcatgatatgaatnnnnnnnnnnnnnnnnnnnnnnnnnnnnnnnnnnnnnnnnnnnnnnnnnnnnnnnnnnnnnnnnnnnnnnnnnnnnnnnnnnnnnnnnnnn

SEQ ID NO: 129221 - DNA, 718 bp, Arabidopsis thaliana columbia
  unsure (1)..(718): unsure at all n locations
gcaacttgcatgctgcagtactacggccggcagcggaggttagcgaatcgatccctaccacagcgtgcacacctccccggcgccgtcgaggttccacaggctgccccacgtggcgccgtcctcctcgctggacccgtactcgtcgctggccgtggagccgcagcagctgccggtgccggcctgtccgccggcgccgtggagcacgaggaggtcgtcgcagcaggacatggggcacaagaagcaatccatggcgtcgtgcatgaccaggtcggccccggcttcggtggctaccgacgtcgtcgtcggcggcgcgcgcacgcgtcaccggtcgcgctgccgcagtcgttgtcgccggacgccgccgtggcccggtgatgcagcacgcgccgcgcgctaggtccccgccctcgtcgaggtgcaggtgctgccgcccaagagactgctgctgcatcatcatttcccggcgctgcttgaggaaccgggctctccgcgtcaacgttcttgacgttgccttcttgaatctcccatattcttgattgttcgtctccgggagctcacatctcacactgttatcacgtgtacactacagtacagtactataatgagtaataaaactacacatcagatgccaaattaaagaacttttattttagttgccatcagngtttcggtttcgaatcaaaaattttggtttttgccgttttccattggattaaaa

SEQ ID NO: 129222 - DNA, 755 bp, Arabidopsis thaliana columbia
cagctgcatgcctgcaggggatgattctggtgaccttatcggcgttcctgccgacggacacggtgctcggcggctcctcggtgttcggcgcgcacacggtagcgttcgtggggctttacctcgtcgcgatcgggagcggcggggtgcggtcgtcgctgctgccgttcgggcggagcagttcgatgacgacaatgcggcggatcgcgagaacaagctgtccttcttcagctggttctacctctgcgtcgactttggcccgatcgtctccggcctgttcatcgtgtggatccaggagaacatcagctggggcctcggctttggcatctctaccgcctgcatcgcgctggccttgggcgcattcgtgctcgccacgcccatgtacaagcgctcgacgcccaccgccggcaaggtatgagtcggctctagctagcgtgcgcagtccaataccgcgcgcactgacgagtgacgtgacgactgacgagttctcgttgcttggcaaggcgtccgtcatctccgactccgagacgggcttggaagcgatatcggaggaggcgggctcgtcgcagaagctccgcgccgcgacgaaggcagaggagttcaagacactgctgggggcttctgcccatctggggcgaccagcattcatccgtctcgctcgggcgttaacacgcaagaattgaaacacaccacccttttcaattcccaagcgcaaagggccaagccggcccattcgaaaacggttggttccccgtttc

SEQ ID NO: 129223 - DNA, 762 bp, Arabidopsis thaliana columbia
taacacctaacacccaagcagcatacgcaccgcgactccccgagtcgtcaactagcgcatgcatctagcgtccgcgcaatgtctctctaccgccccacgttccgtacagagtttccccgctaacatccagcgagacggcctattcctgatcagctgattcgtcgtttgggtagcccactgccgtggccatgaatcagcagcggaggatcagcatcaggttatacgtcaccaacgcctcatcccgatccaagtccttcatatacgtatacaaccattacaaagaacgcgctagatcacccaacgacggctaccaccatgaggtcatcgtgaaaatcgacgccgagccgcactcgccggtctccctccacgctgccgtaagatgtccctacacatctccacgttcaacacgccgcagtgccgacgaccggcttgagcatactcgcagcttctgcttccagctcgatcacatcaacctccaacgctttcagtggatacgcccccctccgtcatagtcgttcaaatttccaaaaacccgcacactcacaatctttcgtgcctgcactcgtgcgaagttccaacctaaataatccatctcggaactcatgcttcaattatagcaagctttcctgtcccattaaacctaagaccctgcaccagcttgttcggatcaaaaattccttgcatcgcaaaatctgcaactcccgctgaaatttttgttcggtaggtgtttataggccactcaagttaactattgtatggtag

SEQ ID NO: 129224 - DNA, 735 bp, Arabidopsis thaliana columbia
  unsure (1)..(735): unsure at all n locations
gcaagcttgcatgcctgcagcgggcgcggcgcaggggacgacgtgggtttcaagagccaacgcgacaccaggttatgggatgcggcgtgggctgtggtagtaggaggagcctgctcagatcgtgctttcgccgccactacagtgaagcgaccggaataatcagactcagaggctacttggacgacggacgacggccagtaccagcgccaatggcacgggcgcacggcacgtcggtcgcggcacggcacgcaccacaccctatagataggtagctgtagctcttgttgacctcttcctctcgaatgatgattctctcgttctattctagactgctgcgtgcgtggcctctgtgcggtgcgctggtgtcctggcgcagatgagagacgagacgagggacgggcgcagcgctgtgtgcgtgcgtgcgtgcatgccgtgagcctgctgactgacgcggttgatgccatgctggaactgaagccttcctttattgtgcgcccaagccacaaggcccacatctgcgcgacgacgctgatcgacgccgggaatccaatgccacaaggcctacccccacccacagtgcgtgcgtaacccgtgcccactaggccattggcagtggggatattgaatgggacagccttgcaggtcgaactcttaaaggatccccgggggtacccgaacttcgaaaattccactaggccggtcgttttttacaaagncgtcgtgaccttggggaaa

SEQ ID NO: 129225 - DNA, 863 bp, Arabidopsis thaliana columbia
aagctcgtacgactgcagccaagcttagagtagcaggcgcaccgcgactccctcggtatccaggcgagcgcaatgcatggagcgtccgcgcactgtctctctgccgccccgcgttccgagcagagtttccgcgctaatatccagcgagacggcctgttcctgaccagctaattcgtcgtttcgtgttgcccactgccggggctatagatcacagcgaatgaccagcatccgttgtacggtccaacgcctcgtccggtcgagtcttcgacttcggaacgacagacaaggaagcgtgacagaccacgaggctaccgacggaggtcgttgtgagatcgatgtcgaccgcatcacggactcgtccacgcagcggacatatatgggcaactccgggtcacatccgctgtagctgtccgtgagtatgctcgctacgttttgagtccagggtcgaacagcgtcgacctccaagcgctagggggagatgccggcccgcctcgtgggcggagtttgtttccacgttgccaaagaaatgcgggtactggcccctgcaacgtcattttccgggcatagggctgagccgtgcgcgtaatgttcgcaagggcgaaaagcattttcccatgcctggtaagcgcggggcgttaaaattgtggccagagcgttttgtaatatcgggggtaatacgaatgggggtgtagcccgagctttcttcggtagaatgtcgccgtttgttcgcgaagtttggaaggttgctagaacgtattgtccggaggtgttaagttatcgcgagaacaattttgcaccattagaggcgcgttgtgtaaaactcgagagcggtttctaggatgctgagttccttgtgtgtcaaa

SEQ ID NO: 129226 - DNA, 1238 bp, Arabidopsis thaliana columbia
gagcttgcatgcctgcagcagcagagctgtataacacacgtcatacacattcaatctcctgactgaggccatgtcacgctttcagtatctgtgctaccattctcacgtcatggcagaaggagccagcaatgtagcaaactagcgctcagaagcatgacagatccgctctggcgctcgctagcatggtttgatcgcagccataccagtagcgcacgagctgtgccattttaaggtggagcaggtgcaattattgtacatgctcgacttaagcaggttggaggacctggagactcctcaatcgtggattcgggtgcctgcaggcaggttaatttaagtacgcttattcacaatgtttcgcaatcaaaggtcttgctactatgtatattgcagtgctacatctatcgtcatgttcgcatgttcttgcatggcatgctaccaccggataagagacattaatggctgctatctccttattgctcgaggtatagagatgctagactggtgcagatgtacctacgactttggggtgtatgattgttaatgtagcgtgttgtgagtctagcgtatgttcttgagctactgcattctgttgcgatggtggtggtatctgaggttgtcgtggtgctggtggtgttgtcaccagaacggtgtgtgtgagtggatcagtcaccggtgtggtccggtaggttagattgtcgaccgagatgagtgtgtatcgatagcagtgcttgtttggttgtgttgtggttatggaagtctcagtatgcataatgaagcggagactgtgatgccgccaagtagcctccgtgtagataatgtcgtaggtggtgtcctgtgagtctgctgagtggagtgtatttcgagtcagtgttgttatgtgacactagtgagtgtgccgcacttattgttgttgtccgaagactctctggagatagtgtgtctgtgctaaagaggcgcctcaaagtggaggtggcgagttcacgagtagggtgatggaaatgtgttgcgcccattgagaatgcggtgagaatggatattcgatgaagctgtgtccgaatcgcagagagctaaacatggctgtgtcagtaggaatagaaacgtcaggtgcgtctgctggtgtgtagtagtggtactgtgtaaggcggtgctcttatggtattggaagcgcatgtattcgagtatgatagggtggaggctgctgggagaggaccttgtgtatgggtctaggtgtgtttttg

SEQ ID NO: 129227 - DNA, 771 bp, Arabidopsis thaliana columbia
cggggatcgtcgacctgcagccaagctttcagcagtaacacagagggaaacagagagagcagagcatagctattctatttgctttgcaatatgaaatgtcaaacaaatcatatttatcaatgaaaactgtagttacgaggttatgatgtgaaggaggttagcttatcagttaaaacatcttttcctattgtagagccatcatctccgatatcaatgcctgaactatcttctatttcaaggcacactcgacataattttcatgaagtcttccatctgagacaaggaatttactctgacatgcctatttctaaagttttggagataatgaaatccaccaacttggatgtaagtggaatataatgattctttctgaaatgtgcgtgagataatgtcagcccaaattctgatctttttattcattgcatcatgtggaaccaattttacagaatgcccctactcagtcacttttgagttttgtgaatgccatccttgatcggatcattgaaaataagaatggagaaattccatatgtaggctactgaaaagcaatacagttagttatttcttttcaaacatgaggactttgggacattttgttttatacttcaaacaacccccttggattaaaaaagatagcatttcttttggcaccagaaatatgcgcttggcattgtttggaggaaaagggtaaataaatgggaggaatttggaagcggcccgcaattttctaacctcaaaggccaagaaccacaattaaaggaaaattgttaa

SEQ ID NO: 129228 - DNA, 801 bp, Arabidopsis thaliana columbia
ccggggatcgtcgacctgcagccaagcttttcatttcaaaaaatataaggtcccaaaatttagggtgaagcacgaaggacaaacatctaccagtaaattgtgctcctagtcatctattcttgtacttgactatgtttggcttataaaaaacacttgtggtaactaaaggcatgggtagttaaccactaagactcacctttgccacataaaactcctagtcactctagcatcattcactaagaaccattcccactaagtaaagggtctcatcattcctcacacaccaagtcatcgttgttacagattatcagtgtttgatgatcgataaccttactataggattccaagggtaaagttagctggtatcaacgaaaaatcaaattcaatggcaatggcaagacatcgatttagatatgttcaagttgctggatagtgtaataccctacgtcctatatgttggattgccatatgtcgaattattgaatatgatctattacaaggggagtaccactacctctatatagtcctgagtataggtgcatgattctagtcctatccgtgtatgatagagtagttcttaattcaataataatggttagtccttcccaataagctggccttaaccttagttttgacttggtccatggggaatttcaaccacgccaactttgttgttagtgccttacccctaaggccattttttttggggtgggtggttccggaatctcacgagcgcaaacgtgttttgtttggagccagattggggaagatttcctgccaaccccaggcaaaatttgtaag

SEQ ID NO: 129229 - DNA, 776 bp, Arabidopsis thaliana columbia
aacttgggtgcaggggggggggggcgcactaagcatcatgtactccacgctcttcgtctggatcactcgtctcatgatgcttagtggcgccacgaagacactgacggagaagccgacgcagatccagccaagcagcataacgcgcttactacccttgaagaggagaagggtgagcaggaggatgaccccaaagacgccgccattgaggaggaccatgatcttggccgtgaacagcttggctttcttgggcgcgtagacgaatgacatgacgacgtagatggtctcgatgacgcagccggcggcgttgatggtgatgaggaaggtctcgttggacttgatcagtgcgtagaagatccacagcatggcgctgaacaggcgaaccacgtagggaaccgactggaagccttccgtcgacttggtcttgtagatgcggtgaaacgtcggtatcgggggccagaaggtcatgaatgagatgacgttacctagtagagcggaagcaaacgcccagagggtgttgcagagagcatgccagccatttgattgggacaaaggggggaatgaagctagtagctacacgggtaatagatggaacagggggccacaggagttttcccaacacggaggcagttggcttggagatagggtggatggagggagagcttggttggcgtggggttgggggaaagggagtttgaagtgagtttgcgcttgacgtcgcgtaaaacgccgtttgggcgcgccttagaaaggggaggggaaagcgtggtgggttttgt

SEQ ID NO: 129230 - DNA, 731 bp, Arabidopsis thaliana columbia
tcggctgcagctacatttcaaagacacacgttcctaattctctatcgcattgtactgcgttcatgtttgaaagggcataaccacaccgtaactgatatgtacataaccccgcacaatccacattcctaatcacctacgtccattattaagttgttacctgacataggggcacgagtgttagaatcagcatccatcactcttgacatggtgccgtgtcctgtatgcacgttgcataataccattgaccgtttattcagcgcaatgctcaattccaagacacttgttggtaacaaagcgttgagccaccggttgtcccagacacagtctgaaatcattccgctcttcatcgttccagatgattgaattgccgtagtactcaatatctagaaggcctgttgtaaactgacagagtgatatagaccagaagagtttgtgctgtgaggtctttcacgtttatgacagaataggcatgccatatatcatatagtggtagaagtcacaatcataggatattcagaacctaatatcttgatactgtgatatctaacagttacggtctaagtgcatccgaataaccggaccgttaaactcacttgtcttcaggaataagatcctcgaccatctcgtcgtcagctacctgcggtgaagctaaaaaggtaagcatgaccacagatatcattctgattccatctccgcgcaatgaccgtaacaagttctctgctaacaaggct

SEQ ID NO: 129231 - DNA, 1003 bp, Arabidopsis thaliana columbia
  unsure (1)..(1003): unsure at all n locations
tattgcgattgtcacaatcatcgaactcgataagtcatatacgtaaaatctggtaggagtatagagtaagtattaatgcgatagagtaactttactatatgttcacagaatgtgtcagtatcttaatagtaaatggatagtaatggtacaatatagatttggaatattgatccaatgaatagaaatccgttctaaactgaaagaaatacaatctatccaatgatttagacctgatctgatacaaaatcaactatgaataccatcaatactctttagaagatatatacagtcgcctcagatcatattagacacatataataaaattaaggaatgttcacaattggcaataagaaaaccaacgcaagtgtcgatcaacagatagtacatatatcccaaatgtgagatgcctgtaggtagtagtagacgataatgacagtaaccgtcattaaatcatccattgttgactatgatataacgatgatagtacacataagataagatttgagtagagcgttacgaacgacagagttcaattgtacagtacgcacaagatgatagcattgctagtgttactgtgtagcgcacacaatcactcagagctcatgtatgtagtacatatagtgtgtaccaactgtcggataagataactaccatagagaagtacagtagcctgtggactgacagagcatatcagtatgataagcacgtcgcaatgtgtagtaggtagcgagatatgtacgtagaacgcatatcataaagatgcacacaagtgagtccatagacagacagcacagaaatgagattnagacagaggaccggcagtgagctagtgcatcatgggaagtatagtaagctgtgatagtaggtgatacaatagacaagagtatttgttaatagccatcatgtaccatacatgatagttaggagagacatgtatctgagagacagtacaatacagtacactgaagtacgctatgcagatagtcgtactgtacagtatgat

SEQ ID NO: 129232 - DNA, 398 bp, Arabidopsis thaliana columbia
  unsure (1)..(398): unsure at all n locations
acgaaccccagacgcccaaacgaaaaaaaaaataaacaagaggcccaggttttaatttcgaaaggcacgacacaacaacaagggggggaaggaggggcgatgaagaaacagaaacaggcaccgaggacacaaggggacaaggggccgcaagaagaccaacacaaggcgggaaaaacaagaaaaagagggaccaaacgcggaacgaaaaaagcaaaccaggcaccaacaagcgaaaaagaaaaagaaggcaaccacaacaactacggcgctggagggggaaaccaaaagaaagagccgggggatgacataaataaaaattcaccaactcggataggggagggaaaaaaaaaaggntcttcctactcgctgagaacgggagaaacaggaagaccggagaa

SEQ ID NO: 129233 - DNA, 859 bp, Arabidopsis thaliana columbia
ctaaaggggcaccaaagctggaggccccacacgcggggcgcgggccgctctaggaactagctggatacccaccggagctgccatgtatttatctgcggtttttatgacatggacgcgaaacagctcgcacatgagtgaactactgtaagtgacagggcaaccacactaaggaagacatacatatcttcgcgacagcatcacactataggtgcggaagaaataacttactatgtagaatagacaatacgctcatacatgccctgcatccagatgcgtcactgggagacggaccgcccactcgtccacacttagggaggcagctgaagaaaccgccgatggtttcagcgcaacgcaaagccgaagactcggatacacagcagcccgagaccttacgctgtatgcccttgtcatggcgagacccgttcggctatccctgtgcaggtcaccatccttaatggggcctttagggggctgagaggcactggcttcgagctcgattctaagacggacaccattgtggactagcggagagccctggtgagcgcaacggaggcctctcaatcgacctctcgactcgatgaaacccaacaaatgctggtgactggcggtttgctattcggaccaggacccgagaaatgagcttgtgggagtccgtcgccattcggaaattcctcaaggattggatttagcacttgaaggagttgggaagtgagaagaaaacggcattaggcctcttgggggtcccgtcttgcggaatcatgggggcgataaggctcgactagaaccccatttgcgggtttaaaacgaattttgccaccgtatcggcttgcggggtgatacaaaataatacccttttgaa

SEQ ID NO: 129234 - DNA, 780 bp, Arabidopsis thaliana columbia
  unsure (1)..(780): unsure at all n locations
nnnnnnnnnnnnnnnnnnnnnnnnnnnnnnnnnnnnnnnnnnnnnnnnnnnnnnnnnnnnnnnnnnnnnnnnnnnnnnncggtcgcgtacactattgttgctccaatctcttgctattatacaatataactcaagcttgagttgagttttcccaaataataataatctatacttcaaaaaaattaagtctacacataaacaaagaatccgtgactcttcctaattaccaaactttaccacatctatcttacacacaatgcattcagcaatacgtgaacgagcatcaagtccacaaagtactgatgtccaatctcaccgtccctccaccgcattttcgctggagctcttccgtaatgaactccatcgttgcaacggttatcgtagtgccacggatacgtcatatcgaagttatcaactacgctcgtgaccaatcccgcatccctcattttctcgagaaacactccgttaaacgcctccattttgctcgggttaaacgctagcattctcgcgtacccgcctgtcgcgattgtgttcctgaaaatcacttctggcggttgcaatcctctgcttttgaccccgtcaaaaacttctctccaaaacgcagctgcggtttcagcacctttcgcaaggctctaagactagtccagtgaatcccgtcgtgtagacccgagttcacgatcatcacgtcgggaacacggtttgtttcttcgtttgagtacttcttgagcaatctctaaagtcctgtctttagcgaataaggccctgatagtcttgtctcgt

SEQ ID NO: 129235 - DNA, 968 bp, Arabidopsis thaliana columbia
  unsure (1)..(968): unsure at all n locations
aaaggcccagaagcnggagcccccaccgcgggggcgcgcccatagaggacccaaggaagcccccggggcagcacgtatatttcgccggatgttatgaaccacccgcacaacaacaggacagggaggaacaacggaggaacaaaggagaacgcggaagcgacaacaaccccccgacaacaccacacgacgccacgagaacacccacacgccacaacgaacaaacccaaagagccacggcgcaagaaccaccagaggcacaaacacacacccacacaagcacaagcgacaaacggccggagaaacccaaggcggccgaaaaccggcagcccaccccgacgaaggcaccaaccgcaagggaacgcgccacacaaagagcgaaggacccaccagagggaaacagccgcgacgaaccccaccacaaaaagaggcgcacgaacaaagagaccgagagacaccaccaagaacaggcaacaacaccgaaaacgggcacaacacgcacacaaaaacaccaccggggacggcaacaaaggagaacaggacagtaacacacaaaccgacagaaagccggaaaacacgaaaaaccggcacgtatcaaaaccacgagacgcggcagaccagacacaccgcgccccacgacaagaacaacccgaaccaaggcacaacgcacaagccgaccagccgcgggggcaccaggacatgagaaacaaacaaagcgaacacgacaacagcaaacgacaaccgccaccccgcgagacacagcaaggaaccccacgggagacaagcccacgaccaacgaacgcaaaagcaacgaacgacaaccggaaaaccgaccaccaaaaaccaaggcggcaaccaaccgaagacaaaccgcacacggacgacggccccccaacaccaaccgcacccacacacacccacaaacaaaggacaagcacagaccccccacacaaaagacgccacggacaaac

SEQ ID NO: 129236 - DNA, 623 bp, Arabidopsis thaliana columbia
ctaactggagggaaaacgaggtggcgctcccccgggggggcggccgctctaaaactaggggattttccgggctggagtaattcgcggccgccgtatctaaactggtatagaaccaaccattgttcaaaatagtactaaccaaaaaacaccacaaaatgggcttctttaaaaaagcccaacataaaaagtcttaacagatcaaaaaaaagcaagtaaaagagatagagataggagaaagagagaggtcaatgtccaacaaattagtcgacctcctcgatcttaggtccagcaccgcctgaagcagggggagcatcatcgtccataccagaggcacctggaccaccggcttcaccaccagctccttggtacatcttggcaatgattgggttgcagatgctctccaattccttcatcttgtcttcgaactcatcagcctcagccaactggttaccctcgagccattgaatcgcctgctcaatagaatcctcgatcttcttcttgtctgcagccgggagcttctcacccaatctttctcgtctttggaatggtgttccttaatgtttgtaaagcgtagttttttcgaagaggccgttcttggggcttcaaaccctttttttctttgt

SEQ ID NO: 129237 - DNA, 762 bp, Arabidopsis thaliana columbia
ctccaggcacggtttgatgtaccgatatctagatatcggacgcgcggccgtataacgttggaagacagattgatatttgttggactttggatcgaactatcgaaaggtaaaagaggttgatatgctctggattccgactcttcccgtcgtcggcgacggaggttttgcccgttggctctgaggttatatcaggctttaatctaagcggattgtcatcttctgagatatggaacatgttttggtctggccatatctgctaccactatcggcttttcttattccaagaagcactctattggcggattcttgcacgttctgatatccttgggggctcttttgctaactgcacttattgggcaaaccctcttctatgatcttttggggaaggtgtgaggcaaatttctcaaacagggctgaagtctgcgaatactgccttcacatagtcctagagacacctctgggatcctctctttcatatcttgttcttatgggtgctggttgaagaaagatacatcaatttcttttatgttttactttacagatgtcgattccttgagtctgaacccctgagtgagatgttgtgagcatatggtcctatctattatccaaaacaggctttcttgatggctccttctcgtctaagacatctcaccatgaggtggcctgttcttttgctctctttctttcggcttaaaggctccaccccgatttctgtctcgtaagcgaaatctgccgggttcttcccttcccccacttggggag

SEQ ID NO: 129238 - DNA, 835 bp, Arabidopsis thaliana columbia
  unsure (1)..(835): unsure at all n locations
gaaaanaagcctcactaaagggaacaaaacctggagctccaccgcggtggcggccgctctagaactaggggagccctttttctgcattaattcgcggccgcgtcgatctttattgcaaaccaaattgtcacacacgcaaaaaacaaaccttaacaatacagaaattaagaaaagaaaacaaaagcataaccattgacgaggcaaagacgcgccgtcgaaaaaaaaagaaaaaaggagactcgttttttctgatgatgtataagattatcacagagtttataaagtaaaatatttgctcacaagaggcatgctcgagtgactattggattaggggtcatccggcgactttcctagagtaggcattgggggtgggttgagttggtctaaggaacatgtcacgtgtttctcctacccaacctgccttcataggaggtggattcacgctgatgatgctgatcaaccacagacacagagtggcttcgagatccaactgctccaatggtcatgttagcgagtttatcaacaggctcggatacactactacgagagacccggtccatgctcaacgatgctggatgaagactcttctttccgggtggcctgatttggagtctctgaccgaacttcacacgggtttaagtgtcgctcgaaccatcttggataagcagattaaggttaccgttggacaccaattgccaaatggcggcaattttgacctttgggggaaaaccatagcctatttggaatgggcatctaccaattgagaaaagaagaacaacttgggtgtaccccgtattaaactgaatcggggtggcctccgaaaagggaatccccc

SEQ ID NO: 129239 - DNA, 921 bp, Arabidopsis thaliana columbia
  unsure (1)..(921): unsure at all n locations
gtttngatttacttgataccgaagtcccggccgccccgcactctcaacggagaaagaccaagatcacaatttttttgtttttaccagactcacaaccaagcagctactgttctctctactgcttaacccaacatcttctcctcacacttgccctctaagcaaaaaactcactcttcatcaaactactacttctacgggccattgcttagtgacaacgacgacgcttgtgaatcgcttcttccttatgaatcaatcgacgaacctgactttctgtttcatcccacgattcaaacgaaaacagagttcttctcataccagaaggaaggtaactccggtggagattgctacggcggtgaaatcgaaaagcttgatttctccgacgaattcgatgctgaatcgattctcgatgaggatatcgaagaaggaatcgatagctataatggcgactgtggtggaatcgaattcaaattctgggatttatgaatttagggttccgggaacgatcaatcccggcgggagaagatcaactaatctgaatgggaaactagaccagaccaggatgagcaattcctggaaatggaagctctaacgggattcgattctccccgttaccggcttggggattacggaaagtggcttgttctccgcaaaaaacgaccgaccctccgaaaattgggggggggagaatatccactaacccctttggactttttcgataaaccaggacaccttcgcgcccgcctggaaatcttcaaaaatcctgaataacaaaaaccccggtaaaaacctgtcgaaaattcttcctaaacccggcgttgccatgcacagggagagaaaaaactcccgacaccgggtacaacacaaaaggagggggatagaagatcttctctcggtcccgaagtaaacgcaggctacactcaa

SEQ ID NO: 129240 - DNA, 708 bp, Arabidopsis thaliana columbia
  unsure (1)..(708): unsure at all n locations
nnnnnnnnnnnnnnnnnnnnnnnnnnnnnnnnnnnnnnnnnnnnnnnnnnnnnnnnnnnnnnnnnnnnntgtttttttggtctatttgcttctcaccatgcgatgatgtgggaacaaacagaggataggaactcatgttgggatttgtattcgggggcttttaaggcccaaagagactatgcatatatagtgatacataatccacgtgttgaggaataaccggcttgtggaccttttattgatggtgtggctatgcgagcccttttgccttttgggtccaccgataagaacattctaaagaacggaggattcgaagaacgtccttgggttttaccaaacatatcatctggggttttgattacaccaaactgcatcggcgatcactcttctgctcctggttggagggtcgagtctcttaatgctgctgaatacatagatgccgatcatttattcgtttctcaaggacgaacagccgtcgaactacttgtcgggaaagacaggaccgacgcacaagttgttcggactatccctggagaaacctacgaactattcttctctgtttgagatgctagcaacggcttgcgcccggatcaaatgatctgttttaaggctttcctctctgaaaaagaacaacgaatcaaaggggccctcgtattgtaaaccccaataagggggaaaagggggggggattttctaaggccgcaattc

SEQ ID NO: 129241 - DNA, 716 bp, Arabidopsis thaliana columbia
gaattcactctcactaaagcaacaaaagctggagctccaccgcagcggcggccgctctgcaactagtggatccctacgggctgcccgtatttctgcggttaattataaggaccgtacatcatacataagtcagtgaccaataaatatatatagtagacatgcgttgaaagagcatgggttcattatcatatccctaaagatgaccaattcaaccgcgaacctgatcacatagactatgactccggacatccgaaggattctccaaacagtgagacgttgatttgccattgctcaaacaacgtcatgctaaattggttacctactggagtttttgcgcaccacgctggctatcggatacagttacattaatatgttcgaacacatgactatataatgacatccgcgaacaatgctacactctatctacattgatgaagagagagatcaatccctcagtggactcctcgaccattaccagactagagagagtccatcaattgccgctgatatatatgaaacctgttgggttcagatgtccaaccgagaatatggttgagccatacaacgtggctgccgtgtaagagcacaaatccttgaagaacatctgtgacataccctatcgtctgagcaaggtgatctactatagagactgacgggccacccagatgacgcggcacatcgatacatgagatacgatggcacagccttgttctata

SEQ ID NO: 129242 - DNA, 788 bp, Arabidopsis thaliana columbia
taaagccaccaaaggcggaacctcaccggaggtggcggcggttttaaaattagtggatcccccgggctccattttttcccgttcttccagattcgcaacataatgaagctcaggcttccaagtgtcctgtctgggctccagggtaagtctcaaatagtgcaggatgagctagcgaggcttggtgaacaactagttaacagtgctgaaggtacaagggctatagctttggagctttgccgtgagtttgaagacaagtttcttctgcacttggctggaggtgaaggaagtggttggaaagttgttgcaagttttgaaggaaatttccccaaccgtatcaagcagctttcattggatagacattttgacctgaacaatgttaaaagggttgttttggaggcagatggttatcaaccttatcttatatctccagagaaagggttgagatcgctgataaagattgtccttgagtgtggctaaagacccggcacgcctttgtgttgatgaggctcaccgagttcttgatgacatagtttcagcttgtgcaaatgctacacctggacttgggagatatcctccttttaagcgagaagttgtagctatagcaagtgcaccacttgatggtttcaagaatgacagcaagaaaatggtggatgcactagctgatatggaaacaccttttgtcccacctaaacattttattcgtcttgtgccaaagagaatggaaagacaacctcccgaggaaatactttaagggctatcttctaaaaagggactagatgcagagcact

SEQ ID NO: 129243 - DNA, 802 bp, Arabidopsis thaliana columbia
  unsure (1)..(802): unsure at all n locations
gaaaaaacgnnnnnnnnnnnnnnnnnnnnnnnnnnnnnnnnnnnnnnnnnnnnnnnnnnnnnnnnnnnnnnnnnnnnnnnnnnnnnnnnnnnnncggccgcgaaaaatattatctctgttcgtttcgtttatgaaccatttttttttttaccagctgcacttctatgagatgattactacaacacttgaagaaagcatgctcaggaaacaagcaaggaaaaagtttaattttatttaatgacattaataaacccaaagttgagtgtgagagtagcaaaggacataattagttcaagcagaagcagccaagagtccattgtgtctgagcagaggctctggggaaggttctcgtcctctgaactccacaaacacttttagaggagcttttcctcctgccagagcaagtatagtgtatctgaatctctgtcctgtttctttgacagccttaatgtcatccaacccagcatcttcaaaagctgaaaacgcatctgcagacaaaaccttcgcccacttgtaactggagtatccagctgcataaccacctgcaaatatatgactgaagctacagaggaatctatctttcagaggtggagggatcacttgtgtttttatggacaccctttgataaacttccgaaatggtctctgccccaccttggctgtattttgtgtggcgcatccagaataacctgttgccagactttcaacctgggcgaaaacttaaggggaccccttgccacgggtaatggatccctttgccaggccgggggaacctttttttctgtgataaccatttcctttca

SEQ ID NO: 129244 - DNA, 425 bp, Arabidopsis thaliana columbia
ctaaaggcacaaaagctggagctccaccgcggtggcggccgctctagaactagcggatcccccgggctgcatgttttggcggtttttttctccggcggcaaacaatctcctagaccgtgcttgcatacgactcgcggcggctacggcagtggaaatacaggtggggtctacaggcggtcattgcccccagctgtcagccacctgggggatgactatcctgctcaagcgctgcctgttagtagaccagtacttaacgggtcggaagctacagtaagcactcatcctgagccccctgtagagcgcggggtggaaagacaaccacatggccgtggccctttcctcacaccgaaagtaagtaccgtgaatccatgcttcgttgacgtggcaatattggggagaaaggaacattccttgcaagcaaacat

SEQ ID NO: 129245 - DNA, 810 bp, Arabidopsis thaliana columbia
  unsure (1)..(810): unsure at all n locations
cnnnnnnnnnnnnnnnnnnnnnnnnnnnnnnnnnnnnnnnnnnnnnnnnnnnnnnnnnnnnnnnnnnnnnnnnnnnnnnnnnnnnnnncggtcgccacattatatattatatatacattcatcagtaaacaatcaagcataaacaaaaccatcttgatagacaatatattaatttgggttattaaacctaacaaaaaaagacaaagcaaaatgagattttaaaacaaaaatacgaacccaaatcaaattacatatatataatggggtcaaacgaagccagaattgtcaggccaacgatagtatctttgacaaataagtagtgcaggaagaacttgacgatgaggtagactctaatgcttgacacacgatataggtgcatggcctctcttgcggatcaatggccggacatttcaaagccaagatcataacatggacaatctcgcgctgatgcactgatgtgtcaatggatgactcgatccacgtggctatatggcgatctcgatacgaatatctagcccacttgaccaaacttccgttcactccagatgcgatgtgctcattactggaggaacatttaccggcgaggagatgaacgatgaggattccaaaaccatacatgtcacttttacttgccatgtccttgagctctctccttaatggagccaagaaagccagcatccatgcaacgtaagccacgaaaaccgacacataaccttggttcatcggggacgtcctatgaacaatatcttcccgcggataaaatacccggcaaccaacaaattggtagaacacccggcaaatgaaccaaaa

SEQ ID NO: 129246 - DNA, 700 bp, Arabidopsis thaliana columbia
cggtatcgattagcttgatatcgaatccgcggccgcgtaggactatggatctacaaacgcatacgacgattttttctataccatatgcagtggggctccacccgccggcggcgactgtggccttacccttggagaaagaggttctattatgcttgaagattatcaggagagccaacaatgtgagaaatggcaccagagagaggatggccgagagagtgccactagcggctggaatcattgcaagaggcgctttataggcggcccatgagcacgtaaaactcacttgtggggactttccataccgcccgttgtggaaacacccttttctgtcatctttacggcaaggtgcgaggacaatccctgccacaaggcaggagggagctaagtggttcttcggataagtctaacaaaacatatgggaacctttattttgtagggagcaacaatggggggtggttcaagacagatgcgaccaagtccctggttgttgaccacacaaaggaacctaaccccgagaacgaacctccgagcgacatggtggaagcatgaggacctttctaattggccagacaagtttgtttagatggggcccttagcgtcgattgaagttggcaatttcacgaataatcccctggccctatgggagggggtttccggttggccctaaaaccggtccccatccccgatttggctcgaaatc

SEQ ID NO: 129247 - DNA, 748 bp, Arabidopsis thaliana columbia
  unsure (1)..(748): unsure at all n locations
aaagnnnnnnnnnnnnnnnnnnnnnnnnnnnnnnnnnnnnnnnnnnnnnnnnnnnnnnnnnnnnnnnnnnnnntattctgcattatattcgcggccgccttgtctgagatcatcgcaactcttctatacaaatccgcacgcgtcggctctgctgaagcgatagccaaactaacctctgatggagccttggacccacctggtcttgaaacaaatgcaatggcacacgcgtttgctcttatcgttggaattatcatagcggctaacatttatggtggtcaccttaacacagccgcgactcttggccttgccatagggggaaacataacactcatcacaagtatcttctattggagggctgagtggcttggctgcatacgacacttgacttctcctacgcatctgtgacttaatggcaaggagcgttaccagacccacggtgctctcaccaccgcctaggaacagtcgaaggtggagccatggagatcgatgtgacctttgcataggtcaacaccgttcacgcctcagcagctgatacagagaaaggatcgctaaggaccatcgctccaatgaccatcggcttcataggcggagccaacagactcgctgctagtacattcaacggcggctagcatgaatccaccaaggttgatcggaccaactgatgttactggtgactcgtcccaaaacatgagcaattgagtgtgaccaaatgtgggtggtgcactggctggaactatctacagagact

SEQ ID NO: 129248 - DNA, 854 bp, Arabidopsis thaliana columbia
gcgtgcacgcgcggtcggatgagaccacatgtgagaactacggggcagcccgtttatttgcagtttaatcccgggccgccataacaaagactaaagggattataaggactataaacatgacactcgacttacacacaacacagataaagaacataaactcacaggtacagacaacgtcctttcacacatgacacaacaaggcgtcaatcttgcttagtcgcatcaacactccttaattgcaagaaatcacctaccacgggagaaaaatagttggactcgtaccacagcctgcccatctttagaagcccacactaccataggctttggaggcatctaaaacgaaccccaaaaacatggtttccacggggagcgtcgcttgagctcccccccataaccacaacatgattctcgcgaatttgacgcccactacatccccatcttctttgccctggagcgggaaagaaaagcctaacacccccatttggttacccgccctgcccaactccacagcggcgacgactacaccatagaaagggcggcgtgaacaaacgaaacaccgcgtggaaaagaatacaaaaacgatgggagcagaaaggaaggaaacgggagcttttggggaaacaagccctactattttttagaacggaacaccccaccccatgcgaaggtcctttttcacggagatttacgccccaaccggaagataacaatcgaacgaacaactaaattggcaccccccaacaaagcaccggagcccccaaaatcggcgaaacaggcgcctcacatcaatgcgcaagggcacatcaacatttcaacaacggagtatggctacacacttctaagctccccaaagg

SEQ ID NO: 129249 - DNA, 709 bp, Arabidopsis thaliana columbia
  unsure (1)..(709): unsure at all n locations
acgccctnnnnnnnnnnnnnnnnnnnnnnnnnnnnnnnnnnnnnnnnnnnnnnnnnnnnnnnnnnnnnnnnnnnnnnnnnnnnnnnnnnnnnnnnnnnnnnnnnncggccgcttattagatatgttacattaatggatataaaacgccaagacctctttgactctctctttctctctctcatgggaagataatcagtttatatataaaccacaaccggaaacaaagaaaacaaagcacataaaaatgatgaaaagattttaataccccaaaacaaaaacacaaaaaccattagagggaaatttcacaaggtgcatgaaacgttcttcctcgacaaatagcttcaagattttctccggcgtatgagcacaaaggtgaaacctctacaccagtagcatataaaggcacagaatgtgttagaaatccaccagctgctataacccaacgtgtgtgtaaccttagaaccaaaagcctcgcactctccggtgtatcaaaattagacccgttaacattcttcactggtgccaactcctctttccttaaaaccttaaaaagtgcggttgaagggaccttaggaaaccaatcaaaaatgaattggtctagtctaggcccaatgcgtatccattcatagatggtatcttcttctccggcaaatggtacacgctatctttttctagggcggtcgctacttgattaaggaaatctaaagta

SEQ ID NO: 129250 - DNA, 702 bp, Arabidopsis thaliana columbia
gttgccggaccgctccggaattcccgggtcgacccacgcgtccggatagtgataaccaaatcataattacatggacgacgatgacggagttgcgagtgacgaaagcatatttgaccttacgtataacaaaggagctattaacgccggtgagaaaccgccgcatgaagatcgacacagcatagttgacggacgaggaagaaggattaggctgccaataatttgcgcaactcgaggtcttgaattgacacaagacgttacggacatgtgctatggttaaaccatacagatggcttctacgatggagctgagacgttctatcatagccgacactggaactggcgatactccggcgagattctgcactgattatatcttcacttactatcagtctactatgcggaaacgtgtcgtcagatcggacgaaggagaattcagcagctgatgaggatgagggttaacagtggcacacacaatggggacttctttaatggcgtggtggtggttctggaggacttatggactgctgcggcgaggtctgattcatggcagaacaggagcttcgctacctgagctacgacggaaatggtttttgcgcggctgccgctatcaagtacactattttatccgcacccgcaggcgcagtcagctttcgtcgatcgagcagctgcaatgggtgacgcttcagcagctttaactgggaat

SEQ ID NO: 129251 - DNA, 665 bp, Arabidopsis thaliana columbia
aggaaagctggtacccctgcaggtaccggtccggaattcccgggtcgacccacgcgtccgtattgtgataaccaaatcctacttacatggaccacgctgacagagcagcgagtaacgacttcatatatgaccttacctaaaacaattgacctattaacgccggtgagaaaccacccactaatgatctacacagcatagtttacggacgaagaaaaaggattaatctgccagacatttgcgcacctcgagtgactgaatagacacagagacttacgtgcacatcatgcgatagctaaaccatagagtggcatctccgataaatctagccttctatcatagccgacactgtaactgaaactactcccgcgagattctccactgattctatctccacttactatcacttaactatgctgaaacctgacgtcagatcggacgaaagagaattcagcagctgaggatgatgagggtgaacagtggcacacacaatgggcacttttttgatggctggtagtgattcttatagacttagggatgctggcgtgaggtcttatctattgcaaaatctggagctatgctacctgagcctcgccagaaatggattttgcgcggcggccgttcctcaatatactatcttaccttcgccagcatggaagcaagatttc

SEQ ID NO: 129252 - DNA, 769 bp, Arabidopsis thaliana columbia
ccccccgggttcgatttatctaacatcctgctctcggattcgcggccgcttatcctccaacacagagagagagatttttatttttatctacagaaggatagatccgtccacggagagagagaattgcgctttaacgcgggcaaccacaacgactaccgtcgtgactctctactcctgcgatggctctttgaccgcgtcacgctttagttgagagattgaaagattatggacaataagatattttctctctttgggatgaacttccaccagacgagaaagattttctcctgtagagatatcgacaatttggatcttccaagcaatagatcggaccattagatgttcccttcactcttaacgcttaccggttgcggcgattgaacccgtaccggagaattgggtttccaccgtagatggactaacaatggccgatacagagaaatgggcggaaaacgggattaaaaactatctttcacggcacattaggcgtcgcgcttttatctgggggaccggggtacaaggctttggaatctcatactccaaaccggtgccttcaacatcggcgattcccctcatgggcaaaattgctttttttcaaaaatctcaggccaaaagagaaaatctttgtcgcggttacaaacagaaccttggcttcgcctcaacaacttatatgaagtggacaagggctccctatttttcggcacccagtttttacaaaatctcccgttttggcgtcatatatttattctgaaacctacgttcgcccatt

SEQ ID NO: 129253 - DNA, 314 bp, Arabidopsis thaliana columbia
caggacggcccggcacttacgactttttttcgccaaagtatagaaaccactgactttctagaaacttttaacccgcaaacacctagaaaatatccacaccacctaggaatcaggtacctctcatctaattcggtaccaggaacttccctctagcaaggaatccccgtacccacgggacaacaccactccggtaaaacgcactacggcacctctaaccaacggagcagacaaaataagttataccaggccttaagttcttccaggccccacttcagcgcttctagagaaaccaagaacaggtagcactactcccc

SEQ ID NO: 129254 - DNA, 796 bp, Arabidopsis thaliana columbia
tcctccaggtccacggtatcgataagctggatttcaaatccgcggccgcctggttttcgccggcgatcatggagaaaagcggtttttttcccgtcggtctaagggttcttgtcgtagacgatgatccaacttggctcaagattctcgagaaaatgctcaagaagtgttcttacgaagtaacgacctgtggattagctagagaggctttgaggttgctgagggagcgtaaagatggatatgatatcgtgatcagcgatgtgaacatgcctgacatggatggtttcaagcttcttgagcatgttggtcttgaattagacctccctgtaataatgatgtcggtggacggcgaaacaagccgagtgatgaagggagtgcaacacggagcttgtgattacctcttgaagccgataagaatgaaggagttaaagattatatggcaacatgttctgagaaagaagcttcaagaagtgagagatatcgaaggctgtggatacgaaggaggagcggattggatcactcgatacgatgaagcacattttcttggaggtggtgaagatgtttcttttgggaaaaagagaaaagactttgactttgagaagaagcttcttcaagatgagagtgatccatcatcttcttcttccaagaaagctagagttgtttggtcttttgagcttcatcataagtttgtcaacgccgtttaccaaatcggatgcgatcacaaagctggtcccaagaagattttggatctcatgaatggtccatggcttactaaagaaaaggttggcagccaacttta

SEQ ID NO: 129255 - DNA, 651 bp, Arabidopsis thaliana columbia
gcagtaccgcgagcggaattgtcgggacgacccacacgtccgattcggggaacgaattagtgaagaaaaggaaccgtggcatagtctacctctgtttgagtggcctagcaggaaaacgacctgggtacattacttactatcgttctattgatcattggatagaaaaaccccctctgttaagaacacattctacttccatatcatcctcatttacttgaaatcctacggacagtactgaagaaacatctgaaagacctctacgacagagtcaagaacgccatgaacgtgctgcttgatcagaaagactacgggggctgccttcagtctgcacatcgatagacctgaatacttcgaacagtgacgaacgtcgacttcaacagatcaacatctctttgggacagactagaccgacaaatgctacatgagcgtaaacctcaccgagatgatgactgatcgcggggaccctaaggctgacatgttactgatgtatagtactaacagttcattacaccatcttcgacgctgaactgcacacatggaaaacctcactcgtagagcgctctgcaactgatctatgaccgtgtgacacgttgacctctactgtctgatgctgtcataccagagaccgcttactagattgatcatgcttgt

SEQ ID NO: 129256 - DNA, 620 bp, Arabidopsis thaliana columbia
tagggaaactggagccgctggctggacccggtcgggaattcccgggtagacccaggcttccgcgtcttacaataataagggtcaggaagagacccttgactaagtgtgcatgtccaagagtggtaaagtcggtaatcccgctaaccgaaaatgagtctatcggtatctatgctggtgcgacgacacacagtctctggaaagtaaactttgtattgggatacgacacccttttggtcgatattctgcggaacgtactgcatgctgagctcatgcatcgctcctaggcctgagaggacttaatctggctctgcagcttcataaaagagaggatgtggtgcgcattcagtcagtacttgcagagactggagtcttgtcagagcttgcaacgtactctcttgcacctaacaactgctggtgacagatggtagcgctcatgctactgtgagccatgaagcattctggatgatttatgatcgccgagcctgagacacctggacacctaggtgtggaatacatgggacagttgatcacagtactatgtgactctggactgctaacgagtcaacaaacacttcgactgtgttgtcacagtcaggtgcgaccttgacatccgcagactt

SEQ ID NO: 129257 - DNA, 689 bp, Arabidopsis thaliana columbia
caaagggcacaaagctgggctccccgggcggcggccggtctaaactatggatcccccgggctgcattttttttggtttttctaaccacacttggaattttaacggaactttttacatacacaaataattatatttgtttcacaaaatttaagtatattataaaatataagacaaaaacaaaatcaagttcatcaaacttgaagagagaagagaggaggaagatcagagattgttcgagaagaataagatgaagaagaagaacacaagaaacgttttaaagatttgaggaaacgagtgataagattattgcatatacaagtgttgggcttcctcagcttcctgagcttcttaccaattctcattcttataccaaccactctgatcataatcaacggtccagatgatctcctcctctgttgatgctgtctgggcttgctatcggcttgttctaaaacctttttcaagaacttgtatagagaaagattttccgctaagcagaagatttttcataccaacttaactgcccggcgctgctattgggcataacaacccggtacaccatagggttgggcccaacccccaggcccttttcgtaactaaggggtgtgggcttaccttcgccaaggtttcttctccctttttaaacaaaccccaaaccggcgtagtaattaaggggaaaacccggaaaa

SEQ ID NO: 129258 - DNA, 643 bp, Arabidopsis thaliana columbia
ccggtttggatttgctagacactcgaattcgcggccgcgttggactttggattcgaaaaattgaaaggcaaatttggtttttacgctctggactccgtctcttcccgtcgtcggcgacggtggttttgcccgttggctctgatgctatctcaggctgtaatttaagtggagtgtgatcttctgagatatggaacaagctcttgtctggccatgctgctaccactatcggcttatctcattccaagaagcgctctattggcggcttcctgtacgttctgatttacttgtgggctctttcgatagctgcacttagtggtcaaaccctcttctatgatctttatgggaaggtgtgaggcaaacttctgagacagggctgaagtctgcaaattcttccttcccatagttctagagaaacctctctgttcctctctttcatatcatggccttatgggtgctggttgaagaaacaaacataaattactgttctctctcactttacaaatgtctaacccttgagtctgcacccctgaacgagatgttgtgagcataaggtccttcctattatccacacagtctttcttgttgggtacctcgcccctttgcgttctaagcatgtggttcgcatcctgtaatagctaaaatt

SEQ ID NO: 129259 - DNA, 702 bp, Arabidopsis thaliana columbia
actccacactgtccggatcggggttataatagcctggtaaattagaggacggtggtgtttgttgttttggttatggacaaagaggtcatcgcttccgagactgatgatgcgtgaagaaccgataaaaaaacggcgctacagtatactacgactatcaatctggtacatggatatgatataaggtgggcacattttccgttggattctactgttagactagcgagaaatgtaatcacggatcgctttgctgatcttaagagttgcctcatcaaatatctggatcctgtatcgtgacttggtctccatttccacctctgatgagctgaggctagccggttttactcatgacaaactatgctccattgtatggtatatagcagaagttaaccctgaccaggaaccaccctatgctgggatgagcaattctgactcaactgaccacgtttccaacatattaagtggctatgctgacaatggtagagttgtagaatacttcggatctgaccaaccatctgggtgcttagagaactgtattttacattttgcgcaaatgtttaataaccatgttgggtttgatactatattctacgtggaccttcatgaccttgagatgaatctctttgccgaagcaacctgaagatgctggccccttgtgcaagattctccatgaaacttttttttacgtgggctggttgatccaga

SEQ ID NO: 129260 - DNA, 505 bp, Arabidopsis thaliana columbia
aaaaaggccaccaaagcgggggccccaccggggcgggggcgcggtgtgtggacttatcgggatacccacccggacccggcagtttatttcgattgttctccaacagaccccggaactcacacctatggacacgagagacagatcaacataacacccatattacgaatccatcaccagagactagaatgagtcccaaacaaccttctcctatatacagaaacccaataggtgcgatacaccacaccagacaaccgttgaaggccactaagggtattacacccacaggattgctttggaagagacggaactccataccaagcgagaggagaaatggctgctacgtcgagcagagcctactatcatagccggcactggaaccggcgctacccccgcgagtttctcgactgattgatactacacttcttctacgttaactctgcggaaaccggtcgtcagaatcggatgaaaggagaaacctgcctgtggcaggaccgatgaggggtac

SEQ ID NO: 129261 - DNA, 742 bp, Arabidopsis thaliana columbia
  unsure (1)..(742): unsure at all n locations
cggtttgacggtgcctgacatctagactctcggccgcttggctctttctcttccattatagtctgaaggggttttattttttagangacggagaacgagcactcttacgggatacggggaaccacgtcaatgtaagatccaagaagttgttggtgaaggaagctactgagttgttgcttctgcggaatgtccacacacgggaggcaaagtagccatcaagaagatgacaaatgtgttagaacatgtttcggatgctattcgcatcctcagagagatcaagcttctcaggcttgtacaacatcctgatatcgtggagatcaagcacatcatgcttcctccttgtcgcaaggaattcaaagatatatatgtagtttctgagtagatggagtctgatctacaccacgttcttaaggtaaatgactacctcactcctcagcatcatcggttctttttgtcccaacttctctccggcttaaaattcatgcactcaagtcaggcttctttgatcccttgccggtttctatagctcttacattgtcatctgaagatgtattgagggttttcctttgactcttgcttcatatcactctttgctcttgtattatagctcatgtcgtccatatagatcttgaagccttaaaaccattcttcgcttaggctagatgggcagaaaccaagaatcctgggactttagggaacttggcgccgtggtcgtcacatttcctcgatttcccccctttct

SEQ ID NO: 129262 - DNA, 780 bp, Arabidopsis thaliana columbia
tcgaaattaaccctcactaaagggaacaaaagctggagctccaccgcggtggcggccatatcgaaaaccagcgggatgcagttttttggcggttttccaagacaaaccattacccacgtgattcaaatgggagcaaagagtaagaagaagaagaatagagttacaacattgaaaacactcattgagagacatcatgggacaataggcagaacacaccactcaacggtttgctgctaaacaacttgacaaaacaaaatctgtctgactatgacactgcagaggagacacccacacatcatgaagcacggacactatcactcctgattagacatgcataccgtgtgaccggaggggctgctaagtctactagtgacgccttctgagatgataagccaactgctgtgttaggagtctgaggaggtgtaaacaccactgaagctgaagacgaatgagcatgagctgaaatagacccttggattacagatgagctcacacgttttctaaggagcgaagtgtactttactctgatggggagaggagttgtgttccacaacaacgttaatgtgttgtacaagtctggcaaaactctagttgaactgaacaactccggacgggtataaaaagatggaaggtaaatgtttctcctcaccctttgaagaataatttctttgcaaccaatctagaggggatggaaaacctccccagaaaaacttgtgctggggccaattaaagttggcccccttcacacgggaaaatcgggcgcagttctaaaattaattc

SEQ ID NO: 129263 - DNA, 857 bp, Arabidopsis thaliana columbia
cctagatatagaatgcgggccgcaatctataacataggattgccggagtgttttggtattaaagaatttaatcgtgaaaatgaggaaaaaggatataaaccgataaactctcctaagtagaaataaaaaacgatcaataaactcaaaactgaaattacaataaaggccaaaacaaaaatgaaaaaccttaggaagatcacaaactaaaaagcaatgaaaaagatagggaaaaatgaccacaagttaagagacatttggatgaaactagtaaccaacgagcattcacaagaaaaatctgaaaaaacctaatatattaaaaaagctaggccaataataataaaaaggtcatgggaaaaggccaaaaagattaaatgggccacttgctaattcacgccccagaaaggccaatacaccttgaattattttcaaaggaaaatctcaaaaaaaaaacccccaaatgcaaaaagaaaattcttaaccgcttggaaacaagaaggcaataccaaaaacggcgagaaaattccttactcaaaatgaatggtcaaaagaaaactttatctttgggatttggggggaaacagtaaaaaatactccgcttggtattgattgaccaactgaggaataaacctctattaagggaaaaatttgcctgtttaaaaaaattaggcagttcaaggattaaaaattttaataaaaccgttttgaaaaaaaaacaattaaaaactttaaattaaaagaaggaattcatggggaaaggaacaattctacacaaatgttataaacccccaatgggtggaaaaccttaaaaaaaccgtaaataatttaaaacataataatataaaaaaatggactcaatg

SEQ ID NO: 129264 - DNA, 577 bp, Arabidopsis thaliana columbia
cggagacgcacgaggggcgagcgctctaaacaaaggaaccccatttttccttttttccgggcctgaatcacaattgggaacggagacaacgaaaaaaaatccacaaactcaacaactaaaacacgaaacaaaaccatacaatcatcgacacaaacgtacaccacaaaaccaaaaaaagacctactgtaaagaacgggaccagagcaaaaacaacgtcgcagaaaaccaaaaaccccacagaaaaaacgaaccagaacagcccaaacaaaacaatccaaaaaggtactcgtgaacgcatagcgccctctgggtcaacaaaaagatcccacacacaaaattaccctccagaaaaaacccccaaaaatagcacacaggaaataaccctcaggaaaaacaaggaagcgtcccaatcccccaaaaacaagcataagcatggaccttgaaacaataactaccgccggccaaaataccgtaaaccagtcgacaccaccaagggcctgcaaaaaaacctttaaaagactcttaaacccaaataagaaccccagggggaaatacaccaggaagcccaaaaattacc

SEQ ID NO: 129265 - DNA, 798 bp, Arabidopsis thaliana columbia
  unsure (1)..(798): unsure at all n locations
tcttactaaaggggaccaaagctggagcctcaccggcggtggcggcggttttagacctagtggatcccccgggctgcagtgatttcgcggccgccccacgaaaaaatcatcgtgaccgctatcatcttatgccaataataactcctgcatacccatgcatgaattctagttacaatgtctctcaaagcactcttcgtgttatgacagagcaattccagtttggcaacacgatctgtcaggagattgagttaaataaacaacactggagttccttatttcagcaatatatgttcttcgaggcatataaaaactaccttcaggttgatgtactagctgcagatgccgaagatttattggcatggaaaggttgggtggagtcacggttcaggcaactgaccttgaagatagaacgagacacaaatgggatgttaatgtgccaccctcaaccaaacgagtatgtagacacttcgaagcagtttcgacattgtgcctttttcatgggcttgcagagggcagatggatttggtggccaagaatgtcaacagtttgatatacgtggaacagtggacgaattcaggcaagaggtaaacatgtatatgttttggagacctgngatggatgtgcatgtttctcatgttcgaagacggcagctttcatcttttgtttttccaaatggatantaaaaggtctcgcnatcaaagcaccagagtcaacaatgcagagaacctggtgatgagggcgttggttcttatccgactctngtgagagatatgcgaagagaaagaacgatgatgaaat

SEQ ID NO: 129266 - DNA, 759 bp, Arabidopsis thaliana columbia
tggaaaagctagccctcggattcgcggccgcgctaaagcgtgtgcacatgatgatctttttactgttttaacaatgaagagagaaaatttgaagcgtcaggtgtgttgatggtctcgatgatcgataaaggtgcttttccagacacatgaaaactggaatcatgcgcatcactacttatggagacattttggtgactggggcattgggacttggctcgcgcgcgtcggatggtcgatcctcgaatcgaggtctctgcaggaatatctggccaatgtgctgtgctcggctgatcgcgtgaatctgtcggtgggcgtcatagaatattgaatgaccgtgggaattgccttctctatcaaacttcgtttcgtgcctttacttaaaccactgacgcagctcctccaacggagactgtgaattccttgggaggacccatcgcgtctagcggttggcgttattatgagcctcaaaccggagtgttttagagaccggtagaagcgatacgcgctgctttgaactaagagcgtctgatatatgagtgccttgacccatcaacgaatgcttttactgtttctcatgagtgggagccgatttgggcagacccgggtatccaggtttggctaaaggtgggggttggtacaatactatttttggtcgctccggtgaacatttgctctcctccctcccacggaaggggtgtggttaaacaccaccttttcggacaaagctcaactttttcgcgcgcatttggttatctcttt

SEQ ID NO: 129267 - DNA, 917 bp, Arabidopsis thaliana columbia
  unsure (1)..(917): unsure at all n locations
ccccacaattaggctcttggttctctgtcaaagagcccccacacacaccatatgtccctgacacctgacccaataacctttcgcacaattcacagtaacaccccaccattcgcacaccccgagacagtcgcccatcgtcacaacaaaatgcacaacacactctctcatcgactctccatatgcgctactactcgtacatgacagcagtggaagaacaataatcaccgccatacctagaagcagcgctggaaaacccctcacattttaccaacacaagaacaacntcggctactattcttgggcaaaaaagacttcgaacgtgcaataaactactacacattacttcccttctagccatcgaacgcatcaacctcaccaactgttacccaaacgccaccgaccccctctctaaccaaaacctccccgctttcttacaagcactccccgaaagggcaacatcctcaccccacaccttcttcgcaacggaaatggtcggtccctccaacgcattgtaaacccatgactcttcctctcaaacaccaaatcccatggggctatcgaaccccaaccttccttggaggccaaccccgccgaacctctaaccaagaaactttgggctacacctcctaaaccccctactctgtaaccccctccgggaccccaaataacgagtgccttggagaggaagaaccacccaccccggtcccataaggtatccaccgggggatcctcctctaaactctaagtcccccgcgcggtgctccgcccctccggcccccaacaccaaaaaccctgatcccgccatcggactatatcaacggactcaacacaacacccctacctcgcggggcggaacaccaactcccgaatctattaagaacattctcactcgacacctctaatcttcccctacccgg

SEQ ID NO: 129268 - DNA, 706 bp, Arabidopsis thaliana columbia
tcgactgtatcgataagcttgatctcgaattcgcggccgcatttgaaacgccgattcgcccttgctttttaagctttcttcccgaccaccacggtgtctctcaatctccggcaagcttgacgaatttcaggagctatatataccatggcgctcttgtctcaagcaggaggatcatacactgttgttccttctggagtttgttcaaaggctggaactaaagctgttgtttcgggtggcgtgaggaattcggatgttttgaggatgaaagaagcttttggtagctcctactctaggagtctatctaccaaatcaatgcttctccattctgttaagaggagtaagagagggcatcaattgattgtcgcggcaagtccctcccaacggaagaggctgtagttgcaactgacccgctgacgagagaggatctcattgcctatcttgcctctggatgcacaacaaaggacaaatatagattaggtccacaacatgaaaaaattcggttctgaggtccaatacttttgcgcccctatgaagtcatgatccaaaatagcccgaccttctttaattgggtatccgctgcaaagaatttggaaatggggaaaaaaagtttaatgggaaagggtgaacaaagcaatccatttggggtccctgaaaagccacggggtaaacagccaaaaaggcatttttttcaccctttggaaaaccc

SEQ ID NO: 129269 - DNA, 1055 bp, Arabidopsis thaliana columbia
agtaaagggaacacaagctggcagctcccaccgcggagggcgcgccgctactacgaactagatggattcccctagtgtctgccattatattcaccggcacgcacaaccatcttcccacttgccgaaattcgtgggagatcacataacaaattcattccttctgcatatccaaatgcataccgacatttctaacaacacaaatccagttcttctaaaagtccgaattacaaacagaaataaacaaaactcgcttaacttccgggagcacatccaaatctctctcagtaatacgcaatacaacctacacactcccaaagcgttctattacgaccacgcattttcgattccaccggtcaccacttttactatagatagcaggcacgcctctttcagaacaacaggagatactaccgcttctgtcccccatgcctcacatttgcaacaatcctccaaaagagcattcatccggcaatagctgtaacacatcgctggacaatgaacacacctatacatcagaactcgcggatctaaagaaaaactcgggcctaacctctgaaagccctcttgacgcctctaaaaagcaattccttctgcaaagtttccagagaacatccttcacgctgaccatgcctttaaacaaaaccatcccctaaaaaaggaaggcttttaaagcccacctaaacctggagacctattcgttcaccttaaacaaatctcatctcttactgcgtggaaaatcccaatctagctggccacaaacccaaagaatacgctcgggaaaacctatcaacaatcaataataataaaaaccccacccccaaaaaaggctgggaaggggcactacagccctctcctccacgggacccttccacacagctacccttctcatactcccaaacatccctttctaaccagaaccctccaggggaaaaaattggctggacaacaatgggtttttcccacaactccatttataatcggaaaggtcaagtgtcaacaccgaggggaaaaccgggcgaaattctttccccacccctagaaaaatacgccgtaaa

SEQ ID NO: 129270 - DNA, 1068 bp, Arabidopsis thaliana columbia
gtggacgttagggaaaagctagccctccaatacgcggccgcctcaagaggaaggacagaaatcggcttttgctcttgttgctccggcggcgaaggagaaacccattaccgaggaggaggctactataacctacccctgtggccgagaaagaggaaaccgccgctcctgtcctatgacgagaaggcggcgccagagaacgaggtgactccggagaaggaagccccatcggcggacgcggagaaacacgcttcggtgaaagaggaacagacggatagcgtagcctgagaaagcccgttgcacgaaccgctgaggaaggctaaacaaaacgccccttgagggaggccgaggggagctctggcagggggaggagctttgatcccaaaaccaagaaaatatcgacctggttccccgggtccaactaccccgcgaatatagcggagaagcagctataacacccaggcaggggacgcaaacgaaacaacaccaccgaggcgctgggtaaaaaccccatatcaggacgggaacagcatggcaatctccccccgcagcgggaggcaatgcaaacgaggaaagacaagtacccaacccgctacctcggagagtgattatagggtgtcggaacacaaaaaaaagaaaaaacctcacggttggggctttcaccacgcccgggccgccgcgaggggaggcgcaagaaataaatcaaattccacaacagggcttggccatctccgggggcgggagccaccccaaagtaccctggtaggggatgaaaacacaccctgcaagcagagcacaagccaacctaggtttcggcccacccccgaaaaagagagcgttccccgcggcccctgcggaaaaaacgggaacccccccgacaccgcgggaacagccacatcaaagaaatccgaatctggtggtgggacacccccgaccttgcaatacccgccggtgagccaccccgggtgggaggggcaaaaaacaccgccctccgccatgctcgcggggcaaaaccaccggcgggaaaacccggcaaaaagagaaacccgacccctgcggggcgagtctacc

SEQ ID NO: 129271 - DNA, 445 bp, Arabidopsis thaliana columbia
taaggaacaccccgcccaccaagacacggaagccagccgacaccaggcagcaccccaaacccttttcgttttttacacacggaacaagaaaaaggcccaaaagaaacagggcgcaacgcaaccacaacgcgaacaccccggggaaagccaagccaaaaatcaagcacgcacaggaaacaggaaaaacccgcacaccggaaaaccaaaaccccaagaacacagaagacggggcactcccacaacaacgagagggcagaggggacaaacacaccccgcaccccgcacaaagacacgggaggaacccacccagaaccgatgcgggcagaccacgacctgcacaacagaccccccagagagggagggcccggccacgaggccacaacaaaagggagaaagggcgaacaccgggacgggcaggaaaaagaggaccaccgccgcgagaaaa

SEQ ID NO: 129272 - DNA, 602 bp, Arabidopsis thaliana columbia
caaccccgattcgatttatggataacgctcccctccaactcgacgcccgaccttcccgaatatcactgccccaaagcttttcttcaattttgtcgcctaacctggctcaaaagcgtccagaagccttgctggcgggcacaccataacgggagggctcccactggctcctcagcatctctcaagcatcttgcgaaccaacagctgaggccaccgactaattctgggaactctcaaggatttccaacacataaaaggcaaacaccgccttcgaatttttcagcagaggcctcaacccaaacaaaatgctactcaacataccaagactgtcagggaaaataacccctcccactgctcatagccgggggtctcagtccaatgaagcccatggccagaaatatggaatgcaaatgcaaccaacatacttggggttgatgaagctcccctgcccccggaggaggcgtgggtggatcccccagcagcacccgtgcgaagaaatcacccgcacccggcctttatattgctggcgtctaaacctttccagacacccgcgcttatcgccaccgaacctcttgcgcaccgttcaaaggggagcttaacaacgc

SEQ ID NO: 129273 - DNA, 947 bp, Arabidopsis thaliana columbia
aaaaaaagcctacgtatagatgtgacgtcaactgtagtctggaccgcattggcgcgtggcgctctccaaacaacaaggaaacgcttttttcccggttttttagtgggaagggtcgaccaccccttttggcccgcaggctaacttcggccacaataagtactaagcttttgaccctctccctacctcgagagaaacctagacaatgtctgcgtgggtgcccaactttggtgagatctttatgtctcctgatggatgacaccataacgggcgctcaactatacgccccaatgctccccgacgcaaaggcacttaatcacctcggagtccaattccctgtttgacgttgtacccgaggcaacagtgtcaacgtttaggaagaccggatgatcctagttggggcactttacttctcaccgataatcggcacgtatcattgatggtccgaacgctatacctttggcccctacagataggacgtcggacgagtctcgactccgcaatactggacaagctatcattgccaaagatgcggataccgtgtaaaacagtattactgcaccatcgatatcatatcttaccagtgtttcccttcgccgtggccctcttggaaatttgctaaatggcctattacgggaccactttgggtagcaataaatgccgcgcacatcttgattatacctaaaggtcgaaaaactctcggacggttcgtgtattttggccacattatttacgacattttttcctgtaccaaacatttaactggccaattcacgcggaaggcattcctccactttatgctaggctcaaagcgaacggccatcttctcattctgcccctttgagatctcagcaaacactcgtcgcaacttggattctatctatccatctgaaaaccccacacactcattctagagccgtccaaacactgttgctcctgcttcaggtagt

SEQ ID NO: 129274 - DNA, 663 bp, Arabidopsis thaliana columbia
  unsure (1)..(663): unsure at all n locations
ctaaagggaacaaaagctggagctccaccgcggtggcggacgctctagaactagcggatcccctttgttgnatttattcgcggccgcccatttcccattatgcaaaaaaataaatagaaagattaaataaatataataaatttccatcgaataaaaaaagatgaagaaccaaaaaaagaaatatacaaagggttggtggccgaaacttttgtgaggaggaggacatgaaatggtggtggtggtggtggtggttgcaaacaaacaaagtggtaatagcagatatatttatacggggatacaaaggaccaaaaggtgtcagagtttttttttgaaaaggagcagttccccaagaagctgttggggtataactactgccaaccggttcttcctctgaccaaattctctcaataaatgaggcgagagcaaaatgcagcacattgcccccaaccccccgctgactgactagacttaaccggatattggctaatcacccgtatacatgccatgagatgggaacttggaagacaacaactggttctgtttcctcggcaatataccacttttctaatatacctccccacataactttcattagcccgtttatacaagggtatttatagacgcgcaaacgatctcacacattaaatattctactcgacacta

SEQ ID NO: 129275 - DNA, 938 bp, Arabidopsis thaliana columbia
aaaatgcgcccccccgaaaaaccgaaacaaaaaacttttaagttacacccgacacgacaggcctctaatcccggcagcttgacaatttccgagctaataaaccagcgcccttgcacaagcaggagacatacaccgcgacctcaagaccggcccaaggccgcacaccgaccgcgcacaggcgaaaaaggaacaccgacaacaaacgaaccagaactaatggaaactcctactctaggagctatccccaaataaagcttcccatccgtaagaggagtaaaaaaggcatcaatcgacgcgcggcaagccctcacggaagaagccgaaatggcaacgcaccgcacacgaaaaaagaacccaaatggccaaccggccccttgggatggcaaaaccagaggaccacaccaaaacaacaacgaaccaacaacactgcccagaacacggaatgaagaaggcgccacaacctcaaagcccccaaccacgacaggaagagaaaccaacacccggacacctagcccaagagggtaaagaggacaacgcgcaacgccgcgccgactaaacaacaaccagtcgacaacaaacaagccacgcttccaagcacacagtcaccagcatacaaccaacatcaacaggccccacaacagactgactgaccccacagcgcaaacaccgatcagccaacacaaatcaataccacacttcggcaacaaacaacaacaccgaccacagcaacaccacaacgccccacaagagtggcgacgtgccaccactctcacacccgaaacaccgccagaaacaacaacacaaccccaccctgacacacaagcacaacacctcgcaaccccccaccagtgccgcatagcacaacgagacaacgcgcgacaacagagacaacccaaggaagcacgacgcgggcaaccccacacaccaccgactcaaat

SEQ ID NO: 129276 - DNA, 834 bp, Arabidopsis thaliana columbia
aaacccccactaaaggtaacaaaaacagggagccccaccgccgggagcggacgaccctcagaacccaaagggaacccctttttgcccgcctatataaaaaaggggccgcaaaacgcagcaaccacagggccaaaaggggggggccgaacacaacaaaagaacccccaaccggccaacccaacagacaccggaagccccaacaacacaaaagcaggcaggtaaaaaaccccgaacaccaaccaaaaacaaaaagagacccacagagaacagagaaacggcgcaaaccccagccaaagcagcaagggagacagccacgaccccaaaaagaggagacaaaacgaaccacccctcgagaggggcccaaccggcacgcacaaaaagcgcccccgaggagcacaccgccaaggcagggcaataaacacaaacagcgcgaggcaaacataacaccccgacaagggaccgccacacacaaccaccccacagggggcgaacgcacgacaaagccaaaagcgaggaccgacacaaccccggcaaggggcgggcaaaacaccaccccggccagaccaggaacccaccgaacaaaaccggaacccagggaagacgcaacagaaagaccccggccgaatccacaggaagaacccgagagaggcgcaaccacaaaaacacaacacccaaggggcgaaaaaccgcagaagggacaacccgcacaagccggaacaaggccacccgaaacaaaacacaacgcccgcaaaagagggagaccccgcgaaaagaccccaccaaacagggggcacaccaccggacccccgaaaaaagaagaggcgcacccacaca

SEQ ID NO: 129277 - DNA, 940 bp, Arabidopsis thaliana columbia
tggataaccttgccctcgaattcgcggccgcctcatgaggaacttcagaaaccagctatttttttttgttgctccggcggtgaacgacaaacctattaccggtggggaggttactatacctacccctgtggcacataaagaggaagtcgctgctcctgtctctgatgagcaaggcgggtccagaaaaggaggtgactcccgagaacgaacccccccctgcggaagcggagaaatctgtttctgtgaatgaggaatagaccgttgttgttgctgataacggtgctgtcttaactgcttgaggaagtttctaacaacgccctcgccgcaggtcaatgagctctgttttggaggctttcacccaacgagaagtccctgttccgctcactccgggcaaggaaccaaaatcccaggtgacataataccagcggtggaaactccagacggaagagaaaccccccaggacgaaaaaggcaagaacacctcctccctgcaggtccaagggtttgaagaaaaagaaaacccggtcggttcccacccgggcgggagggtggtgttaaaatctctccaaaaggcgttgctccccgggttgacaaaccccaaatcttgatcggagaaaaacccccgatagaaaaacatcaataagggtaaccacaccccctaacaaaggccattccccctggccccttattaaattattgggaccccctccttaccccgggggcaaggcaaaattcttaagaaaacttctataccgacttgtctggtgttccaccccacaccctctcaattatccccgcctccgtgccccacccgtgtgcgcgggtgggtacgatataactcgtcccctccggatgatctttgtgggcccacaaatccgcccgttgtgcacctccccggccaaaaaaattctcttgcgaatctctgggcggagaggtttccc

SEQ ID NO: 129278 - DNA, 1201 bp, Arabidopsis thaliana columbia
  unsure (1)..(1201): unsure at all n locations
aaacccncccaaaggaagaaaaacaggagccccaccgccgcggggggcggccctacaacaagaaggaagcacattgtccggaagtaataaagagaggcgcggccgccccgccacaaaaacagcagaaagggggcaccaccccgaaaaacaaacccccccaggggccccacacaaaagacaaaaaggacgaacgcccccaaacacgcagaaaaaaaaccccaccaaccgccaacaacgaagaaacaaacccgggctggggcccacaaacgaaaagaacaaaacaaccccccccggacaagaaagaaagaaaaaaaccccaccggacgccccggccccaaagaagcgacagcgcaacagagggagaacacccaccacgacaaacaagagcacccacagacacaccaagcgggaaatcggcaaacaaaccgggaggacagacaacccggagccacccctagtcaaggagggacaaacgaagcacatgaccacgacgacaaaccctagagggggaggcaccaacacaagcgaaacggcccccagagaacaaagccccaaccacatcaaacagaggagaaaaaaggggggagaggngaaataccggcccactcgcaaacagagacggagccgacgcacacctaaacaaccacaggagcgacgcgacaaggacacaacacaaacacaacaacaaacacacgaagcccacgccacaacagcggaaacgggccggcgaaacaccaaacaaaggagacgcacccaacgcaggaccccgaagaccaaaccccaacacgccacagcaccccaacgcgccccaacaaaacaagagcacaacccacagaaaagaggaaaaaccccacacaaaaaccagacgcgaagccaaccgcgagaaacacgaccacccaccagaaaaacaacaaaaaacaacgtcaaccgcgaaaggcagaacgcgcccaccccagcggaaaacggcatgacaagacaaccacggaacccaagaccgacacgacgcaaaaccgacgaaacgggcacgacagcaccagaccatacacgcgacaacaaacgtcgcccaccacaagagggaacacacgtaagaaccaaacggccagaggggcgccacgacacccagggacccgaggcctaccacagcccaaaagaccaccacacaccgagcaacaggcggggggcagtacgcaacaccacacac

SEQ ID NO: 129279 - DNA, 788 bp, Arabidopsis thaliana columbia
cactggcccccccccaggtcgacgtatcgataagcttgatctcgaattcgcggccgcctctagcagagggacgccgaacaccttttttctttttttttccggtggcgcatgagaaacctaagaccgaggcggaagataccacacctacccctgtggcgaaggaaaatgaaccagctgctcctgtatgtttcaagaaagctggtcaaaacaaggacagccttccagagacaagaaccctctattaatacagatgtatggaccagcttctgagaagaacgaaaatacagacgtggccactctcccagcacaacccaacacagaaccacaagttgatccgaacctcatccgcgtggtcgactctctctctctctaagcacctagcaaagaggaggcttgtttggtccctcaatccggaatgctgacgaaatcacataggacctttgacagatttgtaagcctggctccaagcttgcccaaatgaaataatgcaaccttctcatccagatgcttgggaagaacatacacctccttctcgtactttccgcttgctgtctagttccaaagctcgagctgggcaatcaccctgtttggtgaaagaagcatgacaatacgacaacttgggtgacccagaggcgcaaaccccaggcttcataaagacggagccctcatgccccggaacaaatggatttcccagcccattgggttccgctgggggaaaaaacccccaccacccgttcaaaataccccgccgggctatttgacctggggtggaataagcgctctttata

SEQ ID NO: 129280 - DNA, 1126 bp, Arabidopsis thaliana columbia
  unsure (1)..(1126): unsure at all n locations
aaaaccctcactaaagggtaacaaaaactggagctccaccgcggtggcgagacgctctgagaacctacctggactccccctgtttcttgcagtgttatatttctgtcggccctgcctacgattccacccctcggctcgagaacaaggagtttgtccaacacttgagcgcgtagtttctcactatctgtgaccatactgcgatgaaattacgacatgttgtccatctttcaatcctctgatgtgacgaaaagggtagaatagaagcacgaancacgagagattttgcgctgcagagctatgatttatttggtagagacagtcttgtatcaaataccctaacgtacgagcttttctattaacgaatagacttggaatgtcaacctctgtggaaaaatcaaacataacgccactgtacaccagaaggagtaatgtgtaaacagtctcgtcatcttgtgacgaaagaccaaaaatatagtgtctttttcgggaagtctcagcttgagaatgtactgggcatggcccataggaccttcatacgtgtcaaaggaagtgtccaacccttgtacaaagtggtttagttttataaacaactccgaatcccccctttattaataacaaaaagtcccctggtttcttcctaaggatcccaaggccccgggtaaattcccaccccaatcttttcttttgaaattcaggaatttgtttttttcccttgaagcgtttttaaaaacacgaagccctcttccaaacaagcaaatcccatgggccctacttaaccaaacttattgaatgcaacccggggctataacggaactagggtccacccaaagggcttaacgagaaaccactgatgaaatctcaaaaatttagatggcctatgggggggcacaaacacacaaccctcttccggtgctaattagaggggatgtcaccctgtttgccatttggcctttaacaattttgtgtcctaaaatttgcaataccttttgacagtttccatttaccgcttgttgggaaacccaggttggaacaataaattctgtaggaggtacttcctttgaattttgtgggggaaccccaattcaggtgtctttgatgtaaattcccctagggaacccctttttta

SEQ ID NO: 129281 - DNA, 698 bp, Arabidopsis thaliana columbia
aggtcgacgttatcgatacgctagccctcgaattcgcggccgcgcttaagcatattaatattccccgtttttttctcttataaaaacatacaatcagaacctaatgcttaagggctgcccaacattcttccgacctgaagaacgattcctccccccataccccgtgctttccccgttccccaattctacattccaccaacccccttagaaacctcttaccatagtcttccttacccttacaaacccttaaacccccccccggctaccctctttcctctgtcctccccccccaaataccgcgaatttctcttcggctcgcaaattccccctttcccaacaacaagggacctttccccctgcgcaggccgaaatcctccctcgagcaaatcttcgtgcccgccgccgagcaggaccacttcttccatacattcgtcaaaaaccacccctcgcttgctggaaaactccccccttcctcgcgacatcctaccccccgcggattgtccgtgacccctttggaatttttgaaacctttcaaaaaccgccccaaatccacacccggccgggaaaaaccctcggttctcccgcacgggggcggctccctaacctgcccctctaccccgaatttgcactttttcccgactgaatctcgcgcaaaaccctaaacatccttcttctccgaaaacccggataaaaaaaaa

SEQ ID NO: 129282 - DNA, 298 bp, Arabidopsis thaliana columbia
cggccttaaggagggctctccctttaccgttttataattatgtgaaaatatctgataaccactgggtaaatgatgatgacaggtatactctaactgatattttttattttcactaagccaagacagcacttagtgcattcccagatacatagtgtactgattcctatcgtgcgacaaatctcgaatgacacatgatgccatatgtaaccttctttccactggcactacggttagaaatcttataacagattctcagccaatggatatcaattagtaatggctcattaaggtttcgacc

SEQ ID NO: 129283 - DNA, 781 bp, Arabidopsis thaliana columbia
aaccttcgaaaaagcctccggaggatggcccgaaggcgcgcccaaccctggagggcggtcttagggggaaggtaagcgccccacagttttttgacactttttcccggacaccaaacaagccccgagttgtactggggggtagtccagtgtcacccaggtttacacggactgatcaacgaacactagagagtcacccaagcaatactcacaaaccaaagcaggtccacagccgcgacaaacgctcaccacaacgcgaacccagtcaataccgtaaacaagacaagctagaacgaaaggaggagcaatactatccactaggatcaaatcgacgaatccatacgtcaaccagcagcgtaaaaccgacaactcttgaagatcacacagaatcagacccccgcacaaggcgataccacccctctacatgccgaagcgcagaaccggctgaacgtaatgtgaacatacccagttatggggagatgggcacatgggagagaaaccaacaactcaggacgacaggcccagggtccattaaggcggccgcacgctctgaaatgaagcctcaaaggcaggttccccgaaggatcaggtacggcaaacaaggtccacaagacgaaagaccgccactgctacagacgaagacacccatgtcctgcgaacactgagtttcaggattgagagcacgcgtcaagcgacccattgccagttaaggcttattgacaccatctggccaaacgaacagtcagcgtgctataggaggtcgtaacacgctcaaccatgacga

SEQ ID NO: 129284 - DNA, 766 bp, Arabidopsis thaliana columbia
gattagccagacatccagtcaccgggcaaaatggattcaatcgccttccccaaaccccttcattttatttattaccaaggcggcacacctttcatcataagagaccgtacgaaacctctcaaaaccttactagagctatgatggtggatactcgccaaggccttcaaggatatggactccgacgaataggtcccgggcttgatttgcaccgaatcacgtgaagatttgtgctgtcgaggaaatataactgcggcggtgtatagatctaaaggagacgggaaggatgctgaaacccacccacaagagctaactgatcgactacctaaacgaatcatgggagcgattaacagaatcgccacttccgtcggatgggaactggattcgatctgatatatctggcgaaactgtacaagagctaagttcatgcatactaactcaaggttagggatgtttccatgatgaggttcgacccacaagctgtcggggatcatccgagcctacatagttggaataagatctgtaacattgatgccgcttgccgtacacgtttgtgtgaaattacgctactgctaaccatggaggtggaccatgccgaagcgttcacgaaggatcattaacaaactccgtagggctctgtgtcatggagttgaaccaagggcctggggtcccgcagagaatacaaattcctgaatccaaaaggaaggggcattttaaggcgttgtgggctttgcaggcaatggctttttgtacggacattttaaaaggg

SEQ ID NO: 129285 - DNA, 671 bp, Arabidopsis thaliana columbia
acccgggcggggcccccgggaagcacaccaggcgcccggagaccgcattttttggattattccggaaccgaagatgaccaccaagcgaagatggaataaggcgggatcgcccaaatcacaaacaaccgcccgaaagctctcaactcactcacgagagcgatgaagggcgatcgcgccaaggcgagtcaaggatacggactccgactaatcggccagggagcgatttgaaccggatcagggggacctatctgcgctagcgttgatgggactgcagcggactcagatggcaagggagacgtaaaggagccggaaaccgacccggaagcgcaaaaggagcgggtacacaaacccaacatccgagctattaacggaggtgccatcaccgccgcggaggaactcgcgttggcctgtgaaatttcgagcgccttgagaggagctaaattcatagatactcacgccacggatgggaaaagagcgtgatggggtgaggaacacaagctgtcgaggagcatcggagcagacagagctggagaagttctataacattccccgccacggacagcaaacgattgcttgggaaaggtaggggaatgggaaacacatgtgggttgaaacaaaggaaaaaatccgggtaaaataaaaaggtttaagaaaatcctccgggagggctt

SEQ ID NO: 129286 - DNA, 781 bp, Arabidopsis thaliana columbia
tataaagggaccaaaggctggagctccaccgggggggcggccgttctagaactaggggatcccccgggctgcaggaattcgcggccgccgatctttattgcaaaccaaattgtcacacacgcaaaaaacaaaccttaacaatacagaaattaagaaaagaaaacaaaagcagaaccattgacgaggcaaagacgcgccgtcgaaaaaaaaagaaaaaaggagacttgttttttctgatgatgtataagattattagagagtttataaagtaaaatatttgctcagaagaggcatgcttgagttactattggtttaggggtcatccggcgactttcctagagtaggcattggtggtgggttgtgttggtctaaggaacatgtcacgtgtttctcctacccaacctgccttcatcggaggtggtttcagctgttgatgctgtccaaccacagacacagagtgtcttcgagatccagttgctccaatggtcatgtttgcgagtttatcagcagtctcggatacactactacgagtgacccggttcttgttcaacgatgctgctggaggactcttttttccgggtggtctgtatttggagtctctgacagaacttctcacgggtttagtgtttctcgtcccatcttgattaaccatatcaagtttccgctggacaccactgccaaaagcggcatttgactttggggaaacatagctattgaatgggctagcattggcaagagacactgggtaccgtttaactgattggtgctcgaatgatcccct

SEQ ID NO: 129287 - DNA, 1091 bp, Arabidopsis thaliana columbia
  unsure (1)..(1091): unsure at all n locations
ccctcgatttttgaattatcgaaacctctagacactcgaattcgcggccgccttcttcggctcctcagcaaacaattttttttttttagcctcctggggcctagtacacattttgataggtggtatgaagccaccctaacccccgtcttcgctgctactagttccccctacttgacggaaactctatggataaggcgaacaaaccgctgtggttaaaattggtgaagtaaattttgcactcccgtcctggaggactgaaatgattaaacgataacggctccggcgtttcttctataccgtgccgaagcgggtgaaaagagagcttggcacatacatcatcctgtacccggtcctcacctcacggtgccaacataagagccaaactctggcacgctcagtaacatctactaattaatcctacttactcctcaataactgacctgctcctctggagagaaacacctattgcggcagtaccatccgcttccctaacactgtgagtacgngccgaacaccctctaggatcaggcggccttttctatacttacagggtatatcccacatggagcgtcagtactagatacctcatcccccgcgcgtaagcatctggaaccatgtcagcccttgtctttactactgagggaatgcacactccacctttttcatataatatacacaataccctagtcctcttctcacaagagtgcaggcagatcgaatctcatcaccacggggtaatgctcataaataggaagacgccgcaaaatctctctatcaaccgtgtgcgccccctcacctcagcctgtgtggggctgccaaccaaaacctcatctcgtcttttgtggtgcgccaggcaaagacccactattttgggtacgggccttttctacaaatccccactccaggggcctactcctcctactctttctcttaatacacaagaatcgtctgcaacctttgcccaataatccctctttccttaaacccccgacaacagatggctgcgaaaacctattttctggggcgctctggcgccgtacggaataaaaaatgcgccccggacctgtttataccggttccccacctttagg

SEQ ID NO: 129288 - DNA, 852 bp, Arabidopsis thaliana columbia
  unsure (1)..(852): unsure at all n locations
nnnnnnnnnnnnnnnnnnnnnnnnnnnnnnnnnnnnnnnnnnnnnnnnnnnnnnnnnnnnnnnnnnnnnnntttttctgcatgaattcgcggccgcatatttctcctttcttttcttcgcccaaagacaaaaatttttcaaacttggtgttacaccattataggctacgagcagaaaacaacattcaacccatacccaaggacggaggactaaacctgaactttgctttcgcatcttcaaaaactactttaaaatcttggtctaattatcacgtctcggttgccttttgcgtggtgccgcggggacttccttcttctccgcctcatccccactctttgaactctccgctacttctggtttcttcttttccacaggtgccgccgcctttttgccaccaaagataagcttgaggaagagcgagaagaatacaaccacaatggcgacgaggacaccaatggttaagtttggttgttgctcggctttctcaatcaattccgtgatcttagacttgtaggcacttacgaaagataaaactgcaaccttgttcaagaggtcgaatacaaccttctggtagcttttgagaccatctgccaaaccagcagcttcctcttctgccttttggttctcttttctcaacaaacaaattagggcctttccaaagtggggccggtctgtaaaatttttaagcgaacccttcttcggtcttttttggcttattcaaaaaaaggtttgtttaaacaccaaaggaaataaccccattcctttgccaatttgtggtccccaggaaatcttcataaataaccccccaatgaggcgtttgcgcaaatgggggggttctccgcaaaaaatccg

SEQ ID NO: 129289 - DNA, 921 bp, Arabidopsis thaliana columbia
aaggcagacaactcgcggagaaggggaacgacggcgcaccacttgaccgggggactggcccctcctaactctgcgggcgagggcccgaagcgccgcgacatgagacgaacaaacggcactgtacgaaacgttcgaagagccctccgatggccgatggaacggtacgaaaaaaagcgactaccaagggggatggaagcatgcaaagagagaacgacatgaggactatggacttctcgcgagcgagaaggctaggagcgaaggaattgtgaaagagctcgacgagcctcccaaccccaaggaaggagccgatgatcttaagaacaagggccgaaccaagaaggacttggcgggggtggcgcctaattgaagaacccccgccctcaggaagctgggaggaccccacaggggaattagaaaggggaaaaccccccgaacacaaaacaacgagacggggcccatgacacgaagagctgggcggggctactacaacaaaaagatggcgcagataccaaaactctggaaatacgccccccgacgcaatgcccccgcaggaaacaggggggaggcagaagacagaacagatacggaagaaacaacacgccaattactgggaacaacagaaatccaccccattaccccctaacctggaggcagcccgctcacaattgcagacagcgaggcccatctggcgccccagaggagaacttaaacccacacggcacccgcatagataagggaaaagacaccgcgcggtccaaaccgaagggggtataaggaaacactactgggcgctgcgatagctgcgcacggatgaaaggaaaaaagaagcgcccccattgtacccccgcgcgggggggaaaaaaccacgggaagccgcggacacgggaaccctgggcctagaacccatccccaggcaccggg

SEQ ID NO: 129290 - DNA, 806 bp, Arabidopsis thaliana columbia
  unsure (1)..(806): unsure at all n locations
gaccactctnnnnnnnnnnnnnnnnnnnnnnnnnnnnnnnnnnnnnnnnnnnnnnnnnnnnnnnnnnnnnnnnnnnnnnnnnnnnnnnnncggtcgccagagctatggtataaaaccaaaccaaacaaaacaaagaacaacaaataaccaatattttgaatcaatctgcagagaagagaattagcaccatctaaccttcttctctagactgaatcccaatcagtctcagccacgacattcaaaaccgcagaggccaagagtatatcacaaaaaaaatatttctttggaaaaaacgacaaaaccataccaatagagaggagaaataatgcacaccactcccaaaaataaacaaagcctagtgatacacaaaatctgatgccagctgatattttttgtgtatatgagaagaatatttcgtcaaacaggccctgaaaatacattctctaagatatcatgcagtttcggagctcgtctccggaacattggttctagccggaaagatgggacacccatctgccatctcttggcatcatacatctcattccatgcctgcactatttcatcaatcttgaatcccataccttcaagtgcactctcgcttgaacaatggttctttaccatcacagctatatcagttgcagaagctccagctagctcaaacttctccactgcaacctccaaacattcatcccaagttggtagcccgagcttgtacnntcacaatgaccgttcatatagcaacgaanccccacaagagggttaatctgagaaactcataatagctgtctgcttccacaggtttcctt

SEQ ID NO: 129291 - DNA, 785 bp, Arabidopsis thaliana columbia
  unsure (1)..(785): unsure at all n locations
ctaagggaccaaaggcgggagctccacggcgggggcggccgttttagaactaggggatcccccgggctgcaggatttcgcggccgcgctaacgacacttggtattttaaccgaactttcgacatacacaaataattatatttgtttcacaaaatttaagtatattataaaatataagacaaaaacaaaatcaagttcatcaaacttgaagagagaagagaggaggaagatcagagatagttcgagaagaagaagatgaagaagaagaacacaagaaacgtttaaaagatttgaggaaacgagtgataagattattgcatatacaagtgttggtcttcctcagcttcctgagcttcttaccaattctcattcttatcccaaccactctgatcataatcaacggtccagatgatctcctcctctgttgatgctgtctggtcttgctatcggctcgttctaaaaccttttccgagaacttgtatagagaaggatttcccgctaagcagcagttcttccataccaacnnnnnnnnnnnnnnnnnnnnnnnnnnnnnnnnnnnnnnnnnnnnnnnnnnnnnnnnnnnnnnnnnnnnnnnnnnnnnnnnnnnnnnnnnnnnnnnnnnnnnnnnnnnnnnnnnnnnnnnnnnnnnnnnnnnnnnnnnnnnnnnnnnnnnnnnnnnnnnnnnnnnnnnnnnnnnnnnnnnnnnnnnnnnnnnnnnnnnnnnnnnnnnnnnnnnnnnnnnnnnnnnnnnnnnnnnnnnnnnnnnnnnnnnacgaactccgttcg

SEQ ID NO: 129292 - DNA, 801 bp, Arabidopsis thaliana columbia
gtttggattaactagatcccgaaatctcggacgcaaggcactatactatagcaaataacaagcgctgaagtatttttaatttgccacaacaacattacacttgccttgatctatggtgatctcactggattctttctttttaattttgtatcactctcaacaaaagcattgaactatcacaggtccacatttcacctgtaccataatatcaaacaatgcatgtcttttgtagtcccaaactcgttattcatgcctgattcttcccagagtgtggatactcacaatcccaccaagaatccaacaagtaaatcataagaatgttcgtgaatcttttatttatctttactcttttagaactttttttttttcctttttaagcttttagttctcatatttaggagaacttaccaatagtttcgagttgtgaagctgtcgaacgtccaaagcaaacacactagggaagatctgattcttgatatttatttcttaatctgctttttcttgactgccagtcctcatctcaattgcggagaccttactcacgctacggacttaaaccttaaactcctgctgctaactacattgttcagcttacccctcccactgagcgaagaattggaatgaagtttttcaggccagccactttttaacaatccccctggatgcaaagtttatatttttccacagctgaatcccaaattctcaggaattaaccaaaaccccttaatgggccaagggtgccgtccccctatgggtcccatttcccacaaaaacacccaacccagcacaatttttctcccc

SEQ ID NO: 129293 - DNA, 607 bp, Arabidopsis thaliana columbia
aaaggccaaaacggagcccaccggggggcagcccggcggaaaccattagtatacccacgggcagccagtaatactgcggtttttcccacggacaaaaacatcgcgaccggggtcatcgtatgccaataaaaacacctgcatacccatgcatgaaaacatatttacaaagcctctcaaagcactcttcgagtggtgacagagcaataccagttgggcaacacgatctgtcaggagatagagcaaaataaaccacactggagatccttaaagcagcgatatatgttattcgaggcatataaaaactaccttcaagatgatgaactacctgcacaagccgaagatataacgacatggaaaggccgggtggagacacggtacacgcgacagaccttggagataagaccgagacacaaacgggatgttaatgtggcaccctcaaccaaacgagtatgtagacacttagaagcagataggacaatgagccccatatcacgggcttggcagagggcaccatgggatttgggcggcccacagaggtgccaaaccaggatttgatactatcggtgggaaacagtgggaccaaaattcaaagccaagaaaggacaac

SEQ ID NO: 129294 - DNA, 741 bp, Arabidopsis thaliana columbia
gattatctagatctcgaattcgcggtcgcaaaaaattcatggaggcgtaggctgcttgagcttttgttagcatgattggacagtttggtgttgggttctactctgcttacttggttgctgacaaggttgttgttactaccaagcacaatgacgatgagcagtacatgtgggagtctcatgccggtggatctttcaccgtcaccagagacacctttggagaggcttttggtacaggaactaagatggtcctttacctctaggaataccacatggagtacattgaggagcgatggcttaagagatttggtgaacaagcactctgagttcattagctacccaatctctctgtggattgagaagaccattgagaacgagatctctgatgatgaataggaggaagagaataatgattatgaaggcaatgttgatgaagttgattatgagaaagagaaggatgataagaaaaacaagaagattaatgatgtttctcatgagtgggatttggtgaacacgcagcaacggttttggatgacgaagcgacaagagatcaacaaggacgagttcgctgctttctacaagagttttgagccatgactgggaaagagcattttgggtgttgaagcaatttttcaatgttgaaaagaactggctttggaaatttcgaaaggattaaaccttttttttggtttcccccaaattagaaagcctctctctttttggacccttccttgttgaccctct

SEQ ID NO: 129295 - DNA, 702 bp, Arabidopsis thaliana columbia
cctgaggttagcaggaacgcctgcccgaaccggacgggggacgctaggacgaaccagagccttttcttccgttttagagccgacccacggcagatagtaagcgtgtggaacggatgcactggtcccacacaacacaccagaggagggcgaccagtggagcccttcgcctgaagacaccctatggcgccccaacgtagggcacacacaaaacaccatcctacattgcctcctcgaagaagcgtctagacatgctaaggacaaaggagccgagactcaaatccaacgcgcccacggctctgagcgaccctacgacatcccgcaaaactaagcatccgggctcgacctagcccgaaccaataccgggcaaccccaaaggatgaagccgcccgaggcaccaacccagagagccgcttctggaaccatggcaagactggcagagaaatgaaggaaaagccgggataccccaaagcaggggaccgtctttatggaacgcggcgcatgaaaacatcgggaggggcgaaaaactggaggggtagccctatcgacccaaaaagaccaaagcattccagctggaaaacacaatccgcaaccattcaaaaggcttcccgggaacaaggcttgaatgagttatggccggggcacaaatcccaccccccccgcccaacatggctgcctggaaaaaacccctgtgcacgtaaaaga

SEQ ID NO: 129296 - DNA, 794 bp, Arabidopsis thaliana columbia
  unsure (1)..(794): unsure at all n locations
nnnnnnnnnnnnnnnnnnnnnnnnnnnnnnnnnnnnnnnnnnnnnnnnnnnnnnnnnnnnnnnnnnnnnnnnnnnnnnnnnnnnnnnnnnnnnncggccgcgcggccgcgaatcgcggccgccgccggtgattttgtcttccgattgttatcaatgagtcttcgtgtagtttcctccgttttctccggaatcaatcgaatccctaacctccacgagactcatactcttcttcgctctcatgtcttctctttcttcttcaaaccggcgaatatcggtagtatacggcgactggtcttatccccatcatatggagaccggagcagagatagtgttggctccgccgccgatgtttcgtcatctattctcgacgacgagcttctgagcagcgtatccgccgttagagatgccgatgaagcgctcgcgatgatttctgatcggttcgggtcaaatcgcggtggaatcgttgaacttgaagattgccgttcgattatctccgctgctgtcagtcgcggcaatgtggaccttgcgttgtcgatattctacaccatgcgagcgagtttcgatttaggtggaagtgacaatgatcgatggagttggtcaacgcctgatgttgaagtgtacacgatgttggttaatggtcttgctgcttcctttagggtttctgattcttttaggattatcagaagatatttggccgtgttgggtaatctcccccttgcttgaaggaagtttccccctttggggtaaaaaatttggtgtaggaatggttccccgaatccctgggtttggaattt

SEQ ID NO: 129297 - DNA, 799 bp, Arabidopsis thaliana columbia
attcgcggccggccaacatttaaaaccaaaaaggactacttttataatttttaaaacatggccgccatataagaaacaagggggcggtggcattttatttcttttaaccggggggcccaaaaaatatattggaaagaaggggggtttccaagctttcctacaaaaatgccgcaccgctttggccgcaccgccgtaatgaacattggcttacattcttgacttggcgaccacaagggtagagccttcaaccatttcataaacttccgggcttgtccaactctccttgaactgtgcttcagtgacacctttttccatgggtgcagcggaggagattccacctcggacggggttaaaataacgaccatagtaattagcaccgcaccatttttggggagccaaagtggcaaccccacgggggctctcttttctttgtatactcttcacataagccaacatcccgcgcctagcgtaatccttttgcaatgttttaaccacaagagcatccgcatggaaaccccccggcgctattgaactgccgacaaataatccgacgcctaaccaatacacgcgggagtgaaaaatacaacccatctcttgttggattcccggcccttaccccggcaaagcgaggcccccatacttttataagggaacggggggaagaaaaaaaatgtttgggggcgaagcccaaggaacccttcccccgccggtgtcttggggaacatatgaaaaacctcttccccggccgaaaaattgggaggtgggcatttctctatttgaaaaaatacaaaggggcttt

SEQ ID NO: 129298 - DNA, 558 bp, Arabidopsis thaliana columbia
gtccgcgaccgccgggcgggttcagggtgagtcagcgctgaaggtttatctttttacagagaacgcgcgtagctcatagatccgcggcgagagggtactaggatataatatgctaagagacaacaacgtagatagggcgtatatatcaaacgaggtgacgcctgaaatggtaacctctcttcctttgtaggaacattaggatcacccatcagatacaacatcgttgtcgcaggtgaaaatgccgatgtcgtaaccgttgaggaagttaacaatagaggctggaagtgaaaaggtctttgctttggtggcattgaagaagaatgaacctaccgttgctgtgacctcacccacaggcaacagaatacaggaccacagcccatacgggacaactaccctgtatagtgagcagagctgatgattgactatgcttctcggggaggataagtacaacagagattccggcgaagcctgcatcagaggaggataaatcatatacggtgttccgcctgaatcccaaatcaacagagcttgcgatgagagcatgcacacttcccccac

SEQ ID NO: 129299 - DNA, 820 bp, Arabidopsis thaliana columbia
cggtatcgattagcttgatatcgaattcgcggccgcggattcttcagtgaggagaggaaatgtcggatctttatattttgcttgtgaggcccaagaggaagaagacttgggttgattactttgtcaagttcagatggatcattgtcatcttcatcgtccttccattctcagccacattctacttcctcatctacctcggggacatgtggtcagagtccaagtcctttgagaaacgtcagaaggaacacgacgagaatgtcaagaaagtcatcaaaaggcttaagggtagggatgcttccaaggacgggcttgtctgcactgctcgtaagccctggatcgctgttggaatgaggaacgttgactacaagagagcccggcatttcgaggttgacttgggggagttccgtaacatccttgagatcaacaaggagaagatgactgctagagtggagcctcttgttaacatgggacagatttcccgtgctaccgttccaatgaacctgtctctcgctgttgttgctgagcttgatgaccttaccgttggtggacttatcaatggatatggtattgaaggaagctctcacatctacggtttgtttgctgatacccgtgaggcttacgagattgttcttgcgggtggagagcttgtcccacccacaagggataatgagtattcttgatctttacttacgcaatccccgtgggtcgccaaggaactcttcgggactccctttggtacctggctggagatccagggctttaataaaacgtcaaagggagttccattgaggacctctacttttccctttacccggtccaa

SEQ ID NO: 129300 - DNA, 1019 bp, Arabidopsis thaliana columbia
aaaaaagcccaacaaaggtggcccaccgggacctggcaggggggcggaaccaagtggaccccggggccgcctgtacccctgttcagccggcaccatcaggcccgaggagaaagcacaactaagggatcccgcacagaccccagaggaggcgcacagaacgcccgacgaccaccgagaaaacagagccggccataccgaccaaggtaacacacaaaacggccgggggagccgcacgagaggagcgagaacggaggccgaaacaaactagggggagccagggccccccagaggagggacttgggaggaaaaaaccaccgcgaggcaaaccgccgcccgaaaaacccaggggagtaacccttcgcgggccgggacacccacacttctaatgaccaaagggggcaaccccaataggaaagacacatgcgccccgccaggaaaagccctccctttacaaccggcaacgcacggccatgaagacaacccccccgggccgggaaccctggcaagagcactggggaaaatgccccaacggcgggaacacctccttaatgccaagcccccaccttgttcatggcccgcatctccctaaacgggccaaccagggcctcggcccggcaaaacccaattccaaacaccgacccatacaaccccttccatgaaggggaaccaccacagccccacgggtcgccgccacagaacacagaacgcccgaaaccaaatccaggaggcttctcacatcccggaggccacaactacgcaggggggaccttcacaatggcgaccagggacaacacgggaacacccgaaaaagcccccggggccatcctggggggatgggaaaaaccgcgccccctaatggacaccgcgccacggccacggaaaagaaggtttcggggggggggacaaaaaacccccaaagatgggggaaaccacccccaccaatttaggcgggggggaaccccaattacgagagcccacggcccaacccctgggaaagaagggaacccggccctcacccg

SEQ ID NO: 129301 - DNA, 920 bp, Arabidopsis thaliana columbia
cgctcaatacttaccatttggtacagcctacctcatgggagggtttttttattttattttatccacatacgtagcgcctacaatagggcatcacacggtgtttgtttggatatggtagtggcatgactactgactaaactaggtgaccgtgtacacttacatacaactcacctgattcgctgagttttagtctatgtaggtctggcgagtacaggacgactaggtttaggaacattgatataatatcaggcggtcgccagtggtaaatgaatctacttcttatcatactgtaaacatgactctgggtggccgacagcttcttgcgagctatagacgtctcttctattggcactagcgataggatgactcttgtcacttgttaaagtttaacccggtcttgtgtaaagggttcttgggaggtactatttgtagatggacctcaatcgggcattggccccgttctcttgtccaatcgtattgaaccatgggtggtcaccatctgtatttacgatcgccaggaaatgccttttcccttgtagtcgcggggggccttcgaaagactattgccgcgggacgtcatttatactcgactttcttcagatgccggttgacgaagtttttttcatcgggatagacacttgggttccataccattctgggagcaaatcagtgcacagatctttcaaatcccatgtttatatgggacgcttggttagcagtgttacccaaatttctttaaaaatgcacaagggccttttgtcataccccctattttatttggttggcaaaaaaaaaataattgtgcctttttgttagggaaaagccaacccccccattttaaccgtgtcccgttttcaaaacggaggctttgatatcccccccttttagggtaggggtttcgaccaccttaaaatcttctc

SEQ ID NO: 129302 - DNA, 753 bp, Arabidopsis thaliana columbia
  unsure (1)..(753): unsure at all n locations
nnnnnnnnnnnnnnnnnnnnnnnnnnnnnnnnnnnnnnnnnnnnnnnnnnnnnnnnnnnnnnnnnnnnnnnnnnnnnnnnnnncggtcgctaccgttgaaccaagcattcgacaagttggtgtagacacgaatcaagtcaaggaattgtagtctacatatcttacagcatgcgaatactacaatgtgagtgtgtgtccacaaagaggcatcacctaccagccttaggggcacaattgattgatggcgagctgccgctcacacaatttgttgaagtcttacacgcagcctctcacactgatcccaactccatccccactactgcgtttccttctctctgaccggactgcggtataaatcagctggcggaggcagagcagtgattcaccgaccggccccaccatgacgtggttcatgacgttgtaaactatcccatctcatatggatcttacggccgagatgggggccagaactgctatcatagctgttgctaggccagctgcgtgcctgatgtatgatacgccatagacactgatggcacccgctgggcctatcgagagcccgagtctggaaacccgcagacccatatgtcggtcaaagccttattcatttttgacatggcatgcgaaaagcaaacctcgttggataaagtggtggaacccaacccggtccctaacgggtaataaaaagactggaacgggttaaacacaccttggtttggaaaaaatagggttgcttggagtgttcaattaaag

SEQ ID NO: 129303 - DNA, 861 bp, Arabidopsis thaliana columbia
acaaaacgccacataagcgggagctccaccgcggcggcggccgctctagaactagtggatcccccgggctgcatgtattcgcggttgctctcaatcccaaacaccaatctattgcgcggtaaaacgatgcttatggccctgacaggtgaactccacattgtcttgttggaaaaatacatggaccttgatgcttactgactgtatgatgctttaatgaatggagcccatggatgacaagcaaaggctggatttgctgcttactcgcactcggatctcacacgacacgaccttacattgccgtttcttgacaccttccactagctttctacacaaagtgaaaccatgctgtgtgatattagggcatcactataattgtatcaggccacaccctcaagcatttgtaacaaatcagtttcattagcggcgttcacttgggttagcgaccatattcgtctcggagtcattagtagactgactttcaggcattatatttgacttgtgggtgggatggagtataaacttgaactaccataacatcaacattgaaccgcctgcagcttaacactaccatcgagaagctgcaagacttatgatcatgctaggggatttcttcgcttgatggggggcttacttgagatatcgttctggaaaccctcatcgctcgactatttataccccataccaaccggcttaaacaggcacattggttctgtaagctttaagatttggaggaataggcaagcatgaaccactttcggagtttgtactccccacttagggaaccccattttttcgctctcccgaaactcgcacctaaggcgggacatgaattcaattgtaaatcccttatttctctcccaa

SEQ ID NO: 129304 - DNA, 854 bp, Arabidopsis thaliana columbia
cgatttgcttgatatcgaatccgcggccgcggctgatgtcgctgctgctccggtggtgaaggatataacctattaccgataaggaggttactattcctacccctgtggcagagaaagaggaagttgctgctcctgtctctgatgagaaggcggttccagagaaggaggtgactccggagaaggaagccccagcggcggaagcggagaaatctgtttcggtgaaggaggaagagacggttgttgtagctgagaaggttgttgttttaactgctgaggaagttcataagaaggcacttgaggagtttaaggagcttgtaagggaggctttgaacaaacgtgaattcactgctccggtgacgccggttaaggaagagaaaacagaggagaagaaaacagaggaggaaactaaagaggaagagaaaacagaggagaagaaagaagagacaacgactgaggttaaggttgaagaagagaaaccggcggttccagcggcggaggaggagaaatcatcagaggctgctccggttgagaccaaatctgaggaaaaacctgaagagaaagcagaggtaacaaccgagaaagcatccagtgccgaagaagatgggaccaagaccgtggaagcaaatcgaaaaaattatcgtctcttgtttcaccaccctgaattccgcccgtaaccaccctgtccggggttagaaaacttgtccccccggttggctgaaagccagaaaccccagtgggaagccccgggaaagaaaagtcctttcaattcttggggggaagtttcccaacttaaccttccaaaggaacgaagaaagaattcctggacccttgaattccctcaaacgcaaaaattt

SEQ ID NO: 129305 - DNA, 716 bp, Arabidopsis thaliana columbia
cgaatgtatcgataagcttgatatcgaattcgcggctcgcgacgattattcgagctgtcgctgagcaccatatttcattttgtacgcatgtcacatcagttcaggtgacagatgatggatgtcgcgttctccgattcatcacgactctgaaacctcttcttctatcccttgcggtgataataactcgcgctgggccgatgtatcacctctgctatccgccgcctgttatgatgtgcaagatggcgagctcatatagggcgacaattgggatgtttatgctgacatgactgttttccagatggtggacccgaagatggatcctgggatggcggctacccttcatactatctatgaatccatcgaggggggttctgcgcccgctcctattagtttaggtagtacgagttaaggtgcagtccatgattgacactttggaccatctgctgccgtgtgatgcaacatggctcaggggtcattcattggccccgactgtgaaacatgcatctatggtcagaggcctgaaaggacatatttccgggcgttattacattcttattggaagggcatccaagccacgagcccgggcagctgttgccggagttgccgacgcgcctaccagctgtagaagaggatctgtttacctaggacctcaaggtccctaacttttggttgggatccacgaaagaaggccccttggggcttcgggtcccctttag

SEQ ID NO: 129306 - DNA, 779 bp, Arabidopsis thaliana columbia
aaaaaacccaactaagggaacaagctggagctgcaccgggtggcggccgctctagactagtggatcccctttgtctgcatgtatttcgcggccgcttaaaaagcacacttgttttcaaaactaaatagggtcagtcccacactcggatttgtttcgtaacaaatgaataacggaaaagagagtctcaagatctacgaacaacagcgcttgcgaaataaggatgatgggtgaacttaaacgataccttaagcgaacggccttgacctaaaaggttcacagcaacaatattgcgacccgcgactttctctaatcccgtgacttcaaccagcttattaggatcgtggtcgtgaccgacctttatgtccttagccatcttttgagcatcacgaaagtactcatacataggaagatcggcgacaccagcatgggatgtgtattttgagaacgattcatatgcgtgatattctggaagggatgcctaatgaccgagttcaaaatgctgcctaaatagctcattgtgagcattaaaaggtcctagactctgtaaaaacattccttcatatatcaaagctgtaattataactggaaggccgtgcttcagacaggcctgacattttaaaaacaattcccattccactaattccgatcttccccgagccatgggccttagaatacttctttaattgcatattacgacttttcttttacctcagtggttccacaaacgtatttaaacgatcccagggataaccgtgccttcttttttggggaaaggcctt

SEQ ID NO: 129307 - DNA, 793 bp, Arabidopsis thaliana columbia
  unsure (1)..(793): unsure at all n locations
gcaaaaagnnnnnnnnnnnnnnnnnnnnnnnnnnnnnnnnnnnnnnnnnnnnnnnnnnnnnnnnnnnnnnnnnnnttgttctgcattatattcgcggccgcaacagattgagttcatgggatataagaatcgtagacagtgtaagtgttacaacgtatataaacaaaggttgttttaagaatacaaaactatgaagacaaattacatgacaggatctgttagaacttcttttatcttatcacgcttccttctctcatttcgctcttaagcatgtcttcacgtttcggctcttgataacaccctggatgactcaaagggatactctttttagctctccctgagacgggaggtggtaaagctaaaactagaaccataacattatgtttaattccagcgactcattgcagtatcgtgggctgcagacactttttgtggtatatactgagtggttggcttctatctacttggacctacaccagcggtggcgcaatgttcatctcctctggtgcttttgcaagggtgagtactccttgggtattgagacacagctactggatttctgaccatccttctctgttgttgtccaaaagcttaacgcctgttgctgcgctcgaagtgttattaacggacattgattcaatttcttttgcgggcctaacttcttgcaccacacttggatttggtttgagggggctttcattatggaaaatcttcgaccaatggggcattcttgggggggatttctccttgttgtggccccccccccgagggggcatttcgctgtttttcttaa

SEQ ID NO: 129308 - DNA, 796 bp, Arabidopsis thaliana columbia
  unsure (1)..(796): unsure at all n locations
nnnnnnnnnnnnnnnnnnnnnnnnnnnnnnnnnnnnnnnnnnnnnnnnnnnnnnnnnnnnnnnnnnnnnnnnnnnnnnnnnnnnnnncggccgcggaatacaatattaataacatttcttacaatctccatcaaaacatttgctcttccctcgaccatcaatctttaacaagacaatacgtggaacaatatttttttccagagcactgaatagctactttgtgtggacaacgcttctcacaaacgaagcaaatgtgtcgagtcatatgaccattgtttggtagaacgtatacctttttaccggagaagaaccaccacgaataaggtttcatggtcatagcaaatatacattcaatgtggagggtgacacaacaatcctcctcacacgtataaaatcgctcttttggatttaagtatccctcgcaaacttcacaccaataagccatggtacttgtcttgttcccataagaaagagtgagcatatgcttatcatgcttatacctcaacttttgaggtaaagtagcacatccaaaacacaaagcaaaatcacactcttcaatgcaattgaatgtttcttttgtggaaagaagaagccatgattcttttttgcataccgaacaaagtcttgcctcatatggttcggatgtaaggaataaaggatgcatatgactttcatggactagcggctcagaaactgcggcgcactgaacgtgtagctgaaaatcacagtcttgttcatcgcacttatagaagaaacaagccctcaacaacgaaagacaagctgaacaaacttggct

SEQ ID NO: 129309 - DNA, 229 bp, Arabidopsis thaliana columbia
acatgaactgccataaattttccccaaaggctaaaccggaggtggaaaaaatacgatatgatcggaatggttaggtgtaaagagagcactcctaccataaaacttcggtataaccgctgaaaacctataggtaagcgcgaatggcttttgacagtgaaaaggacccaacgtaccttagcaacaatgcaaagctaagaatgaataccatgtaaaacaatcttctgtgcat

SEQ ID NO: 129310 - DNA, 1210 bp, Arabidopsis thaliana columbia
cgagcccgcggcacgcgaggacgaacccagggaccccaaagcgagagaggagtgtacgtattattcacaggagagacacgcacaaccccccagggcgcggggggcccaaaagcagaaaaacaagcacacggcccgcaaagaacccgaggcgacacaccccaaaaaccggggggcaaacccaaaggcacccacccgacacgagcgagagaaacaagcaccgacgagggaaccacagcaaagcggaccccccagcagaccgcgggcacgacacacaccagacacgcgaggacaacacaaaacgaaaggaaaccgaacacaccgacgagagccggaagcgcaaccgaccagggcgaaaacaagagcaacggacaacaaacgaagcaggacaacccccgcgacaaaaaccgcccggagaccacgcagaatcgaacaaggcaggccgcgaaacggaacggggaccagcaaaacagacaccacatagcggaagcaaaccggagcgggaaacacgacccaagaggccacacggccccgcagcgagagacgcccggaccacacaaacacgaccgaactcgcggacagagccacgacaaacacacgggcgccggcgccgacacaaccgaccaacgcacgccgccgaggcactacgaaaaacgaccagggcgcgccgccagagaaggacaccagaacgacaccgcgccaccaagcaacgacgacggccgcacccaaccaccggggcaccggcaacaagccaacggaacgacaactcgcgacggaacagcaaaacccgggaacaaaccaccaggacggcccccaccccgcaaccgcgcagacgggcggacccaggcgaccacggaacacggcacaaaaaaggactaaaacaagacccccgcacgcggcgccgcaaggcgcacagaagcagaccaaacacagccagccaaaccagcaaggagcacccaaaacgcagcaatccaaaggccgcgaacacgggcacgaaagacaacgaaaccccacacaaacgcgacaacggcgcgcagagcaaaagacaaggaggggggcccagacaggcggcggccaacagggggaccaacgcccaaacacccagcgacaacacaaacccgaaaccgaggacccaagcgcccccccgaggacagccgccagccaaagaagcgcggcgacgcggcggggcggacaccgcaacccgcaacccaac

SEQ ID NO: 129311 - DNA, 1021 bp, Arabidopsis thaliana columbia
aaagccacaaaagctggagctccaccgcggtcgcggccgcgctagaactagcggatcccccgggcagcaggatttcgcggttatcttccgcaccgccccaaaaccaaccagaacgggtctgcgatcggaaccgccgcatacaccaatccaactacccatgggcctccgacccttagcttagccagaataatcactggggatctcaacagcagccgcacaataatgccccctggctgcaagaccagagctctctggatcataaacaatcaaccacactggcgctttccccaaggctcccggacgcccgcgaaacacatgaagctcccgccttacccaggacgggagcaaacgaaaaaccccctgggaacaagaaatctcacccttagaacgtaactccaacctggaatccaaaccaaaaaaccctccccaaaactcccttttctcaccctcccaaacgaacacggaagaaccgggtcgaaggggcatcgtacacttctcacgggcgaataaggggccgaacaccggtggcatggccttccacatgccccacccaaaagccggaacccgggaattcccattgggggcaggcattggaaagcccccaatccacctacggcccaataattcaatgcaggcccctgttggccttaacccccccgacccaaaggcaggaacgcaccgaaaggcaatggacccgaaaaggggaaaccaacgccttcagggcccctaaaatgggcctctggcgtaacccaaaaaaccgccccttacccgtctaaacccctgcgctacacggcacctttggggtcggagagccacaaggggagaaacaaaccgggttacaccgctcaaccccttctgagaggggaaaacctggaatggggggaaccccccacgacgggggaaaaaaaccggaagtcaaatcaatacaccttttgctcaaacacattccaacccataaccagggggcctaagcggggacccaagaccattgggggcaataaaattccggggcgaccaaggg

SEQ ID NO: 129312 - DNA, 811 bp, Arabidopsis thaliana columbia
tcgactgtatcgataagctagacatcgaattcgcgggcgcggatctcactcgaaaatgcagcaagctctcgtatattagattcccgtcatacactgaatccagactttttattctactcctcacaaaacttaaaaagagcacaactacgtgtatgatttcataacctatgtagctgctctttatcaccaaccatgttaattcgatcatcaaacttgatcaacaaggtttgaatatgcatcagaacaagctcaacctctagcttctctgcgtccaccgcctctactgtcttcacttcctccccggccgagccttctactttccagattagctcggtgttctgcatactcgccttctcttgcgtccaggaaagacttggctcctttacttcccttatatttgtgatgaggaataatctcgtgagctatacttttgacataactgagttctcactatgctccccatccatcaataagtgatcaagccttcaaagagcttacacatttccaacttctgcaggacgagttatgccacgtttatcggcaatgaatatgacggcttcaaacgctgaaaatgtcgtcttatgggaagtaaatcccactattctccgttcctggtcctagtgaatggcctaaaaggtaggtcggattaataaaattttcctttgaaacaaaagttggttccgtacgcacccctttttggcccaccattccttctgcaagaattttttccctcattcttggttacaataaaaacaacacgttcccctgttgggaaaaccatctaaaaattcctcttttgggaaatccccat

SEQ ID NO: 129313 - DNA, 548 bp, Arabidopsis thaliana columbia
  unsure (1)..(548): unsure at all n locations
nnnnnnnnnnnnnnnnnnnnnnnnnnnnnnnnnnnnnnnnnnnnnnnnnnnnnnnnnnnnnnnnnnnntttttttgtattttttcgcggccgccataacaccttgttctggtttggtacacaaagacaacatgtgcatgcagattatgcttttatactgtcaatgggctatctgtaggtctagaaattgattgcctcttcccttttctttatatcatctgtaaaatcaagttctgtaactaagaatcctgtcacataatttcatcattgttcagtgattaatattaggtactngccctgcatgtgaagctcgtctgttgagcgaggaaaaatctgacggttgccgtttacaatactctacgagtgatactataagaagccggccgagatcctgtgtcttctgagaattctttgtgaaagatgcatccggaaaaaaaaggcctggaatcagcttcatcgctttaataaaaaaatcgctttggaaggaatttgaacattgaagataatttttttaagccgtttttattgcggcaaatcaaatcacctcca

SEQ ID NO: 129314 - DNA, 764 bp, Arabidopsis thaliana columbia
  unsure (1)..(764): unsure at all n locations
nnnnnnnnnnnnnnnnnnnnnnnnnnnnnnnnnnnnnnnnnnnnnnnnnnnnnnnnnnnnnnnnnnnnnnnnnnnnnnnnnnnnnnnnnnnnnnnccggccgcagcagaggttgcggaagggcagacttggaggacctcaaagaggcttaagctagcatggcgcccttacactgcccgagacgagggggctgtacatgaacatctaaagcaaggctatgcttcaaacgagatggctcatacgctgtcgaaaacgctcagaatctgtaccgccgacagtgcgaactatgagcactgcggaacgcttatcccctgtgaggagcccacatggcttaaggactctgaactggtctaacatgcattatgtgcgggcggggacacgctcctggtcctaacatagacacatgcaatggttattactgagaagatcttaaaccgttctcactcagtaagccagagatgtggtctgagaactggactggaagggacacacatcttggaagtcctgtaccttacataccaagggaagatattgcatcctccgttgcacgaattaatccacatttgagtgccctcgaaaattactttttgtggaaagagagaaccatgtttttttttatcaacccggagacaaaatggggccccaacttgggcctatgaccccgggaattaagaggaactcccggcttccctcaagaggacccaaaaggtcttaagaacacttgggaaaggcacttggaattaaatggcccattcaaaaaaatta

SEQ ID NO: 129315 - DNA, 1007 bp, Arabidopsis thaliana columbia
aaacgcctcactaaaggggaacaccaagccggagctccaccgcggcgggggccgctctagaactaggggcaaccctttttctgcagtgttattcgcggccgccccggaagctgccgaagtgcagacttggtggagctcaaacaggtttaagctaacaaggcgcccttacaccgcccgtgacgtggtggctctacgtggccatctcaaacaaggctatgcttcgaacgagatggctaagaagctgtggagaacgctcaaaagccatcaagccaacggtacggcctcttgtcacctatgaagcggtggaccctggcctcgggaaccatgatgggctaaacctttggacaccaatctttgtgctttggttggcaagcgctcgccactcacacaaccactaatgagcctggccccgatcttgctgattatccgtacgacacccgctcctaaacaaaggtgaaaacaccctctttttcgcctccaccccgtgccccatggaccgaaaaaccccaaggggaggggccaagcaaattgaaaccccctgtaggcccccgagaaaacgacaaaacggggcccataaaaaaccctccccggtgtcgggtgggggcccctaccccctaaaagagcccacactttccatactgacccctgaaccggggaggaaccacctcgcgccctttttggggggaggggaaaccaacaacggctcatatcgaggtcaaaaaaatatttctggaacgccttttttttccgcatagaaaaaaagagagccccccccctccgggggccccccccattcggagggaacccaaaaccccctcccctccccccaaaaaaaaaggaggggccaccaacggtccgccgaaaaaggtccccccctgcgcactccagacggaaaccccctcaaaccccccctcgttcccggccgcggtagtccccccttcctgacaggagagtcgggcacccaacaaacccgcccaccgtgaacgcgaataaaaacaaacaaacct

SEQ ID NO: 129316 - DNA, 687 bp, Arabidopsis thaliana columbia
ggccccccctcgaggtcgacggtatcgataagcttgatatcgaattcgcggccgcttctctcttccaatcatacttcaagctcatatttttcttctacccaacaacgagagtctcctccttttctaatggggcgcttcagctgtaaccaccgaaaaactcacaacaacgggggagaaaaatcaatcccgatcaatccacttacaaacccgatgtactccccgagcatcttaatcctcaaaccccatctccagaaccactgactcacccaattcatcagcccatttcatcaccgccttccaatgcagtctcatcgtcgctagccatatactattttaggtgaaccattcgaagacagtcgcgacatttgacagctaggggaaagaattaagtcaacagtctattagggatcacgtatatgtgtaaagagattggtactgttgacactgatgcttgcatatcggttcttaagaggaagcttatctgtgagccagatccagaagatgtgaagagagagattcacatcatgcatgatttgtctgcacaacctagcactgttcaaagcacacgtgcttatgaagatacactacctatgcattggcttatcagagatgccagctggtggtgagctgcgtgacaggattgtccctcacagacatttctcttagagagctgctagtggtatcact

SEQ ID NO: 129317 - DNA, 705 bp, Arabidopsis thaliana columbia
  unsure (1)..(705): unsure at all n locations
nnnnnnnnnnnnnnnnnnnnnnnnnnnnnnnnnnnnnnnnnnnnnnnnnnnnnnnnnnnnnnnnnnnnnnnnnnnnnnnnnnnnnnnnnnnnnnnncggccgcggatatgatactgatacacggagctaacacaagacaatctctatcaatcaatttctgactaactgaggagaaggatcaataaatcagctcaaacacagataagatagcccaacattttgagacagtatatcaccaatactcacctctgtttacccccgatttaactatactactctgggctcaagaatcactctctgaagataaaccgctgggatttatgccaacttgatcaatggaatggacgcatgttcccctgaggttgcctgcagtcacttctcatcatcgcgcaaaactctttaaaacttattctgccatcactgtcggtctcaactacggatataactaacttgatgctagctcaatctccaataacgtatgcattaatcgtacatgacaactcatatgtatggatacgcccgctgtcgtatctatcatagcgtcggaatgcttcgtatacatgctcataacgatctaaattgcatctatgcattgacgcatagataaactcaaagatatcgattgttccattaccatcgacgtcagcggctgacatgagccgcttaacttcagtctccgagagtctacaccccaggtatagttaa

SEQ ID NO: 129318 - DNA, 573 bp, Arabidopsis thaliana columbia
ctattactgtcgcatgcacgcgtacgtaagcttggatcctctagagcggccgccctttttttaattattttttttttacttattttttctaccttaattttttatctttgttcataactaacaatattatattacttcaaccaacatattaaaactatttttttttactttctaagcacaaaataaccccccaccaccctggcctcattaactatcggaacacaaaaacgcccaacctactcacaaaatacataccacctgaaccaccgtcaactgcatataaaacatatgctacaaacacgaatacccaaatcaaccaattatccaaaccaactacccttcatccacaaataccggcacgccatctatcaacaccacccaacgaaacgccctaaatctacaaagacaaacataaccctactcttatcctcacctaatccattcactagaccaggataatatacgcaactcatcgtcctcacccccaccagcattctcataaccatctcctacctctcaatcacacgtcgagacacaagacaactacatatatatcaccacaccacagctcta

SEQ ID NO: 129319 - DNA, 647 bp, Arabidopsis thaliana columbia
aaaccaagaggagacgcaagcggacaaagggcaggaagatttttaaagacgaagaaaagggaaaagaaaagaggaaacagggaaaaaaaaaaaagaaaaaaagaaagaaaggaaaagcagagaaaaaagaaaaagccaagaagcaccagaacgccgaaaagcacgaaaagggaaaaagaaacgaaaaagaaaagaaagacaaaaaaaacaaaaaagaggaagaaaaaaaagccggaaaactaaacagaacaaagtaagaaaccaagcgacaagcgaaaaaaacaggggcagcaaagaaaaaaaaaagacacgaaaaggcgaaaaagaaaaagaacaaaagcgaacaagacacacccaaaccaggcaaaaaaaaagaggaaaatccaggaacaacccacaaagcagcgacacaacaaaaaaaaagggagagaaaaaaaaaaaccaaaaacaaacaaaagaggaacgaagggagcaaaaaggaaccaaagccaaaaaagcgggcccaaaaaagaagcgagaaacacaaaaaaagcaaccggacgaggccagaaagaaaaaacaaattaagagacgaccacacaaaggaacggggacaaaaaaggaaaaataaaaaaaagcaccacccaagggaaaacagaggcaccaaa

SEQ ID NO: 129320 - DNA, 621 bp, Arabidopsis thaliana columbia
gcacgcgtacctaccctaggatcctctagagcggccgcccttcatttttttctctaatttttttcttacgcccaacctccaccagcgctcaattgttggggggaaaaataaacggcctttaacagcccctgtgaagtgatattataaaacgaattgatccactgttgaaaaatatttgtcccacacaaatgatacatgcgaataatgtcccaaaaatttgcttatctggttctccagtaaaaattgaataagagggaaatagtgtggctgcttcccactgggttggttccatttttcaacttccgtttttcagtttcaaaaagacctggccttgaacactgtcgttcagagtccttgtatgaaagaacaatcctgttggtaaccacaacctcgacttcaactgcaacccgacctccaagaaatgaaacctccacttccgaattcggaaactccctcatccgtgaacaggggacccatctcccgataaaatgatttccacccaacaattggcgtaaagaccccacccgccattcttcccatggatcctcaaaccatctcttcaaagggatgtaatgccacttctccaataagccaccttgaaccgccccaggttgttcaatc

SEQ ID NO: 129321 - DNA, 577 bp, Arabidopsis thaliana columbia
  unsure (1)..(577): unsure at all n locations
ccctaggacccactagagcggccgccctacccacaagaaacaaactttttttttgccggaaaaaaaccgcagcaacggcaggggaggggcccaaactgcggaaacaacactccaaataaaacaaccccaccctctagcacagccaaaacacacggggaacccagagcacgccccacagaacacaccaacccaccgaaggggagacaaaaaaaggacaggccgccacacaaaacatcagaccagccagccacatcgcccccgcgcgaagaccaacacccgacaccccaaccagcctgcccgacctgcaaagcccctggaggggggacaaaaccgcacaaacacaacgggctcaaccggcaccacgactacacgcccggacccaaaaacaaccacggcaacaaccccaaaaggcgccgacaaacaccacaaccacaaccaccggcaccccagccacagcgaaacaccaaatactgcacgcaagaacccccccacagacaaaacccccaggaacaaaccanccggcacaaaaggctacacaaaaaaacgaacaaaagggcggcgcaaccggaacgcaaaa

SEQ ID NO: 129322 - DNA, 913 bp, Arabidopsis thaliana columbia
  unsure (1)..(913): unsure at all n locations
aaaaccaaccagactttttttgcatgaccgcgtacgtaagcttggatcctctagagcggccgccctttttatccttctttttttttctttttttttcttttttcttcaagcctaaggaaaaaccaccttttatgaattagagaaaaaaatccccagttaacccctttggcgagtaaaccacctttgacgtccagaaatctcacccacatccatcaagattaagaaaacgcacaggctctctcggttaatacagcgcaaaaacttccttgatccgctcaaaagacaaaaataatcctctttaaaggccagttcgggggctctttttctttttctctaaaaaacaaaaaattctttctttttcaggggcctgaccttttaaaacatcaacttgttaaaaccccaaattggaattctcctaagtgtgttggtcacccccccgttatttataaccggcgatggttttaagccaaaaaattacattctttgaaaagtacaaaaaccccaggacaacatggtaaaaaggtcaaaacagaactcatattcccccaagattcttaccccgttttccccatcggagtttttaaaaatattttctttcttaaagggacacgtgtattctcgccccacaaaaacaaattattggtgggaatataaaaataaacattcgccaccaccatacattangatcctgcacatctcttttttatctctctatacacaacagcgcgacaaagaaatatctcttctggnggtatgtatccacgaaggtaaaaaccccaccaaatttctttgttgtaaataaaaaagggggtccacaagatctttcttccaaaataacaacaaatgggaaaggctaatatgtttttgcgcaaaaaaacccttgaagggggggaaaacaccacaccccttcata

SEQ ID NO: 129323 - DNA, 653 bp, Arabidopsis thaliana columbia
tatgcacgcgtccctaagcttggatcctctagagcggccgccctttttttctttcttttagtttttatacaaaaaagaacaaaatagctcgtcgattaaatgtcacaagcttgagaacaccatcctctccccgccggattttctaacatatcggctaaaggaccaaaagctgtagacgattctcatacaagcttcctaagttgtgaaagagagacgaacaaacaaacatactaacaaaaaaaagaaagatcatcgatcctctcgccggaattgtcttgtcatatatcaactctctcgttaagcctagcagcgacggtaagagaagccgctacaccaccagggtgagtacacaatttagggttattcctcatctctgcgctcaccactccctcggcattttccctcgtcacacctctgtctgccgataacttccctgctgcacccgtaaaaatactacgaaacttgattttcctctcgttacgatctacggtagcgttgagatccgctgcaaattgacctgaaaccggcgactcccagctaaagcaatgaccgttggcaccggaagctcctaatctcttgcccgtttgaaatcgactgccgcccggcacttttgataccaaaagggtttggtttccaagcttgtacttttaaac

SEQ ID NO: 129324 - DNA, 650 bp, Arabidopsis thaliana columbia
aaatccaccagctattactttgcatgcaaacctacgcttggatcctttagagcggccgccctttcttctgttaacctctttttttttttcaaccaccgaagggcccccaaaacaaagggaggtttttttctcccaaattaaaaactcccggattcacacgcccatattaaaaacaaagggcggtttttaactcaaccatacgccccgcacctacccatgctgtttattaaatattccatactgccactcttttgtatattatgacgaccactattcctctgcctaaattcaccgctcaaaacaaaacaaaggaacagctccaattcaacaagggtgattttgatgcggcgacccaagtggtatcacaaaaacggcgacaacacaggaggcacggttacaaagcaatgcggggtcttattctcggctcgagtttcacccctatgtttaaaggggaaaaaaatcccgaaaacatccggtttggcgacaaaggaaatatggaaattcacctttgtggacgacaatccaggcaatatcccataaaaaagcatcccatctggacttataaacccatctgtgggcgtgttttacggtctttacgccacgacacccggctttctccctgtgcaccatttgcacttaaatatggccac

SEQ ID NO: 129325 - DNA, 839 bp, Arabidopsis thaliana columbia
acgcaaaacctcacgcatggcaccctctatcacgggaccgacactacgacaaatgaaaactccctattttttttacgttcaaacaatcaccaaaatgcaaggacatgcgcgcgacacatcaaaccacgaaaacagaaaaaggcgaccagcacataaaacacgaaaaagaacgtacctaccacttacaagacaatacacacggggtccgccaccgcaacacccattaacatgagcggagcagggcggaaggagaacccgccgctttaacaggagaaatagatccaacacgaaacgtacattaccaggctagcgacctgaccgcatgctcccaacttcacataacaaaaaccgagggagggagctatactgcgcgcggaagcctccaggacggacatctgagacacactcacacctgcggggacgggaacacaacgcgacacgagcaacagcattccttcaatcccaacggctgaaggactaggctctcagcaactaacccggaggaaaaacgacaaccacatcaccagcaacttttggcgcatcacttacagccaactaccccacgagatacttgggccccctatgaagaggagagcaaacaagcagtcgccctgcattcatgcggatcacgcatctccgcaaaccagacgccatatctcacaacctctaaaaaacttaccacgcctctggcagagaacaactaacacgctaccttaccgggacgccgcgacagtcggagaacactcaactaaactgtgggtgagagaaaaacacacctccacaaaaaagagaaaaattctgccaggaacacccccgcagggggatcccaaaaccaccgc

SEQ ID NO: 129326 - DNA, 767 bp, Arabidopsis thaliana columbia
gcaagcaaccgtacaggcagaacaaacaacgagacaggagagaaaaaaaacaatcaagcgcccgcgacccaagcaccggccagcatacgcaaacgaacaacggacagaaccaacaacgcactcgagccatacggaccacacaaggaaaccgacagccggaacacgccgcatcagagagcagacaaacgaacacagacagagccacgcgcagccccatacaaacgcagctgacgggaccagaccccacgacgcacaaacagcgaccgccacacccctgccccgacacgccgccaacctacccgaagcgaacccaccacaaacgtcgcaaagcgccaaacgccccccacgcaccgcacgaaaccccggcaaccgaccgccgcacccggcacaaccaggagcaaaccgaccatccgaaccgcaaacagaaagcacccaggaggacgccccgggccagaaaaaaagcacaacaagcccacgaaaaccggcccccggcagccaaacaaaagaaacaacaaaccggcgcggaaacgcaaccaaacaaaagggccaggagagggccaagcaccggcagaatgacgaaagggcccccacaagcccccaccggacggggggacgccccaccgcccacacaagaccagcaaaaaaaagacccgcgcgcacaagcacacaaacggcaaggggcccagccgagggaacacctccaaccaaaaagaaaccgcacgggcaaaacgaccagaacacaacaacccacccgcaacgggaccaaa

SEQ ID NO: 129327 - DNA, 619 bp, Arabidopsis thaliana columbia
actgatcctatagaacggccgcccttctttcccgccggcttttttccagacaccgcggacgcaacttggcagggcgaaaaacctgccaatcaaacaggagatcatagttcacaaccaacttccgggcccattaactaaataaggaaaatccccgcacctcaggcacacatcagctgtggcatccccattccaccagctaaaactgcatcgagatgcgagtgtggcgctcgtccctctatcttcttcacacgctctttgtgcatctcagccacgaaatgataatccatcactgacgcactggaaaagctcccaaggcagaaacagccgctgaatcgacccatcccaggcacaacctccgcctctggttaacccaactctgagaataccaaacagcacatccacctcgggccatggaccggaatcccccaactcccccggataaaatccgcatacagctgcgagaggcggcgcttgctcccaacatacatattcacacccctccttcgggttccctcaagcatcggacagagaaccataccccccacctggatgccagtgggaacgaagttcatcccaatccgcccaccggtacagccagccaaagaaaatcggaaccccc

SEQ ID NO: 129328 - DNA, 684 bp, Arabidopsis thaliana columbia
actttttatgcacgcgtacgtaagcttggatcctctagagcggccgcccttttttttcgctccttttttttttttaatggcgtctcctacgtagctgcatctataaatagtttgcttctccagctcccatttcataattcctcattccccggatctctcccatctaaacataacccgacccattttatccacccaaaccggatcaacccgcaatggataagccaagctccgcaatccaatccaaagaagcagaatccgtcgcgaaacaactcggcgtttccgtcattcagctcctcccgtcgctagtcaaaccagtacaatcttacgcttgaactccgatttcgaaattcaacgctccagtcgatggactccgatcatcacgtcggatcttcttaggcgtcaatgccgaattcccaaatcttccttttcaccactcaatccacgccgaacagttccttgtcaccaatctcacactcaacggtgaaccgcacctcaatttcttccgccgtctcccgccgcaccatgtgtccattgtcgtcaattcctccaagaaattcgcgacgccacctgaaatcaaaattcttaatccaccgatccaaaccaactccgccgatttccgatttccgcccgcctgattcaagacccggatttcctaacggctctccgggaaagctcttctttgcc

SEQ ID NO: 129329 - DNA, 653 bp, Arabidopsis thaliana columbia
  unsure (1)..(653): unsure at all n locations
gactatcgaccagctatgacgtcgcatgcacgcgtacgtaagcttggatcctctagagcggccgcccttttttttttttttttttttttttggcacttttactttccatttcactccctttttgtgctccttgttcccagcgccgaaaaataaatttttccggccgggtaaaagcggtgactgtttacacaaaaagactttgcgcccgcgcaggataccttaaaatgtggggggggggtttgggcaaaacccgaccaacctgtgaaaggggcgccccccaccggttacatggggcctacccccctttaacgggtaaagactccggcctgaggttttaaaagcgcaaaaaacaccacaaggtcggggcggagaacccatatattttttccaacatggaacgcctttgggtatctcccaaagccttggggggataaacaaaaaaagaatttcctcgggggaaaaaaagcacgtggcccttacctcgaaacaattaaagccgccccccncatgcgctgtgatttatatggagcgcggagacccaagaaatattttttgatgagaagaaacttgtgtttattaaacccagcacccgccggggggggctgaacaaccccggggggatattctcgggggaggcgcggggggctttcagg

SEQ ID NO: 129330 - DNA, 747 bp, Arabidopsis thaliana columbia
aaaaacaccatgactttttttgaccgcctacgtcacctcggatcctctagagcggccgccctttttttttttttcttttttttttacaaaaattggatgaatgaaaaatttatatatggctacaatttcgctcaatatcaaaaattacagaaagattgacaaaaagaaaaatgaaagaatattgaatctaaactcttctttctactcatagctctacagcttccacttactacatagccccttcacaagttttaaaaagccatccgagcaacaacaaaaatattgattttatctccagaatttgcaggagacataatttggatcagtgaaaagactgtgtgtagtgagtgttgtttatggtgaaagaagcatataatattttgatgttgcttttgagttattttttgatgaatggtttttgacagaccagaagtctttggtcactaccatcttgaagatcaatgactcttgcttcccaacgcactcgagctgcaagtgctcgagccatcttgattactcccactttgtcgcttagaacaacccatccctcagggggaagaatccggtccatttccaagaacaagtccattaggctgcatcgttctgagctaaaatgtgtgacaagttcatttggcttgaaccatgtcatatgttcgaggatatgtccggaatggttcaaaccactcttgtctaacaccggcgaaaccacgatcaattctgataggaaagatattacgtggattgact

SEQ ID NO: 129331 - DNA, 606 bp, Arabidopsis thaliana columbia
ctatgacttcttatgcacgcgtacgtaagcttggatcctctagagcggccgcccttttttttttttttctttttttttttttttcttccttctttctttctctttttttttttttttttcgggggcgcaaaaaaaatcttttttttccgcggggggataccatttttcggggtttatggggaaaaacaaccccgcccgccccgaggggaaaaacctttggcgggttcccctaaaaacggggggcagcctcaaacccccaccataaaaaaaaagtttttggaacactaaccccacccgggttctctctcccccagcgggggaaagcctccacccaatactatcgggggggccacccaatgcaccctgaaaactttccgggggggaaaaacctatcctcgaacactcggcccccccgttttaaaggggaaatcctcctttttaaaagaatttgggaaacacctttcttttttctggggttttttcctcaaccgagcataaacaccctccgcggggggggcagacacttcccggcgccttttaaaaaaaatccccctaaacatctctcaccacactggctgtgataaaaagcgcggcccctgtggggcg

SEQ ID NO: 129332 - DNA, 763 bp, Arabidopsis thaliana columbia
tataaaccagctatgacgtcgcatgcacgcgtacgtaagcttggatcctctagagcggccgcccttttttttttttttttttttttttttttttttctttttttttttttttttttttttttttttttttgggaaggaaacaaacctttttttttttcctttaacatcaaaccaaatttaaaagtttttgttttgtttgctgtcctcctaaaaaccagctatttacaaaagggggaaattttggccccgggggctggtttttctgggttttgctaaaaaaaaaaaaaaaaggttccttcttcttcttttaaatctcgggaaacggaccttttttttgccaaacaatggacgcaagtcctttttcctgtctaaaaaaaccttataaagggcccttttaaaaaattaaaacctttttttaaagggcctttattttgaaaacgggtgggataaaaagtttttttttctgggagggaatctaatttggttttaatgggacgctcccaattttccctcccagctttggcagtttcttcgccacacagtttttaaaatcattttcccggaggcttgctcccggaaaaggaggcccccacccttttttacctccctcccgcgaaaaaccaattttttttgggtttctctttgggcccccccaccccgtggtccccccccccgatattttttcgccccccggtttcccttgggggggcgctcacaacacttttttctctttattgggggagtcccctttttaaaaaaactt

SEQ ID NO: 129333 - DNA, 762 bp, Arabidopsis thaliana columbia
acactatcgacgagctattacgtcgcatgcacgcgtacgtaagcttggatcctctagagcggccgccctttttttttttttttttgattaacggctttatactttttcagttgattgataaaagagtttgattcacattgacagtatccagctttctgggaggatagaggagaagagaaaaataagaaacacaaaaggtataactttataataaagattcaaaaataaaaggaaagaaatgcccaaattcacaaacatgaaggacatttctgtcattctttgtcatatataagaagagatcacccaaccaacctttcacacttaaacaacaccacacttttggttttccttcttctaccaactaccgaggaactctcttacggctcagtatttcttgttccttgagacggtgttggaaccgagcaagcctggcttgaagactgactagccctgctgctttccgggacaacacaaagctcagttgcgtcacatagttttctatcatgcttcccggttggtccacctccgctagaagtttcatttcctcgcgaacaatctccattgtatcctcaatttcttttctgtgcgctgcaatcagaacttcttctttctcaagcagtgcatcgaggttttcatcaagcgaagggtcggtttcatattgccttgaagcggtttcatattgccttgacacagtttcactttgcgttctgtctaaaatttgtcaaggtaggggatatccgacgaactgacctctcttttaaa

SEQ ID NO: 129334 - DNA, 302 bp, Arabidopsis thaliana columbia
aacacctgactgtatgcacgcgtacgaagctggatcttaagggcgccttctttgtcactttttttcgccccgcccgcacacaacgcgctaagaaaagcaagtgccactacacccaaaagacaatcacccgtcagctgaaacggacccccccgcggaaaaaccaaccaagtctgaaggcactgacaaaacaccccaaacccccataggggacaacacccaaagctacccacaccacctccccaaaaaacgaaacccccaactacctgacgacaaccagacgaacacacgttctaaggccgacc

SEQ ID NO: 129335 - DNA, 775 bp, Arabidopsis thaliana columbia
actatacaccactatgtacgtcgcatgcacgcgtacgtaagcttggatcctctagagcggccgccctttttttttcttttttttttttaagccccaaatacttaccataaaaggaccttaaaaggccaccgtaaccaccaggaaaaacggagtttttccggttaaataaaaaggggacctttaaacaattattggttatttaccattccccggaaccaaccaaggcccccgcttttttttggccttccccggtttacccatttttaaggccgcttcctggattcatacaaaaacacaaggggggattagggataaagttacccgcgaatggaaaaatatttttaataatcaccatccggggcatatccatttccattaattcaataataattaaacattccttaagaacccgccttgggtttggcgtttttttaaaaaaccttttaaccttttggttaaagggtggaagaatcccgcataataatggcgggggtttaaccttcaaaggaatcggagggtttgggaaccaaaaaaaattcggaaaaaaatgttttaaacacttcaacaaggtcaaacatggggctcaaggtcgggtaaaaaaactttagaaaaaacaaaaccggacattttaattggaaattggggggggataattgtgggcaggggaaccccaccgtaggggggattttataaggggataccccctcagggaaggttcaaactttaatattttacaaaaacccgctcctctaaataaaaaacccgcggcttgggg

SEQ ID NO: 129336 - DNA, 690 bp, Arabidopsis thaliana columbia
actatcgaccagctattacgtcgcatgcacgcgtacgtaagcttggatcctctagagcggccgccctttttttttttttttttttttttttttcttttttaacttcccaacaatagccttttaaagatgctttcatgcgcaggaacaaaaggatgaaacccaacaaaaaaaaaccccaccaggaagatgagaaaaatggtgcgcggatatggctctgttttcacttttatggcccaactacttaaataataaacgttcttgtatttaaaaacaaaggggttcgatggaacgataaaacaatcgaagattttacctaagggaaatgagttttttgaaccttaaaaatgggatccaagaagaccgcaagagcttttattgggagcgattatttttattccaaaactctgactattccaaaaccatcgcttaagggggtttattcacgatcgagtttttttatttttttgcaaaggtaacacctttatgaatacttactgaaagctctttctttgccttttttaatcccatccttctaatttcgttcaatggtccaagggcggacctttttatgaatcccacattgctccaaaagcaccctttgattgcaaaaaaggggaagcctcacgtccacatgggggatggcccccatttttggccccacctctaaaccgggatgtgttggggctatca

SEQ ID NO: 129337 - DNA, 513 bp, Arabidopsis thaliana columbia
ctatgtacgttggtatggcaggcgtacgttacagcttgcgatcctctcagagcgggccgccctctcctttttttcttttctttttttttattttcctctttttctttttttttttcaacaagcaagcgttttactgattgcataaaatcttcatacagaccggatagaaagataaaaccttatttaataaattgcccgccttcgttgaaggaatctacccacggcgacaaaaaatccccacttcaatcggggcaaggacccttcttagggggctcctggggacctctcccgaagggaacaacttaccccgaacaggaactgcccctttaacacataggagaagcttttccaaggagcaagaacgtgaggagccaacctttcttctttaatggaggcccgcgccctctaaacttcttatccctcgagtaggaaagggcggggaaaccttgattttgattttgagggctgtccctacagaaagaaccctttcgttctcagaaggcataaacagtt

SEQ ID NO: 129338 - DNA, 799 bp, Arabidopsis thaliana columbia
ctatgactttgtttgcacgcgtacgtaagcttggatcctctagagcggccgccctttttttttttttttttaattttttcaatcagatactttattaattaagtaaaggattcgatacaacttatgagtttgcatataagctattacaagtaatataattgatccctagactatccgaaactatcaccacccactgatcccgccttgagtctctagcgcctaagccaagtccttcccacgatcaccattggttcactactcggatccgcggagaggatttggagaggggaagatcgcgcataagtccagccgattctcggtaggtcaattaagaccctccggtcctccaccgagccgcgtccccgccctagccgatcccttgcccggactgagtcttgtgtaggttgcacatgacccgattctacccagcccattagtcgttccttttaaggaatttcgactcaattaacgtattctagaatccttagactcgaggtctaagtttcccttaccttccttcacgatgttcggccgatcccacccttcttcttccttgccggtcacagtccgactaccgatttcctccgacgatttatttctcccgaaaggacgagagtttaaatagtgagtttcccggtatttttctggggcgttactgggcgccctcttaaaaggtctttgtgggcaccccttccctttattataaaggtggccgaaatatgaatggctttccccgaaaagggattacccctttccggtttcctttggcaccctcttttcccgaaaaaaaaatctgccc

SEQ ID NO: 129339 - DNA, 548 bp, Arabidopsis thaliana columbia
actatacgacagctatgacgtcgcatgcacgcgtacgtaagcttggatcctctagagcggccgcccttttttttttttttttttttttttctttccaaggtgacaaatatcatttgcaatggggccgttagagacattatacatcaaaccaccaaaaggggccgggagtctcgaaaacttttgtagtgcggcgcaaagaaaacgcgatctggagatacaatacaattccgagcttttcgtgcgtcccgaccttaggggaaaaccagggccctgttttgtgggaaaaacccgcttcttaagaagggctcttacacattggcggtaactatgctgaaactaagctcgaaaacgggcatgacaatcctatttttatgcaaccggcacaaggggtctgacacaacattttcttgagatgattgctttgacggggagcagttaatctcttttggcaccagagaggggtttgctttctccaacgtttgtaactaatccacacacttttggcttcttggggaggccaccgctaaacacccctttgtattaaggaa

SEQ ID NO: 129340 - DNA, 749 bp, Arabidopsis thaliana columbia
ctatgacgtcttatgcacgcgtacgtaagcttggatcctctagagcggccgccctttttttttttttttatgttttttcattttcgtgatagcaagtttgagaatgaacattataaagatacaaagttacagatttttgttgtggaagcaaatactaaaaattacaaaggtacagtggtggctaaagatacacagaccgaactgctctgacttttctgactagttaacaacatatcttttcagcgaggctggtggatgtttctcggagcagcagcaaccctctggtttccccatttcgctggctttttcgcatacttagctggttccacaatcgatctcgggctcctgtttccacttgatttcttaaccatctcaccattctttccaaagccaaattcggaaggtgcttggtaatacattcttccatcgaatccttgatcaaactcagcagcatcagtgtcaaagaaatcttccatatcattaaaatcaaatgattctggaagaagatcagctacttcgatatgacctccaccattcttattctctccgttggaatagaaaccatccgccccttgctgttgttgactgatccagtaatcagggtaccaaagtctaagttgtcaccaattgccaccacttcggtgagaaaatttccactttgtctacaacttggccggaataaaaaaaaagcgcgcacgggggttaaaaaaaaaaatcgtttttcttgataaccaattgcctttttttca

SEQ ID NO: 129341 - DNA, 761 bp, Arabidopsis thaliana columbia
  unsure (1)..(761): unsure at all n locations
nnnnnnnnnnnnnnnnnnnnnnnnnnnnnnnnnnnnnnnnnnnnnnnnnnnnnnnnnnnnnnnnnnnctttttttttttttttacttatagaggagttgatattcaaaagtgcatgggttttttttgcatcttaaaacttcaccaatctatatatatacttgttgaagaacccacaagaaaagaccctttctaaaaggttatcttggacccgaggggtaatcgttttcgataagggaattggaataggggatgagccagtcagtgccagcatgaggataggcttgatagttaaaatcatgtattggcatctcctccttttgccattcttcccatctctcagctaaaccatctccttccagcattctcactacttctgacatctttggacgttccattgcagaactttgagtgcagagcagagccatttgtatcagctgctccacttctgtttccacgtactttccttcgagttctgcatccacaaggctttccaacttcttctctttcaaaacctctttcacccagtcgagtaacatgatatcatcatcatttgcaagccgagcaagatcgaaagccttttgtccagtgatgagctcgagaagcatgaccccgtacccaaaaacatcagtcttctcagaagattttcctgtcgagaggtactcgggcgctatatggccaattgtaccgcgtacagcaagtgtcacatgggaagcattataattcattaattttgcgagcccaaaatctcaacaacagctta

SEQ ID NO: 129342 - DNA, 766 bp, Arabidopsis thaliana columbia
ttacactatcgaccagctatgtacgtcgcatgcacgcgtacgtaagcttggatcctctagagcggccgccctttttttttttttttttttttgaaggatttgactgttatctttttcaactcaagaaaagaaaacagacatgaagcataaagagaatgtagtatatttcacatacatgatcttaactcgaaccgtttctatcaaacctttcagatctacggtagcgattctttctatgaacatcaaactgaagtgaagaaagcttatgcgaaaccgctgaccaaatcatattcacagaatctccaacttgcgaaggaaagcgatactcaaaacacccagcaacctctttcaatctcccccacttcttcttccactgatcctctgttatccctctgagaatattcaccaagaactctttctttacagcttcagaagcatgcacaaacacggagaaacccgaataatcaagagtatcttcaaatggaagctcaatctgatcactgattataaccggaacacaatggctcacaatggcatcgaaaagacggttagaggaaggagtgtcacccgcgatattgagacaaaacttcgaggaagccattcctttaccagtttgtttagtcccatttcctctaacagttccaaatgcaaagtgaacatctttctcatctttcagaaagttatacagttcttgaccaatagttccaccattcttttctatagatagctccttggaaatatgccaatacaggacgctttttaaaca

SEQ ID NO: 129343 - DNA, 770 bp, Arabidopsis thaliana columbia
tacactatcccaccagctatgtacgtcgcatgcacgcgtacgtaagcttggatcctctagagcggccgccctttttttttttttttaactttcaaaatggcttccgattctggattccacaattttttttctaaatgacaaggaatcaaaatgtccagactatttacaacagaaattgaaataattatagcagctaatgactgaaacaaaggaacaaagatctgctggtacaaagacccaaccaaatgttcttggaaggccaaatgtaacaatacacttcttttttttttttttttgtcttctcttttctttttcacattctactatcgaaaaaaggaaaacaaaatacttagatatgtatatatcttttgctaccaacaaatattaacgtctcacgaattggcttaaaagcctaagtcggagaaaaagatcactaaaataccagatccaagctcaaaagatatgtttctgagacaaaaatattacctcactgatgaatttgttcagattgttcttcatcagttcctgcagttgcaatcacctcagaagctccttcgatggacctcggggtacttttattgctatcattggcgctttttttgggctcttgtttatccaaagcactgtccgttgtcttcaaaaaacatttgtattcctctggttctttccccaaaaggagggtttttgactttaaaactggtgggttttttggggtcatttaaaaagacaaaaaaaccgccaccttggttttttgccctggtaaaagggtt

SEQ ID NO: 129344 - DNA, 791 bp, Arabidopsis thaliana columbia
  unsure (1)..(791): unsure at all n locations
aacttgtaacaacaccacattcgttgcacgcctcgtacgctgggatcctctatagcggncgcccgtccttttttttttttttttttttttttgatctttaacagaaagagacttggattaatttatattaactactgggggcgtgggctacaggatattattcttgtgacaataatacacgaaaatgttaccttttaattgccgaaccctattccggtgagaggaactccttaatgcaactgaagcgcgaggtctccgacaatcttggccatggacctatatgaatattcggcaactccagcgacatgaggggttattataacgtttttgaacttcaaaataggatcatttggatcaaacggctcaaaccacgccacattaatcccaaggcctcctaaatgaccggacttcaaattttggaaagctgattcattgttaataagaccacctcgggcaatatttacaaaaagagccccctttttcattgagcatatgaactccttattcactatttcagccgcttttttgttgagcctcaaacaaacaacgactatttcggctttgccagcgaatgtgtaaatgccttcatggctccctttttcataaactaccctggagtttgaatccaacattagaaaccagcccaaaatctttttgcgggttattaacttttcgaccccaaatgggtttcaaacccgtttaaccccgctcttttttccccatagttttcccataatccccaaagaataaagataacaggtgttttacccaaaacaaaaacgtggtccacc

SEQ ID NO: 129345 - DNA, 767 bp, Arabidopsis thaliana columbia
  unsure (1)..(767): unsure at all n locations
ataaacacagctatgacttcgtatgcacgcgtacgtaagcttggatcctctagagcggccgcccttttttttttttttttttttttgtaatgattaacgtactaacactatagcacgaatcaataaaacattattgttgcaacacaataacattattaggctcacaataaatattgacccacgcatatagacgatggctgttcctgatataagaagcaatgaaaattaagaacttactgtttaaataacacttattatcccatcaacacgtgtacaaaccctagcctttttgtacacttttcccggtcgacacaaatagcctttcgccggagcacaatgagcatccttcgaacatatacacaaaccctccaatgcacacccatcttttactattgacgcgtttcctttaattcctaggatctgatctgtccattcgctcgagaataaaccttttggatcataactatcttttactttcaagaatgcgggtgcgttgntgtactttctaatcactccatcaaacgccaagtttcttgtcttaccccaatgtggcaatgcgttatatttgaacaatgcaatttgctcgatttctttcaagaaatttttcgtagaagtccggtgttaaacgggtcttttagcttcggtaaatatgtttattgtcaaacattctatagggcttttcgggttttcctttttccccttagaaaaaagccgcggaataaatggaatagttgaaccattaaccggcaatttaagaaaataaccca

SEQ ID NO: 129346 - DNA, 686 bp, Arabidopsis thaliana columbia
ctattacgtcgcatgcacgcgtacgtaagcttggatcctctagagcggccgccctttattcactactttatatttttctccaatcttcttctactctactcttttttttcttcaaagggggcgaaataaaatcctctggcccccaacacacaccaaaaataattaaaacttagggggggtagagacgccaccccccttcccaaaaaaaaattttttcgaaaaaaaagcaagcggctccaaaataaaaacccacaatctccgactgcacccttaacaacagggacatctggtgtggcaaaaaaaacaaaacaactccgccaccgcgcacgaatccccccacatccttctagcgcccttatccgcgaaaaaatggacaaacagggcaacaaaaacaccaacaccctcgaagaagctctcctaaaaccctcataaaacagagttacacaaaaaataaatccccccggggtaaaagacgcttccacaacatgggggtaaaaaaaaccttcaccacaacttaaaaaaaaccctcttaaaaaaacacgaaaaccacacacccgcgggggaaagcgccaattaaaaggcgtctcgctaaaaaaaacaccgcgcaaacaaaaaaaaaaaaaagatcgccccccaccaaaacaacacaagagttcgggagccaccaccaccaagaaaagatattt

SEQ ID NO: 129347 - DNA, 301 bp, Arabidopsis thaliana columbia
gctattacgtcgcatgcacgcctacgtaagcttggatcctctagagcggccgccctttactttccaccttcttttttgaggaacaacaagaccaaggaacatggattgttccaacaagcacataacctgcaggcgagctccccttcacacacaaggtgcacaccttactacaatccagcttccatgcttcaaaataataagactctcgcaccacacacatcacgaacaaaaaacgacgaaaggtgcttgcttactagcaatcgcgcttcacaactcctctgtcaaacacatgcgaggcggc

SEQ ID NO: 129348 - DNA, 287 bp, Arabidopsis thaliana columbia
tttgaatgcacgcccccgtaagctcggatactttagagcggtcgcacctagatcactgaatttttttttactaaccaacgcggacattccgacaataacctcttggggggcgttccaacaaaacacaaggtcacatactcctctatgattacaaataagggcgttaatctagatcccactgacagctcctaatcctctcaatgaaagcagacacttaaaattctcagttaattagtaccccccgcccactccactaccctatatttatacgcttgttattatgaggc

SEQ ID NO: 129349 - DNA, 747 bp, Arabidopsis thaliana columbia
taacaacccacccagcttttcttcgcatgcacgcgtacgtaagcttggatcctctagagcggccgcccttgttttttacttttttttttctacgcagaaccccttcacaaccgctattttgtgtgaacgtctcaaaagaatgcggtctttacttaaaacaactcaacacaccaactatgtctccttccgctgaacacagatacatcgccagccaaagtgacaactgatccttagacaatggcgaccgccccactagcactccttggcctcagatccgcacactctttctcaatacgctcagaaatctgcaaaacctttcatttctcactaacggtgcatcaacactacagcattattttcaaagctcatgaaatcaccgacctttctccgccatggcttagccttgtcctaacccacaagcgacgaagaacctctctctctgaggtgttggattactctttcttgacaaccgtgccaataccatgtccccaactctacgctaatgtaacccattgcacacgcaccccgtaccctctaacgaaaatgatgtaaaggctcttagcaccagtggtgtctgcacagctcactgcgcgctgcaccggcagaccaagtgacatccttgattcagcaccaaaccgctcctacacctcctccatatcacatttccatcgcttaagctttcaggctctttatgcttcgcgacctcgcggcttccccggtaaattcggaccgtatctttcgccgacc

SEQ ID NO: 129350 - DNA, 893 bp, Arabidopsis thaliana columbia
  unsure (1)..(893): unsure at all n locations
tttttttgcaagcacgcgtacgtaagcttggatcctatagagcggccgaccttatttatctctatttttatcttagcgcaacatactggatcagaaccagagagggtggccaaggaccaaaagcactaaagccacagacccaaaccatataaatgatcaatcatacaacgagactttcatctccancataaacaccgaaccacacacaccacaatcagtcaaatcttgtcgttcttgctccacaaccatccaaatgccaaactaaacagaccttttccacatcatgaggctatctttatcgtcgacgaccaaacaataatcaaacgagcctcttaaaatacgttcaacaccgggtcatctgcgcggtaattcaaggacagacattaacactatatttcaaaccaacaataacaacactcggggactgcaaactaccttcgcctcaggaatcgcacgggccagcttctgaagatgttcaataaacacttgcaggctcacattcgccagcgaagattatgtctgaccccgctgacatctcgcttgcattggtggaagtcgccgaaggattcagcttaaccaataaaaacccttggcctggggaaccccatgtttggatcaccccacaaacctaaactttcgggggactgggaaaaccgccttcccggggacataaacaattggggggaaaaccctcttttggcgggaagccttgggcaaataaaaccggaagcaaaacgggccccctacagggtactcaagggccttgaagggatttcaaaaaacccccctgggttcggggccaatgggaaaaaatcaatctaatttcccatggggaaagaacaatcccaaccccctaaaaaaatatgggcactttttaattccgaaagcaaatc

SEQ ID NO: 129351 - DNA, 1025 bp, Arabidopsis thaliana columbia
  unsure (1)..(1025): unsure at all n locations
ttattttacagacacccagaaacgggggaacacaacgcgaaagacggggggaggaaacgacaaaaaacaacacggaaaacaggaacaccccacaaaccaaacacaacaaaacacaaccagccgggcaaaaacaaccggccacccgacaggcaaaaaaggcgcccgcaacccaacacgaaaaaaaaaccaaacgtagagaaacagggcaacaaacagaagagaacgacagccaaacaaaggccgacagcgaaaagcggacaagaacagacacacacaacgaaaaacacccaacaagcaaccacacgcgaagacccaaagcgcgggaaacacaggaccaatcgaagacataccaaaaaggaccaacagggggcgagcagacacagcctaaagccaagcaaaagaaggaaacccgcccaacacaaaagagcgaaatcacagcaaaagcgaaacaaggcccaaaccaaaaccaaacccgcagcgcgaccgaaaccagcaacaggcagcgacgancgaaaaaagcacctgaaaagaagaccatgagaacagcgaaaacacaccgggaagacagatagaaacaaaaccgcgcgacaccaacgagggaccacccggataaacgtacaaacgacagaagcggtacaaaaaaaagaaagaaccgcaccaaaggcgggaacacagagcacaaaaacagagcggggccggcacaattcgacaagcggagacaaaagcgcaaaacaccgtgcaaacaaaagaggcgacagacaaaggggccaacacaagaacgccaaatgacccaaccacatccggggcaaacccacacacgcccgaaatcacccggaaggaaccaggaaggagcgacaaaaggaacagaacacacaaaaggaacgacagcacaaaaaagggaggcgcacaaagacacgagaacggaccacataccacagagaccgccaaaaaaaaacgggaaaaacacccaaaacccccaaccaaaacagacaaaacaaaaaccaccacaaagagaaacaaaaacg

SEQ ID NO: 129352 - DNA, 782 bp, Arabidopsis thaliana columbia
gctatttattcgcatgcacgcgtacgtaagcttggatcctctagagcggccgcccttttctattaactttatgttttttatcgatatcacaaaacatcggactacttggttttttagtccaaaaacaagagccctgatacattattatctgcgaaaatgagaacatacgactcattaaaacacaaaagcgacccgcactgaaaaataaccattggtcaccccatatctaccaacagaaacgccctaatgatatatatcacatcagatgtgttcccgcggtgcaagaaccaggtgctctttcttgagcatagcgagtccactcatgacgtccatctttatatcctctggtttaacccctttaggcaaactccaaccaaatttgtaaaaaaggttagcgaaaggtatttctaccattgtaatcccaagatgcatgggcgggcacatttttcggcccgacctgaaaggtaggagccccaaatcttggcccttgaagtccactcctttgggctcgttcatgaacccttctggaatgaactccttagggctgtaccccccacgccggtgggataaccagaaaaaccgccccatgccgttcacactagaatagaagggcccttggcccagaaaaaaacaatactccccccctttatctttttggcggtttcggagcaaaaagactttcttcttggtggaaaaacacaaaataagggggggcattgaaacatgcggtgctcaagaagcccccgaaagaaaaagcttctcctttttgaatgggacctcgg

SEQ ID NO: 129353 - DNA, 462 bp, Arabidopsis thaliana columbia
ttttttttttgcaacctttatataatgcatgaataattgaaattcttggtttgacattttaaacttatatttgcaacacattacataagaaccaacaaatgagaataaaggcttttaatacaccaccgagcaaaaaaaagggtttaaatctgaaacacatccatgtaactccaaaaaaagccggtcattttaattgttagcttacgaaaaggagatctttactgcaactaaacacaggtgttgggtcagcaagagttataccgtaagggatcatccagcttatagactactgagggccaaattggtcagtttggaggtacttttttaaagattgaatggatagaggtagtgaatcaacattgatggtaagaaatgggcaatagttttttacgacaaactaggatgagagagttgtaacccgaaaacacataatacttgaggtaacaaaaaaaccccaaaatg

SEQ ID NO: 129354 - DNA, 787 bp, Arabidopsis thaliana columbia
  unsure (1)..(787): unsure at all n locations
aaaaccccccganaaaagagttgggcagaaagacggaccaaggagaggaacaatcagagaggcagcaccgggaagagcacaaagttttaggaaagggaagaaaaggcaaaaaacggggggaaacagaggaaaaagagaagacagaagaggggacgaaaaacaggaggggggaacaaacggggccaggcgaaaggagggaaaaaaagaagacccacggagaagagggaaagggagaagaacgagcaagaagggacaaaagccacaagaggaggaaggggaaggaagagaagaagaggaagagggagaggaaagggagggaaagaggagagaaaggaccaaggaaggcggaagaacaacgcacagcgaaaggagaaacaaagaggaaagcggacaaaagaaaagaggaggcaggacgccgagagagacgaggaggacggaggaagaaggggccaggaaaaggacagcgaagcaaaaagagaacgcaaaaggaaaaagagaaacgagaggggaaggaagaaaaagcgacagcagaggcaggaggcgaaaaaagcgagggaagagagaggagggagcggaaaggaaagaagagaagaaggaggacacaacaaaggcaggggagaaaggaaggagcagaaggaagaaagaaaagcaaagggaaagaaagagaggaaaaggggagacgacaacaagagaaagagagaaaaaagaaaggcaagcggggagaagaagcacgaaggaaaggaagggacagaccgaggaacgcagggcagggagggaagggaaaggg

SEQ ID NO: 129355 - DNA, 691 bp, Arabidopsis thaliana columbia
ctattacttcgcatgcacgcgtacgtaagcttggatcctctagagcggccgaccttttctttctcattttttatcttttccttttcttccttccccccaaacaaattccttcccttggtcgacttcgcaggggacacactttgctccaaacaatctctttttctttaaaaaaaaagcccaatggaaaacaccacccacccctaatttaaaaaattagacccccaaccgggaaaacctccaaacagattaccccgccggggtcggcaatacccttggctttactaaaagcctttctgaaccccactgtcactctaaagggttcttgaacgcagcaaccccccatcccctaactttttgctaaaccaatcccactgttttttaatgggccaaccattaaattttgtccccccaccgggaaaaaaaccaaagtcaccccgaattccacggttttcttggcggctttaagaaaaaaaaagtttcccataccccttaccaaagccatccctttacccattttttctcttaaaatccccaacatccacggcgggacaacccacaatcatttcggaatcaacaccgtcgtcaccaatttgctcgtccacatgggatcgaccccacccccaccacttttttggccgcctaattggcacaaacctcttttctcgggcccaggggggtaccccaaaaagcc

SEQ ID NO: 129356 - DNA, 775 bp, Arabidopsis thaliana columbia
tgaacgcgttcgtcctgctctggatcctctagtagcggccgcccctctttttttcaatcgattttttttttttcttcatctcttcatcctttctcttctttcctgtttggcggggaaaaaaaaacctctaaaccatgcatctctcttaccatcaacacttcttcagatacactctgcgtatccgatttgccccacccgatccccaaaaactttttttattattaaaatatcgaaccgctcaaagctaaaaaccaacatctccccctccccgaaacccgtatttgcctctaatgcttggggaaaaaattcatgtcgtgccaatcccaaaagcccaatagcggcttatgccccttcttcggttactcccgcccttctgggctaaacccacaggatcccaaccgtgagaccaacacccctccaacttatactttgatttcccccccaacccctttttaatgggccccaacaaaatctttttctcccactccgaagggtgggatcaatccgcctcttttggaatgaaatcgcccctcaacatctggggggcgcgagtaaacccaacaaacgccttttccactcccccccatccgccttagataatcgatcgctctacaaaccgtctcattcttctctacgaatccttttataaccatcctattgtcgcgtcttcttctaagcatcttctaaatacactcttcttcgttagtcgtatacggggaatactctcaatactctatccgtagagcactctcccctctcctggcggcagaatagg

SEQ ID NO: 129357 - DNA, 346 bp, Arabidopsis thaliana columbia
ttacttgaccgattgccaccgctgtctaagggctccccctttcacaccacgaaggttagcgaaaaaacctgtgacccgatcctggccaactctcactgtccgtaaaacttactcgtgcagacggttttggttaaggtaattcctcctattaatgtttctgcgtcctaccggaattctcccacgaagctgcgagtctaagctaacgttacgcccaatagtgggctagacatgcgcttagaccaggtagattctaccaggctctcttactcctcagccagtcacttcagcaattggaatgatctcccatttggacccccacccccggtgcaaacgctcgaaacaccct

SEQ ID NO: 129358 - DNA, 244 bp, Arabidopsis thaliana columbia
acacattttttgatgagccacgaagctggatcttagagggcgcccttatacacttatttttttttccactccacactcctacatgtcggtggcttttatagaatctctcactccccaaaaggggcccatatcattctcgcgcaaaagaattgcacccccccccaccaatagctaatgaattgttgggaatctaaccgaaccccgtaaacaataacctataccggacaacaacacccttattttc

SEQ ID NO: 129359 - DNA, 607 bp, Arabidopsis thaliana columbia
ctatgtacgtcgcatgcacgcgtacgtaagcttggatcctctagagcggccgccctttttttttttttttatattttttcgttttatctttatcttttttatttttggggttttttcttatatatatacaattcaacctcactcagttacataactcttctttacaaccacaaaaggcaagattatcgcccacgaaccaaaataccatccggaaaaaggccaaaaaaaagaacaacggggggccgccggccatccccccccaaaaaaagaaacaacaccacggcctacaataccgctgaaaaaaaaaaaacgggaaaaaaaccacacaacagggggaaaagaacaacacccacttaaaaactaaaaaaccccccgaagaaacacgggggaaacaacggccctatatcagaaaaaaaaaaaggcaccctttctaccaagagggattggaaagaaccccgcaacacagcggggaggtaaaaaaaagggggggggggggggcccacaatcggaaaaaagaacggggttaaaaaaaacaccgaagtgcagcggccaacaaaaaaaaaaaaagcgcggagggcatcctctcacacggggggtgaaaagaacc

SEQ ID NO: 129360 - DNA, 350 bp, Arabidopsis thaliana columbia
taaccagcatgacttcgtattgcacgcgtacgtaagcttggatcctctacagcggccgccctttttatatattcttacttttttttttggcacccgattctggactacacaccatttttggcaaaccacatggaagcaaaaagcaccgtctattatcaaacaacattgattacactactcaaactcacgacagaaaaataccaacaccgaccacgctggctaaacgcactaaattcattttgaattcgaatggcacatctgcaacacataaactccacttagatctatctcactctcggtcctactaacttcaacttctgtacaactaatagctagctatttacgcaaaa

SEQ ID NO: 129361 - DNA, 589 bp, Arabidopsis thaliana columbia
cgcgtccgtcagcttggatcctctagagcggccgacctatatttttttttctcttctatttttaaaagactcctttattcgtctagcgcaacgtgcattatacagcctttgaaggataattttattttgatcaaacacagatcgaaaggttcattaactaattgttaaaggtgctgcggaccctgacagggcctttgccggtaaaggccgcctgaagagtaaacatgacaaatgcgaccataccgagaccagagtgctttatcttacccagctttaaagcatccaacttctttggatcacacgcgagtcccaacgggccaaaatacccacccgggtaaatccgtttctctggatccagttcaaagttccgtcggaactcaatggatccgaccacttgcacctctttccatatcaacgctctctacgagaacggcaatggtctgcccaaataccatgatccttccaccaattccacctttcggggtcttgccatgcacatccctgaaaagccctttccgcgacggcgcctacagcgcccagcatgggcccactttcatggatcacctcactttttctgaaccgctggatc

SEQ ID NO: 129362 - DNA, 673 bp, Arabidopsis thaliana columbia
actatccaccagctattacgtcgcatgcacgcgtacgtaagcttggatcctctagagcggccgcccttttttttttttttttttttttttttttttttttttttttttttttttttgggggggaaaaaaaaccttttttttaccgcctgccaaagaattaaaaaaaccaccaaccttccttggccaatgcccaaaaagcgccaattccccttccaattcccattaaaatttcccaaaacctttttttttattttaaaaaagcccatttacccttatggttcccaacccttttaaaagggggaaccggccccagggttaaaacaaaaaaagggcggggtgtttgcttcaaactcaacttttttctttaaaaaacaaaaccagttttaatgtttttaccaaaaaaatacccagggctaaaacaagtcctgggatcaaccccgtttaccaattttcccacatttttttgggaaaacccccaaaaacccaacaccccaaaggcttccctccggatgccccaaaatttaagaaaggggcctttccccctccccaagggtagaaagggttctttttagggccttttttggcaaaacccaccaaaccattcttttacaaaacagccatttaaaggtttcgggggaaaatttccatttaggccccaaggaagaccccccag

SEQ ID NO: 129363 - DNA, 849 bp, Arabidopsis thaliana columbia
  unsure (1)..(849): unsure at all n locations
gtaccgcaccgtaactccggatgcacgcatccctaacctccaaaggctttaaagcgaacgcccggaaccgtcttggatagtgcattaacacctgcttattttcccaaggaagcatttattggcatcaaagaagcggtcattaaagaacatccatctcttagacagaaacatggtccatacccaaaggatgatgatgtccggttctctggcgctggaagggatgtggctgaacacacacatatttttctgaaattgctaaccaattagaaactgtataaaaactgattctttctccccataactacttatacaggcacactaaatttataggcgcatactgccttggaatactggctgataaggagttaacaacactcctaggaggaatcgacgaacgcaatacttttgacacactatgatcgcgagaatgataagcttgggtttttcaacaccaactggtttgagctattgacgagggtggctgcgaccaaaattttcggcacctacttcaaccaatttccccaaaaaaaaaccctaataacatcacgtccagagcccctccgtacaaagcctaagactaactcaccctttttaatcttttccaaagtcgcgttttcgccggggtaaggtaggttcatttaccccttaataaagggggtgcaaaaaatgaacggtgccacaaaaattcattgcccaattggaaaactctcaaagcattctttcaacaaagaaaaaactttgaatctatcgacttgggcccccttgggacntctttaaccaatttgaaaaagacgcctacaaggggttcactctttaacattgaacaatatttcttcctttctaaaacct

SEQ ID NO: 129364 - DNA, 538 bp, Arabidopsis thaliana columbia
atttccggggtcgacccacgccgtccgaaggaatccagtggcgcgggcgccgtctcccgaaaatagagcttttttttttcgcccgaaaaaacacgaataagaagcagagctgggttcagttctctcacgagaagcgaccagaacaagaagccagtgagctcgctcctcgttgctgaggaaggcggttgcgcctggcgagcgcaggaacccactatgataacccgcatcacgcttctgctcatcggcgatcgcggtgtggggaacagttgtctgccccttcgggtctcacatgatacctgcactccaaggtctatcaccacccttgggcttgccttcaagataacaaccgctcgacccgatggcgagcgccttaaatagcacattaggaacactgttaggcaagaaccccccggaactatccctacacccgctctacaggggagccgtcgggcattatgcgcttgctcgcgaaggtcacccgcctggaagcttattcattggaaccagcttcttttcggggaacctcggtaaacggagg

SEQ ID NO: 129365 - DNA, 1062 bp, Arabidopsis thaliana columbia
  unsure (1)..(1062): unsure at all n locations
cgtattttggggcgccccacgcgaacgcgtgtatcttatagggtgctcatccattctcaaaaaatggacttttttgactcgccctttagcttccagctgttaaatctccctcctccacagcgtctacgacgttgtcctcgacacgaacgccttactatacgaacctaaccggggattctcctccgtcaacacccaatctcaaaactcaattctcgattctagctccgcttatttgctcgctgatctcgtccaccttgccgagtatccttctcccgccggcggagacatctgtttttggcgctcatcaccctcgccctgtctttatcggttttacctcacccttgcccgatacaatgggtgtggcttaacagggagcgcctggcgcattgtggccttagcggcctggcttagaggccgtactgcagggagaggccgcattaaaaanctggctggtggttacaaaaaacccaccctgtgggaaacgcgcctttcccctgggaattagaccccctcgtttgggtgaaaaagaaaaacttcgggcatcttttttataagacggggtgtgtaagattatttcgcgcaaccctctggtcttcttcctcttcagcggggtggctccgggtctatttaaagcgggcggtgcccctctcatttagcgcgagtcatatggaaaaagggtagccgcctctcctataaattgcccccggctttggattttaaaatccggtttaaacagaaaatgacacgaatgggctttttgtaaccgtcactaacggggggagggccccctctctatgacccaaacatatacccccaagattgggcggtttggggtgtttctggggggtcccggggagttaggctcgcttaccatggccgttaaacccggctaaggagtttcctttggggaatatggaaaatatggggcgcgctccctgggttgttttcccagggggaaggaaaattcccccagattttagacgggaaaagggttataggcctaaaaaatttctctttaccgggctttcctctccggtggtaaaatctcttcctaaaaataaa

SEQ ID NO: 129366 - DNA, 1043 bp, Arabidopsis thaliana columbia
gccagaatttctgggtcgacgcgcccactagcctggatgctgatgaaggggaccctagctcaagagagcgcgtttttttttcaaggccatggcgcggcatccccgcatatgtaatgaccatatcgcatttagttatagtgtgtttaccaatcccatgtcacataaactaatggccggtttcttttcgccgttcagaaccggcgtgttgacatgaaaatttgattacctcgcggtcagtaaaagtttctacattggatttgtgtttttgtcgttctttcctcaagttatcacggttcaacaagactatattgttttcctagaaacgaccgtcttccatttaaaaatatattatgaataaataaaaatggggggacgttctaaaggacccaaggctacttcacggtgcatgcgaggttaaacctctttctatatggggacactaaaattcaattctcttggccaggaatgtatcacaaacgacatgggcctctggggtaaaaaccccctatctccttttgtctccctaatgtttaaaaatcagcctcgtttagcaatgtcacccattttattgcgctattattttggggtatccaaactcctagtgcgtcgattcactctataggccgcgagcagtaagtgggctctccccctctaccaacggtttttcttgtgggccgtttgtctcctcacatatcacggtttgtgttacctctctcctctatggataatatagggaagaaacttatgttagaaacctcgacctctcttataatatttcgggggctctttttatgatccccgagactataggtgggtgggtgtgctatcttcccctctcagtagaatacaccgggattaaatctatgatctattattgctcttattttacttaaaagaaactatattagttgcacacttacccgctcttacttcttatgaaacagaatacaaataatagtaggatctctccttcccttattaaagctctcctttatctggtggggccacaacctttaaaaatagttatccctctattttatggc

SEQ ID NO: 129367 - DNA, 998 bp, Arabidopsis thaliana columbia
accggaagccgggcacccagcgacgcagaaagcgcgcacgccacaggacagcagcggctttttacagcgcgggggcgcgaccgacaagggagggcagcggcgcagaacagagggctcaaaaaacccggtggaaaaaaccaaaagggggagacaaacgccaggaccggaagccggaggggtagaaggcaacaggaggaccccgccccccggggaaaacacgcgacagggaaacgaggggccaaggggaacgaacccaaacactggacacgcgggagaagcgagggaccataaccgctgcgaccgagaagaggaacgcgcaccagccgatgcaaaggacccgacaacaccatgcgaaaggaagagcgggcgggccggtccaagaaggaatcccagagaaaccggcgacgcgagagtcaaagacgaccgggggggcgcaaaacaacgggggacggaccacgacggacgacgcgcaacgggccacgacacccgcccaaccaaaagccgactagaagagcggcacaacccggtatcgaggcgacccgggccccacgcccaataggcgagcgtcagacagagagggggagacagcgaaaagatcgcgtggcgaaacatagaccgcgcgaataagagccgcacccaaagaaacgataacggatcgaacaacacgcgccgacccccgcaagagagagtggagacgccaaggagacgagacgcagaggcaaccaccgcagcacaagggtgtccaaggggaaccaggagaccactccacagaccgaaggccggggcagacgggtcgcacacacaacggagcgaggagaggaagcccgcgagacaccccgagaccgcgaaggcaccgcaagaggggcactgaggcaagcaagactaaagctattcgggcggaacaaaacatcgagcacaacccaacacagacaacccaggaattaaacacgcgcgcaaaagcggccacaaaaagagagggaggccgcagagtgagaaaa

SEQ ID NO: 129368 - DNA, 626 bp, Arabidopsis thaliana columbia
aaaatgagcgagagacgaagaggaccagagccgggggcccgcccagaggcacgcagcaagcggacgcgagcacgcgacgacagaggaccggaaccgggagaccgcacaagcaaagacacaggcgcgagcgcgatacagacgccagggacgagaacaaaaagcccagagcagcacaccccacaggaggagaacgagggcagaaagcagcaggacccacctagcacgacaagcgagagcgagcacaggcagagcaaggcccccgcacgagaccagccggcagccgcgaacagggtagcagcgagactaggaaagagagaagagggaacgcgcgcacaggggcacgtgccaccaaggggcagaccgcgccggaaggaggcgcgcagccgaaccgggaaacaaagagagcggacggagggcccggccggagggggaccacggaggagccatccccgggcccgaggagacaggcaacgcccgagaagaggccaaaaacggggggggccaaaaaaagggggccccaagaaaagggggccagcaacgggggagccgcgggcgcgccgaccgaagagggaacaacaggaatcgaaggggcaggaacgggaatccgacccgaaacgggggggggg

SEQ ID NO: 129369 - DNA, 769 bp, Arabidopsis thaliana columbia
gcggtaccggaccgggatttccgggtgcgcgcacgcgtacgcgtggatcctctagagcgctcgtccattttcaaaaaatggacttttgagactggacactagctatcagctgttaaatctcccttctgcacggagtgtacgacgtcgtcctagacaaacaacgccttactattcgaacctaaccggggattctccttcgcggacacccaatctcaaaactgaattgtagactcaagcccgttgatatgctcgctgatctcgctcaccttgccgagaacccttctcccgccggcggagactcgctttttggcgctcatcagctgaccgtgcttttcgttttaactcacctgccgatacatgggtgcacacggagcctgcgctgtgctcgtgctgcatagcctcgcggaggccacgagcgcgtgtgagaacacgtggacgctcgcggatgcctgtgggaaagagccgcctttagcggcgagagtgaccaggtcgctcggggccggatacgcgtactatgcgggtgaggtgccgtataacgccgttctcatgggaagaaaagaagattgacgggggacgagccctgatgacatttacccagctgggaatggggaattggggaccggggatagtgggtactgggcgggaaccaattaggcggtcctttgaggattttgagaaaaaagggcgggggtacctggggtatgtttctaaaggggaagggaaatacttccccaaaatttttcgccccgggagaaaaaggtgttaaacg

SEQ ID NO: 129370 - DNA, 681 bp, Arabidopsis thaliana columbia
gcgggaacgtcggagcgagcccgcgaggcagggagcagagagcggcgaggagagcgggaccttatgccgccgagcgggccagacggggagacaggagcgaaccgggagaacggaagagacgcaacaagaccacgcacgagacgagagacgcacggagggcccaagaggaagacggacggagcaaccaccgaccacggacgaagaacggcgaaagcagctgacgaccgcgacacggaagcaggggaaactagccgggggcagaaaagcacgaggtacacgagacagagggggaaagggccgggagccagcggagggggcgcaacggcggaagaagggaacgcaacgacaggggagagagacatcaaagcaggggagaggagaaagctgacgcgcagcgcgtggagcgatcaaaaaaaggaaggagaaaacgtgcgaacaaccacagttggcgtgccaggagaaaaagccacggacgagaacaagccgaccaaacaggagaaggacaagaaaggggaaggcacgaaaaacaaggagcgaagaaaagggaggaacgaccgggagcgcccgcccgaaacagggaaacgagcaggggaaggggcaaagacaagcacggcaaaggacgcaaaggcacccagaacaaacagggggcgaaccaagccccgcgacggggaaaaccggaac

SEQ ID NO: 129371 - DNA, 568 bp, Arabidopsis thaliana columbia
  unsure (1)..(568): unsure at all n locations
accatgatcttcgatgcgccccagcctaacgcagaattctctagagcggccgcccagctctatacttatcattatattcgcgcgctgaactactaacatcgcgtggttggggtggggcaccgggacattaagcctcacaatctactggataatccccaaactcattaattaggggtatgcgattgtggaagcacaaacatgtaggtacccggggaacgctccatatcctatatatgctactggactacagggccccaaaacttatatttggggctacagagcctaccaatgccatcgacatgaggtccggcggttgagttatggaaaatcttctacttggacaaacgactgtaacccgaagaaagtggcattgatcatctactgtgcataatctagatggtggggacgcctgcaggataggaaacccttgtgaatgaatcctaaaagacaacattacttcaacgtctgcctcaagatgcaaaagaaattaaccccgttgtggaacaaaagaatttttttttcagcaatagtccccaaatggcccacagtctttttanagggccacctc

SEQ ID NO: 129372 - DNA, 1049 bp, Arabidopsis thaliana columbia
  unsure (1)..(1049): unsure at all n locations
acgcccggggcgccgccacgcgnaacgcggagatacgaacaaggggcaagcgatggaggaaacaaatttgatgggtagaaaatatatgctaagaacctagacgataccgacaccgatgagaagccgcgcgagaagcacgccgaatgtggaacaaacacctcaagcaaggtaatgcgggaccctaaaggtactagcaaaggagcaagatttgatggctcgcccgccgccagagaagctacaagagtgctgaatgaaatgaatgggaaaatggcgggaggcaaaccgaagaaagcagctctcgcacagaggaaagaagaaaggacggctaaagaagaggcacagctcacgcaaaagagacctgctaatacccccggagtggggcccacgaatgccaacaagtaacaggggggcggctcgcagagacccggggacaaccagaaactcatttaacagggacaacagggaccccttcccaacccaaattcagataccccggcgaacccaagaccaccgcggacatagggggggaataaactccaagaaccctcgcgagaaccgtagggccttcctctctcgggtacaccatggagagagagcagccgggcgccgctccttcactgaaattcaggcgctcgtccgaacaacaccgcgaatgtgtcacacagcaccgagagcgcccacagagggcgcgcgcagagccacacagaggggtgtgcccacacaggagaaccccaagggggtgagggaccaaaaaaaccgggcctgccaacgggaaggaaccgagggacccaccacaggtcacaccagttcctaactcacacaaacgcgggcgcaacgggccctcaccactggcggggcaaaaaagacggaatgaccaccgcagggcaccagggggcccccaggggccccccgccggggccgcgcgggaaaacacagcccaaggcgggggcaaaagccaaacgacagaaaggagtacccacggcggtctcataaacaacggaaaagggggggcccccccacaaggaaccgcaaaggcccgcctggaaaaa

SEQ ID NO: 129373 - DNA, 804 bp, Arabidopsis thaliana columbia
aacctccggggcaagccacgcgcaaccaaggaccaaacgaaacagctcacgatcagaataaaaaaatagtaatttatacgctcagagacatcttcaatggcgaagaaagctgcgttgattggaatcaactaccctggaaccaaggcggagctacggggatgcgacaacgatgtcccgagagagcacaaatctctcgtggatcggctaggaaactccgagacaaacacgaactgagctgattgatactgacgagtctaccaccaaacctacagggaagaatattcaaagggcatcggtgaatctagaagaaaccgctaaaccgggtgatgttcttgtcgaacattacagcggacacagaacgaggttgccggcagagactggagaagacaatgatactggctatgatgagtgtattgctccttgcgatatgaatctcaacaccgatgatgagtttaaagaacctggagagaaaagcaccaaaagaagcacacaatacaatcatctcacactcttgacacagaagcggcctcaccgaaaaaaacaaaaagcacaacggacacaaccaccaacaaaaagccaaaaaaagaatccggaggctcttcaagactaggaaaacaaaggcttgggccaaaaccaccaaaaaaacacttggaaacaaaaggaaacacccatcctcaccaccaaaacgaaaaaagaactaaaaccaaaaattaaagaaccttaaaacctacaaaaaagggggcaaaaaaaaacacaaggggagaaaacaaaaacttaaccgccccctaaaaaaacatctcaaac

SEQ ID NO: 129374 - DNA, 852 bp, Arabidopsis thaliana columbia
attctcgggccacccaaccgttccctaagaaaccttcgcagcgctcccctgtttcgccctctcattccttgtttgaaaaaggcggagactctctccagttattttgctcattcatcgatgcttagagttcaaaatggatgatcaagttcagcaccccactattgcgcagaaagctgcccggcccttcatgcgttcaagtgtttacaaggacgttcaactgggcttccagaggccttctatgtatcaaagacatgcaacctacggaagctactccaatgctgcatttgaatttcctgcgacatcccggatgctggcaacaactgcttgtcccgtgtttgtccaaaccccaggagagaagggggtcactaacttcgccctggactttctgatgggtggagtagctgctggcgtctccaagactgcgggtgctgctatagagcgtgctaagctttttgtccatagccaggatgacatgattaaagctggctggctttgcggaaccctacaagggtattggtgactggtccggcaggactagttatgaccaaggttttggttatttttggagaagaaaacccctgccaaggttcaccccggtaatttccccccatcctgggccttgggaacttttggcctttccaagggatcttccttctcaaggggaaattttttttagactttttaaacaaaagggtgaccaaaaggtttggagatttcccctggggaaagcggggcctccgccttgggtcaacactttggagcccttttttggggagggcgatccctctcttgtgggggcgcctttttttttcccctttccttggtttaggagtgtgtcctcttccctttgaa

SEQ ID NO: 129375 - DNA, 784 bp, Arabidopsis thaliana columbia
ggccaaccacgcaatcttagactctgcgggaaagctttattttctacgcccaaacggtcaccatacaagagtgtgtgagttactatacatctgaccactagtcgaccggaactctgaggattctctacatgacggcaaagccatgctcaagaaatggaacttgaacaggacacactggaaattatcggtagcaaatactctcgccagctggaggaaggattactaaacacagccgtcaccaatgggaatctgaaagcgatatcacaataaacctacaccacaagccctaaagaagttagaatggaacagaggaagcagaccaatctccatagccaacgttgaatagttctgcccgaactagcctcaatccaagaagctattgatgccaggactaaacgtagatcttaactgacattggagccttacaagatagagctgaccactgacactcctgtgagaccaccgaaggtcatttaaacccggttgcttcgattgaactgcataccaagtcaacacatccggcgcgattccgtccatggccaaaacgaacaaactgctaaggacccaaattttggaggccgtcaagatcagacaaaaatccttgataaactctctgacagcctacatacattaatgggtgaaaacttccatgaaactccgactattcgtaccgacccaacatgtcatccttatcgacacaggccctcctctgcccactgagacacccaagaaaaagagcgctccgtccctatacgacatttcactgtggcgagcttccgggtct

SEQ ID NO: 129376 - DNA, 1187 bp, Arabidopsis thaliana columbia
gcaataccgcaccaaacttcgatgcgcgccacccgaacctgatccttaaagtagaccaaaagaagaatctcactttctataaaaccacagagactggcatccacaaatgtgtaagatctgttgaagctcgaaactattgccctcttcaaaacgcgctaaagcccctgctcctactcctaccgttcacttctactacaacaacttctcactcacagtcgcaacattctgtccccgacggctaatacaaattacactggtgacaaacccccgtgaaccccagaacactgaccatccacacttgtttggcaatctcctccaaccctaacctggattcaacctaaatctactccacttcgcatatgagatattggctctaactctattaactacatctcagctttttgaaatcgctcttatccgctatactccgtcgcacgtgtcctcttacaacctctaacgtctatccctcgggataaaagcagtgtactcctcttaacccctggtcggtaagactccctcaatcgtcaccccgtagggtctccacctgctaagaacgcctttctgcaatgtaacgtccaaatccccccatgtgtgcacccactaaaagacgacattgcgaactagaactgtccaacaaccagagagcgttcatataaatttggaatccaagggatcctctgcttcgtgcaaaacatgtagtacaaagatgtttatcacagccccccaatcggggaacacctccaaaccaaacctttcaacaccacttcccgcaaaaaatccgagtggtacatacacaccgcaattccttccaatctaatacctcggaattcccaaaaggctatatgatatctcgaatatcctctccaattgaatatccttcacttgaaaggtgatcccatcctcccactgtactacaattgcccatgtctctttttaggagaaaacggaaatactccaaccgtgatctcccgcttttggaacaatcacctattacacactctggggattaccgaaagccccatactatccatatgaggtgcgatctcccccatcgtaaacggtggggggaagccaaccctgcgcgggagatgagcaatacggcacgcctcacaaaagttactttgtggcccaactaaaagagtgatatcacatttatacatgtctgtcctcgcctactaggaaagcgt

SEQ ID NO: 129377 - DNA, 828 bp, Arabidopsis thaliana columbia
cccgaaattccgggtgcgacccaacgcctccgcccctaacattttggctgcccctgtttcgattctcgagagttatcttttttgagttcggacgatgagagagacgagaaggagctgagtcttacctctcctgaagtcgtcaccaagtacaagagcgccgctgagatcgttaacaaggcgttacaggttgttttagctgaatgcaaaccaaaagctaagattgttcgtatctcggagaaaggagactcttttattaaagagcaaacagcacgcatgtacaagaattctaagaagaagattgagagaggtgttgcgttccctacatgcatttctgtgaacaacactgggggtcatttttcaccgcttgctagtgatgagtctgtgttggaagatggtgacatggctaaaatcgatatgggatgtcatattgatgggttcattgcccttgttggtcacacacatgttctttaagaagggcctcttagtgggcgtaaggctgatgttatcgctgccgcaaatactgcaggtgatgttgctctaacgctcgtacggtctggaaaaaagaacactgatggaactgaagcttttcagaagggtagctgcgtcttatgactgccaaattggtggaaggggttcttttccccaccaggctgaaaaccagcattgtggaatagtatgggcaaaccaagggttggtggccttaagaggtatttcccaaccccctggaaaatccaacctgttttgacccgaaaggtggggttaattttggtaaggaagaaattgtgaagattctttatgtggccatttagggaattttttgtggggggc

SEQ ID NO: 129378 - DNA, 616 bp, Arabidopsis thaliana columbia
ccccaccggaaattccgggatccaccccacccgtccgaagctatcccctttgggtggcagagagaatgtgactggagatcttttgcaacacctcaggtttttgataatcagtatttcaaagacttggtttcagggagagggtttcttaactctgatcagactttgtacacgaatctagtgaccagagagtatgtgaagatgtttagtgaggatcaagatgagttcttttggctcttgcagaaggcatggtgaagttgggtgatttgcaatctgggagacctggtgagattaggtttaattgtagagttgttaatagaaggcctattgatgtattgcttgtatcttgaattatcattagtaaagagaagaaatcttaattcacaaaaaaaaaaaaaaaaaaaacctctctcttaaacaaaaattttataaacaattttcttcacaaactacgggtggggactaattttaaaaacaacaacggggtgggtgttttttaaagaaaaccaaaataattttccgtcccgggtgggtcagacaataaatgatttttttttattaagggggcgccccccaaaatcaaattattaactcatggctgggcgctcgcttttaaatt

SEQ ID NO: 129379 - DNA, 635 bp, Arabidopsis thaliana columbia
cctgaaccccacgagcgggcgcacgagggaaccggcgagcacggagggttagagcgcagcagagggaaaaaagacggagcacaacacgccgacgggccgagccgcggaaaaccgagagacaggcgcgacgaaaagaaacgacgagagccgaaaacaggaagaacaaggaagggccaaacgggacaaggcgcagcgagacggcaaaaacaacggaggaagccaagagccaaacggcgggggggggcccagaaagacccaggaacaaaaaggggaaacacgggaaaaagcagagccccgaggacacgggcgggggcctcaacaagggcaagccaacagggcccgagctgcactataaacaacccgccggggaagaagggacaaaagaacccggggcgcgacccccaaaggggagaaaccgagcggaagacgacgaacacgaaattacgaaacagaaacgccggaccgcgcgaaaaagaggcccgcgacgaggcggggcgcaggcccaaaaggagggggcaacccgaaaaggaaaagagggagccccccaggcccgcgcccaaaagaaaaccacgggggccgaccgaaaagagagggaaaacggccggcacggggcccgcgtgagcgaaagggcgcac

SEQ ID NO: 129380 - DNA, 245 bp, Arabidopsis thaliana columbia
gggggcacgccacccgccgcacgagacacggagagagagaggccacccggagaagacgacgaaagcttggacgggcaccggaagacgggaaccagcatcagggaagcggaccccttcaaggcggcggcaagcacccagcgccgaggaaaacaggaagcggccacatgggatcaccacaacacggaagcgccacacaggccgttgacgagaggaggagccccggacgccgcgacagcgagaaaccc

SEQ ID NO: 129381 - DNA, 830 bp, Arabidopsis thaliana columbia
cagaacttcggtgcgacccaccgaaccaagaaaccaccccagcgcccactcccaaattttccgagaatttttatactttttctggtccgatcgataacggagattcgttgaatatcgcataaaaacaatcacatcagaacacctgtcccatatgttcctgcaacttcaactgccgcaatctagtaccaaagatggcgctctgatggctattgatatggctccgccccgtggatcaaccttaagattcaagaacaccgatgagagtgaacgctatcggtaagcatcctcttcgtggtgccagcggacaaaccagacacttacaggagactctacggattatagatgagccaaccctgattgataacatgtgggacgatggtttcgtgtccgggaccacaacgagattcccaacctttctgacccgtagtgatgtacaaaacgccgccaacaacgttttatcactatgcggaaccacccttgctccttggaggcctccaaactgggaaaagtaaccttggaacggcgccaatgattggaagaagttttcaggacgatcgtgttcccactggacaggaaaacatttcgttgggcaatttccccaagatagcggcctccagacctgatcttttgcatatgggggtctacctccttggagaaaaggtacgcaccacacattcttttaaccgtggccacagattctgcttatttcaatcaagacgtggtgcatttcgatataaagcttccactacctttcctattgagcgcctcaacataagttacataacactaaaccccattacctctcacttatggacagacacaccacaccc

SEQ ID NO: 129382 - DNA, 729 bp, Arabidopsis thaliana columbia
tttgcagtaccgctccggaattcccgggtcgacccacgcgtccgcagccgcgctttttggccgaggaaggataaagagagacgccatgttaagaagacctgcgaggtgttaccgtcagatcaagggtaagccatacccaaagtctcgctactgtcgtggtgtgccagatccaaaaatcaggatctacgatgttggtatgaagaggaagggtgttgatgagtttccattctgtgtctcatttgcgtgtcatgggagaaggagaatgtgtcaagtgaagcacttgaagctgcccgtattgcttgcaacaagtacatggtgaagtctgctggaaaagatgcttttcatttgaggattagggttcatcctttccatgttctcaggattaacaagatgctttcgtgtgctggagctgataggcttcagactggtatgagaggtgcttttggtaaagctttgggtacttgtgctcgtgttgctattggacaggttcttttgtctgttcgttgcaaggatgcccatggtcaccatgctcaagaagctctttgtcgtgctaagtttaagttccctggtcgtcaaaaagattatttgttaggaagaaaatgggggctttcaccgaaagtttaaacaagaagcctggactttcaccccaaagtttgaagggccaaggaaaaaaggccgctgggttggtcccccttgaaaggggtggttccaaacccgcctttaagagtt

SEQ ID NO: 129383 - DNA, 759 bp, Arabidopsis thaliana columbia
atttccgggatccaccccacccgtccgaagggggcatttaaaccggctcgctaaaagatcgagaagagaggtttttcaaaccctagatagtccaaaggctgttgtcatcagccattttctatgaagtctaaagcacatacaaagattgacaacctggagggactaattcgaagcagacatgagagaatctggcttcgagaaaaacaatggttgggatgacggaagctggagaaaagcgagatgcagctatgctatctatatcgtatatctatttatgtattgtgtctgagtggtgctactacatacattgcggagaaatgtgttttcttgagtttattaagctattgaaaagggagatataggaagaagaataagtccttttgtctgtaacataaaccctataggggttcgaagtgtagggtgtcctatgaaatgaaaaaagatcactcttgtaagctagtaaaagagtgataaaagagtgggtgataaaaaaaaacaaaaaaaaggggcggccgctttgaaggatccaacttttcgtacgcgggcatgcaaattaatacctttgttataggggaccgaaaatttaatttaccggaaccccgggcttccacccaagtttattggggaaaaaccctgagagcccaccctcaactctaaagggccctttgcaactaaaataatccctctttttccccacaagctgggctcttttatacaacccaaaaatgaggcccccccggccctcgaaatagcccccct

SEQ ID NO: 129384 - DNA, 764 bp, Arabidopsis thaliana columbia
gcagtaccgcgccggaattcccgggtcgacccacgcgtccggtgttacaggttgttttagctgaatgcaaaccaaaagctaattattgttgatatctgtgagaaaggagactcttttattaaagagcaaacagcaagcatgtacaagaattctaagaagaagattgagagaggtgttgcgttccctacatgcatttctgtgaacaacactgatggtcatttttcaccgcttgctcgcgatgcgtctgtgttggaagatggtgacatggttaaaatcgatatgggatgtcatattgatgggttcattgcccttgttggtcacacacatgttcttcaagaagggcctcttagtgggcgtaaggctgatgttatcgctgccgcaaatactgcagctgatgttgctctaaggctcgtacgtcctggaaaaaagaacactgatgtaactgaagctatgcagaaggtagctgcagcttatgactgcaaaattgatgaaggtgatctttcccaccagctgaaacagcatgtgatagatggaaacaaggttgtgcttagagtatccagccctggaacaactggtgactaagtggaatttgaagagaatgaagtctatgcaatagatattgtggcaagtactggtgatggcaagccacagctattataccagaagcaaacactttttacaagaaagatgaaagtgttgactatcagttgaagaataaagccttccagattcataaccagggaaattaaaaagaacttgccccg

SEQ ID NO: 129385 - DNA, 897 bp, Arabidopsis thaliana columbia
  unsure (1)..(897): unsure at all n locations
accggaattcccgggtcgacccacgcgtccgctgagatgcagttgtactgtcacacctgttgccacgcctttttttttttaggcgtagtcgatgaagtctttcagactggggcagggtcttgcgaaattcggcgctccggctaggaactgaagttttcgaataagaattttttatatcaggtcaacagattttggaaggttacatcaatcttgaataacaagtctggcgtggaaggatttccgccgtgttcagagtntttatgagataaatgcaacttagtatttgcatcaggtggtcacgtgtgcttctttgacataatgcggtatttgtccacgagaatcctgtccaacttgaacttttgagagggacttctctactattttcaggtctaagcctatctcttgtctagtatattttacactataaatcgaaccattttatctaggatcatcggcattagaacttttatgtaaggttgcgttctgcccttttaaataagttactcagaaatcctacgggcccaatacttagctctcttatgatctttgtgtctatggggcgcacatgtgccccttaattccatgagatccaacgagcaggatgtgctttggaacgaaccttgaaagtagacttccatggaataaacaccgtcctatctactctttcccatcacaagagagggccccctctagggaggcagaccttgcttttcactttcaccatcggaaagtcggcgggcatctcttttgtcgatttattggagacaattttggcatttttgggaaggccacaaaaagggggggaatacatactataaaagggagtcccggggaccttgtgggggatacatccagagctgtaagcccaaaaaaaggcgaccacattgggggtgtccc

SEQ ID NO: 129386 - DNA, 598 bp, Arabidopsis thaliana columbia
gcagtaccgcgaccggaattcccgggtgcgacccacgcgtccgcaggtatgctcttgggcgggcgatgagaatgtgactggagtatctatatgcaacacctcaagtttttgataattagtatttcaaagacttggtttcagggagagggtttcttaactctgatcagactttgtacacaaatctagtgacgagagagcatgtgaagatgttcagtgaggatcaagatgagttctctacggcgtttgcagaaggcatggagaagctgggtgatttgcactctgggagacctggtgagattaggttcaatcgtagagttgttaatagaaggcctatcgatgtcttgcttgtatcttgaattatcattaccaaagagaggaaatcttagttatcaaaactacacgagcgaggctgtgattgaagagctaaaatttcgcgaatcatttgtttaaaaaggatgacgagggtggcttgatatcattccatagcgggcgggcacgttccatgaaaggcagatctttttggacctgtacgcccgcaaaaatgttttaatagtcggggggccataaaaaaaaaatggcaattgggccaaaatatttt

SEQ ID NO: 129387 - DNA, 762 bp, Arabidopsis thaliana columbia
agcaataccgcacctgaatttccgatgcgccccacccgtacgcatggatacgaacaaggagacaagcgaatgaaaccggttgctttttttaagctctaacagttgttgctatgctgtcagtggagacaactcttcttcctgctaggagtcaacccagagaaaagaagaggaaacctgatgaagattctaatctttctaatggatccggatatggagagcacattcaactgttccagatcggccaatcttgggaccgtactaattatgatcctgtatggtgcaaagagaacggtatgcaggtgcgagggatggtgtttgtcaaagatgttagaagacagctatgtcagattatgcagaaaatattcaaagatcgataggaagttggggccatatggtaggaagagttcaagccgggacgactaccggaagttgaggaaaggcctatgcagtggtaatgcaaaccaaatggctgagagaatgcttggcacaatggatgccggactcttagtttcagtccagctagggaagtgctcccttatctgtttggaagcccaccatgactgcatgatgcctaacttccaatgggaccatgagcttgatttcccacacaacttgccgttcaagaccgaaaggattggggccattaaattttggccatggggtggcctcccccatccaaaaaggaaaggtgtccatgaaaaccttaaaactggttcaggaaaatatttctaaaacgggtggggcctccggggcttccccttt

SEQ ID NO: 129388 - DNA, 738 bp, Arabidopsis thaliana columbia
cccgtaccggtcatgtacttaaaaaaagacgccaaaggggcattccgagaatcgtattcgggacctcttgcacccaaagcgagaatcataccactagaccaaatgctgtatttgaatgcccccactgaagcattgtgttgttgtgtaatcctgaggaaaagagaattcatgcttcactccgatattacaggaaattaactcctgggggcttgtttaccttttgagggttctattcgtgatgaagctggcaacatgcattgaagctaagctgcacaagggaggtgtacgtgatcgcctcattgaacatgtaagctaaggataaattgttgtgtgcgaatcaacagagagagagaaaagggcacatcaaatacatggacagagtattctgtggacgagctagaggcggttctagacaaggcagcaatggtaaacaacaaaaccgagattatagcaatggtgaacaaagcttacgtcgatgaggttgaaagagggaggacaatgctggatctggttctggagagtttttgagaaggagagggtgctcagccgattgttgaccatctgatgctagcgccagcggatcagacttactacgatcgatgcctcttcaagaggcttccctgttacaagatggatcccgatgggggtagcttggagggagagaaagtcattatgcaaaagatttagtgaatgtatgggggagacatattgctctaaacgtctcagcgaggtctattt

SEQ ID NO: 129389 - DNA, 690 bp, Arabidopsis thaliana columbia
  unsure (1)..(690): unsure at all n locations
agccggtaatttccgggtgcgaccccacgcgtaacgcacgaaatacttgtaaaactggtgcctccggttgtgtgccgaaactttttttgtctgtatgggggatcctctggtttaatgggtttgggaagaagttcactctatttagtgtttgaaactttgaaaatttaggaaggagttttatgatactgattaccttgtgttgaggatggagcttgtggctcattgtgctttgccacgacgcctttgtttacacgaattcaactctagttggctacacgccggatgtacaaaacccatcacctcgttccttttacattctgaatttcactggggctagcattcctcgnatgcaactgaattgtctaagctttggcagagggattctaatctattcacgcacgggtatcacaagaaggccaccttccatttacaaagctgttaatatagagattctggaacggttttccggggttcctactgctcctggttatgccatcttagacacttgctttaacctacaaggtatgaagacataagcattcccattatcaaaatgatctttcagggtaacgctgagctaaaagtggatgacacccgctgggcaccacttttgtcaaggccctgaccccatctcctagatttgctttcggccttttagcaaaggtcctgggctttgtatgaaaaagatgc

SEQ ID NO: 129390 - DNA, 754 bp, Arabidopsis thaliana columbia
tgcagtaccgctccggaattcccgggtcgacccacgcgtccgacgagatgcaaaaaaactgtgatgcctgtgaccatacgtcatagttttttggctttgttaaaaaagtgattatgaattttggaagggaatggaaatttgagcgcttatgcaaggaactggattatgtaaatgaaatattttcatcattcaaagactctcgagggaaacagctgagacaagctgcttatgcgcgctgctagtttgaaaagtaaatgtgataggactatctgaagcttgcaatcgcatatgggggttcattgcaaactgagatatctacactattgctgaaactagcgcacactgcatatactaacaggcaaatcccaggtatgataggggaagttctagtcacgacacggaatgactgagatcggcgtgatgagataacccgcatgatcagctgaaaagggcatctagcgtaactgatgcatgctacagatacaggcaagtagaaatatgatgcaaaggagatggagttaaaaaggggatcatcaaacgaacctttttacgaagagctaagatatcttgtgagaatgaagcccgcataggcagatatgttccataggcgggccgattatgcactaaaagaccggaaggactggaactaaatagcatagggagaaaggaaaatattgaaaagaatacattcttagaatggtgaatttaagtatggggggatcctcatgacaaaaagaagtaggagggactagga

SEQ ID NO: 129391 - DNA, 815 bp, Arabidopsis thaliana columbia
ttccggggccacccatccctacgggtgggaaacgctaaaagaggacaaccaagaatctggaagagcttttttttaacatagattctatacactgactttgaatccaagacagggcaagaacttcttgggccatagatcattctatgagtgatttaactctacgttcaggttctggtggtggggaatgtaattgatatttcatactcgacgagtgcatacactacccaattattatatccgttaggggttattggagaatttataagtgtaatgcagcgcttttttaggaagaaacttcaaacaatactcatcaccacaggtttgcgactaaacgcatctctcttcttttctactgaactatccagatatctttattgtgctttgagattgaaagtttacttatctatctttagaacttgcttaactcttccagctttttcatgggcggccgttctattaggaccaagcttcccggcgcgagcatgcaatttcatatctgttcctttaggccacctaaatttaacttatatggccgttgattaacaacttgggggactgagaaaacccttggcgttaccccgagttaaaattggctttggcggaccaattctccctttcaaccagtttggagtctaataagcccaaataaaagggcccgcaaccccatggtgggtcctttttaaacagagagagtgtgtgcgtcacacaccccatataaatagcgtctcacaacggtggggaatcgctccgcacccttttgatcgagcgtgtggtcgtcctatattttaaactacccacacagaccttcgtgtcta

SEQ ID NO: 129392 - DNA, 1033 bp, Arabidopsis thaliana columbia
tacacggagcctggaatcttccggatgcgaccccacgccgtaacgcttggtattctcaccatgagacgtcctagagagggagagatgattttcaatcatggctatgatgatcggatctattcattgaggccgtcccgttagtgaaccgtcttcattccgacatccatatgcctcattgtgatgtggtattagcccgtttatttcacggactcttttggctactataccataattggaccaagtcctcgacctccatcggaaggcacctgtaccaactgaggctaggtcttgcctagcttctccggaaaccttcttcgtcagtgtaagctagcttttggtcagatatcttatgcgactttagattaacgcactagctccatatactatccacgtttgctctatggcttgctattgcgcaatcttaacctattatagcacgggtctcaaaactttcccttcggatacccctctcacattttggcctttagaagaggagaggccttccacacctcccccggtggatggtttacgcaaaggactttatttatattgggaatattcttttaacaataataccttagttcaaaagccaacgcccgaatataattataaacctattttattaggcccccgaaattttaggggaacgctttctcctcattttaataaccaatcggcttcttatttggaagacataggagtgtacattttactaccccccaatttggacgcaaaaaaacccgacaaattgttagggtattttttccggcaacaccggaattgagaaaccccctatctacctatgggaacgtggatcaaaggcccctcaccccttggacctttaagtttggaacccctaattaaacgggaaaaagcaatcaaggttgtgaaaaacccccagggggcccttttttacctttggggaaggttcaaagcaataaagaaacccttttaagggggtttttatcccaaattggggggctaaactccaaactgggatcatttttttgaaaatcctttgggcggttttccc

SEQ ID NO: 129393 - DNA, 744 bp, Arabidopsis thaliana columbia
gcagtaccgctccggaattcccgggtcgacccacgcgtccgcaccaaatttggagactgtgattgagcatgagcgtcagaagttgatgaacaaagtctacgaaatcgaggatttcagattcgaggatctcgaaatggagacggagaaagataaggaaaggatgatgacgccgacgacgagaatgtcttattcatctgcggcgcctccgtctccatcttcggcttcataatacgctgcctcctctctcgctgccaaggcaattagagcatcttctgcgcatagagactcttctctatcttctgcttactcgtctccttcttctgctcctgatcccactcctcccaaggaggtgaataaggcttatgagtatacttctatgaagagtttgaatgaaccaatacgaggcttttggggaagtttagctagttaagctaaggcttttttggatgaggatgagcctaatcagttgcctcaaagtcctaagagaatggagcatagcatacacttctgcgacaactttaggaactaaaggagctggtccagactggtaggaaaagcgagaatccttcattccagagaagattaaatgccatcccttttattcggtgaaattacattggggggccaccatttgggaactggattgttggaaggaagggttatttactaggctggcgggaagaaaattctgaccctgccaggggccattctaatttctaaaaggaaaaatctccccgtttatta

SEQ ID NO: 129394 - DNA, 123 bp, Arabidopsis thaliana columbia
gccacgcgccgtcgagtcaaagagagggcggcaaatgctataactaccaattttttttatcatggggagcgatgagcacacccgaagtgcttgtggaggatggtggtcatgttatacataaag

SEQ ID NO: 129395 - DNA, 1098 bp, Arabidopsis thaliana columbia
cccgccggaattcccgggtcgacccacgcgtccgaccccttgttatttacgggtctggaatttgccaacttcctttttttttctgagagacccgaacacacgcttcctaaaggtgcgccatgagctgcaagatgaaacctcatacacgttgcagaatggagaaaacacatgctccagatgaagatgtccggtttaaccggcaacgggctctgacgattattcgtacattaggcccccccctgctcagcttaggcaaataccataacggcctccaggcggagtgggggtaaggcaaacggccagggctaaactctgtatcttcccggctagaggggtcgttacttttgcccagcccttgtgttatccttagcctgaactagtcaggaaaaaaaaacgtctttgcacggtgtgatctgggaaacattttggaaattttgttggggcgattgtgaaaatattgcgattctcaaaaatatctggagagtgggttactaacactggcgatttctaggtaccttagtgaacaatggtggagggggaaacctactcttgtgccgcgtgaggtttactataaaccttttcgaccttattccaccccgtaactttttgagcctaagtgacgtcattagaggccgcccgccacgaatagacattggggttccctcacccaccgaaaattcgcccgtactttgtcaagaatagttggcaagcaacccgtattaaaactcagaagaagcggtgtgccacagtacaatcaaacgctttgggacctcaataaggcagggaaagttcccaggagaagaactcattgggccctctatggaatttcctgaaaaaggctccgcgggccaggaatcctttttttaaagtaccttttggcaggactctttgtaaccggagcgctaaacccccttgatcaaaccgattaaccccttgggtaaacgcaaaataatggtgtgaacctagcggctgtgtttcgggaccttttaaacaatagggggggaaacaactgtcgcggcattcggtgtggtgagtcttcaccgcgcggtccccctctaagggggcccatcagggccggtggggtgcttttttcgacgc

SEQ ID NO: 129396 - DNA, 731 bp, Arabidopsis thaliana columbia
gaattcccgggtcgacccacgcgtccgagcacgacgactctatagctaccagatttcttgatccgatctttatttttcctctgcccttgaaataagatctcttctcgaatatgtgctctacaaattataatctggcaattcgaagatcttgtgggtcactgacacaaacttataagcaagagcttactcattgccatcatgtgctgaagaacgtatggagaccactgctcaagtagcgtggtgatggaatgtgcacagctggttaaatccttagctgataaacatgccggtctcgagagaccatttgttacatattactctgcagttaaagatgctatggtgtgtgggaaaggaagatatacgcttgcaaaagacgttgacgaggtggacaatgtggtgtatgacaagcctatcccatgcttaggatgaggaatcagatggtcctcctttctctggggctttgtgaccccctattttatgggaactttgcgacaatttttatgtgttcagacacctcctcgccgcgaggcatccctacaaagaagaaggccggttccttagctagcgttttcggcaatttcgacttggcgtattggcgcaatatcttgcccctttctttaggcttaccttaggcggaatgtggggcttggcctctatccttcgcggggtggacttcataaaatctgtgggtattctctttctggaaccatttatttatcgcgccctctttt

SEQ ID NO: 129397 - DNA, 551 bp, Arabidopsis thaliana columbia
gagggcgcccatctaacttagcgcagaggaattaagcgagaaaagcaacattaacatgcaggcagggatctgggggccggggctgatgagaggagccgaatctaaggccattgcaaacaacaagttaacaagggccgggcacacagatgtaggcgggagcgcaaaaaagagcaggacaacgacggcagcccgcatatatagcacagaggggataggtaagcagaccaaaccactcataagcgacctattaccgaaccagaacgcgcaccacgagcatggcatccgatgacaacaccccaaaacccagacagaaccccttagatggacaaagacgcgtgcagagagccaaaagggaaccccaacgagcctgggccagacagaaaacggggatatggacacgggaccacaggaaccgagcaagacgaactggggaaaaaaagcgaggaactacttgcaacgcggaccacgcgacaatggggggggcccgcgaggcgaggggcaacccacagaaaaggggaccagagggggcgccccccgacaccagggaagga

SEQ ID NO: 129398 - DNA, 924 bp, Arabidopsis thaliana columbia
  unsure (1)..(924): unsure at all n locations
tccggaatttccgggtcgacccacgcgtccggctatggagatctacgaaatgcgacaaatggcttctcttctttttttatggctgggccacgtagttgtggtactgtgttcaaggcattgctcccgacggagagcaagattgttgcagtgaaagttctaaacatgcagagacgtggagctatgaatagctttatggcataatgtgaatccttgaaagacacacggcatcgtcatcttgtgaaattactgacagcttgcgctagtactgatttccaaggaaacgaattcagagcgcttatctatgagtacttgccgaatggaagcgtggatatgtggctgcacccagagaagtgacagatcctgccccccaactgcactctgaaggtaatttgcctgactggctctgtttgacttttccatttactgtatgagccctataactcatggcaatctcaagccaagtcactgtccttcttagaacaatgatttgacccccccccatgtttagctggattattgggttctgggctttcgggagttttctttaatattcaaaacattttctgcgaaccgaaggggaaagattccacatgttctctctttataaccctcaaaccctaataacgctttccagaccccccggttatgtttatagtacaggaaacactccaattccggntcttattgtccccgtctaccccagctaatttattgcttaattggggggaagggaaccaaacccactccataattaccatttggtggaaatgtgcttttttcactctttcggggggttctctctttttttaaaaaaaggcttccacccagggttaatccggaccccaccttgcatgaagctcattttcggggggagaaatttcacacaccttacctataggccccccccccaatgtcagtctattt

SEQ ID NO: 129399 - DNA, 861 bp, Arabidopsis thaliana columbia
gcagccccccaccggaattcccgggtcgacccacgcgtccgggatcacagcaatacagagccttgagtgttcctgaactgcttttttgatgtgggatgcaaagaacatgatgtgtgctgctgaccctcgtcatggacgttacttgactgcatccgctgtgttccgtggaaagctgagcaccaaagaggttgacgagcagatgatgaacattcagaacaagaacttattctcctctgctgaatggatcccaaacaacgtcaagtccagtgtctgtgatattgcaccaaagggtttgaaaatggcgtctactttcattggtaactcaacctcaatccatgagatgtttaggcgtgtgagcgaacagttcacagctatgttcaagagaaaggctttccttcattggtacacaggagaaggcatggacgagatggagttcaattgaacagagagtaacatgaatgatcttgtttctgagttcccgcaataccaagatgctactggccgagaggaagaatacctatgaggctagaagaagctttccaaaacttaagaagttggtaatggctttcttggattcgtaagctgttgtaagcaagccaccatttcactttctttttttaccccttcattcttagaaatttttttttttttcgggaacataaccgtattttctcaattgggtttccgggttccaattcagtttggtctcaagattctttcggctttatatggaaaaaacccttatttttactagggcggtctctggagatattttggggttaaaaaactcatttcttgacgcccgaaaattttcgtgtcttttgtaggacacagagacaccctgataataatatactctgt

SEQ ID NO: 129400 - DNA, 590 bp, Arabidopsis thaliana columbia
ccacccgtccgcttgaagccgataaaaagaatcggacaaaagattgagcagctcattttctggatggggaaacacccaaacggacagaccagattggattgtcgccctctgagggcaaaagcgatcagcctaattggctcaccaagctcggacgcttggactggaaacactggaacatccatcgggatgtgctgaagcacacaaagccccctgcgcgaaagactttccagtctacacgcgctaaggaccctggacaggcatccgaagagagaaggcctagttagacactgttggagcaaggcctccaagatatcttgctgcacaccatagaattcgagaatgagaagaaggatcatgttcctcccatgcaccatggagtgatctacaacgctattgagatccctattgcaagctcataagactatgcctacgggaaggatctgttcaagaggatgctacacaggcgccatccctgaatgctcggctaaaatccgtccgccacatgacttagatcctggtacaactctcgagggtttttttggaggcaagccctcaaccggggaaacacaaacaaccttgctccctaagaa

SEQ ID NO: 129401 - DNA, 480 bp, Arabidopsis thaliana columbia
  unsure (1)..(480): unsure at all n locations
agtaccggncccgaatttccgggttcgcccagcccgttcgtcggagtcctttataaaggacccacgtttaccaacccgtgcatgcttatatactatctctactatggtgtcgcgtaaattcactgataatagacgtcgttctacaacgtcgtgactgggaaaaccctgtcgatacccaactttattggccttgtagtagatacggatttccacaactgtcgtagtagcgaataggctccgacgtatcgaccttcctaacgggatgacaatctgaatggcaaatggtacgccctcttgatcggactgttatgcacgattcctagggatggtactcacgatgggagctgtccacttgatagctgagtaccgctcgctacttgctctctgttccgttgccttatgaccacagacgcatgctttccttgtcgagctataactgggatgataactgtgagcgatgcgatttagaggttctcttgg

SEQ ID NO: 129402 - DNA, 687 bp, Arabidopsis thaliana columbia
gcagtaccgctccggaattcccgggtcgacccacgcgtccgctcacaagcggaaaacctgaactctcagtgtatgcggttcaattttttaccgattgtctgcttcttatggtaaaggtgctggaacctatctggagttccatggatttcctatagtatcatctttgtggagaactttcttacatacagctgagctttcgatacaggacatagccttatgctacatagaccagggttgccgactacctatatatgccctttgctggtttttatggaggctcgcaaggccttcaagaatcgataaagcacatatttcccgaccagaatatatcgctgtctaagataaacgcaaagaggaccgccatcattcatgctatagggggacgaatcccctatcgctttcatgaccctggtattcccacgagcagctccctccccaattttgaaaatcctggtgccataatagtagggcctcggtgtaatccttctctagtgctgcgcctttccacctagggtggcaatcaccctgaagactcatgataaaattccatttaagcgtatccaacttctcgcgaatttttgtaatcgtcctctcttatccagcaccgcttttctcttcgaataaacacaatcttgtctctatatcgcgcctctctgatacaccttatctcatcattcaagagacatc

SEQ ID NO: 129403 - DNA, 649 bp, Arabidopsis thaliana columbia
tgcagtaccgcaccggaattcccgggtgcgacccacgcgtccgacaaacaacatgcatgcttaaacataaatggctaaatattattttttctctcttctctatcatgtatctttgagagagagaaactttctactttgtttatagtttctgatctaaatcagatctacaaataaattttcgttttaacggataaagcttccggcgttgtccggtttatctttccgattagatcctattttctgattgtgttttagtttttctttttccacatgtttacaagatcaattcggtttgctttcttattcagaagaattctgctttcaccaaactcatcttttcctttataagggagtaatatcttcaccgtccattgaagggacctacaagataggtattacgtgaagctttcctttgaagactagattgacagatctctgaatttattttaaggtggtgggatggaatctttagctgaaggaatcccggccaatttttgtggaaagaaacctcttgggtggtggaatgtgaattaaagcccctaccccgacagaagccaaaatggttgtgattcggtgggattcaagctcgggcccccggttctggttttttttagccaatcctttttgtcgttctttaacgggtttggga

SEQ ID NO: 129404 - DNA, 1117 bp, Arabidopsis thaliana columbia
cccgtccgttggcatcattgacaacgtcaaggcctagatccaagataaggaggttatttctccggaccagcacaggttgatctatcgccggattagcatctttgaggacggttgaactttggcggattacaacatccataaggagtctacgcttcatttgttctcgctgtctgcgggaggtatgcacatctttctaaagactgtgactcccaatcattattcttgaagtgtgaaagcttccgtttacccattgtagccaacgtgtaaacgcttttacatcctccgaaccaaggtaagggcattttccttcccgggacccaagacagcggtcctttaatcctttccgcttgggaaaaaggcaatagcttttcgctattggaattggggaatccggctaccttctttggggggcctgttacatttatatcttgacccatgtttctccaaaaaacgaggggagggatctctttctgctttctttcttcaacctttatagggtgtacactttttcccgtactcttcgccgtatgaggtaggggtgattttcctacaaaaaccacttttgtgggcgatcccttgcttccttcttattaattgggggtcgtaccctgggaaacccccaaatatcttctcatatggtgcctctccggtcatctccatatcttcaatgtcgcctttgtgtgggtggggcgttttcaatctgttctcttctgggggggcctcctttcgttccaccagacctctttcttggtattatatacttaaattttggattccgagaccctatttagtattcttcccgtttttgcataaaatgaacatttcactatctggggttcggcccctgttttttttgaagtggaactcctaagtctatacaccttatccccctttgccatgtccgacaatacaataagattcttttctaataggtggcccacctcaaattatcaatatcaatttgggccaatctgtttttttccaaatcgttgcggacctgtttaacaacacaccttggcgtgttcccccctaacttataattcgcccttttggcgagcacctatctcccccttttttcactccacccttgtgtcgtttaattaccctcaaaaaaggg

SEQ ID NO: 129405 - DNA, 989 bp, Arabidopsis thaliana columbia
  unsure (1)..(989): unsure at all n locations
atgcatctagtctcgctcttcgtaatagatctctttatgacatgcctcatacgactgtgggtagcctcctaacagcagcactatactggcacacatctgtattaattcctcttgaagagcaccatcaaggtctatgccccacgtttcgtcgacaattaaccagttatgataggcgcctatcttctgaccagttattaatgacccatatttggagctgcttcattngatttagcttctctgcctaacatggaagcgctgctctttgttggcttcccacccaattggtaagttcatttaagtttcctttaggcccccccattcattccctttgaactactttgcatgtaagcggctcttcacatctattcgtttaattaactgctgcgcttatttcgtgatttagcaactaattgtttgaatgccgtacacctaggcttatggatccactctctttcttcctccatctgaccgattctctgtatacgtgcgcatagtccctcaatgatcactcttttttagagtcatcaaactgtcaattttcttgtatgcctctcgcttctaatggcactgtgcactgcccctttctatcgggatccttagggagcttactggtttattgtcatttttcttccacaattttttggactataataaccggaagttatcacctcatctcacttcaatatactctaacaagagttactagctctattagcactcctggcgcttgtttctacgtatacgtataaccctatctctcttgctcctcatttggcaccagtcacttctagtataatatattgtctctaatatgggaggcgaatgctctttaatgtacaattccaaatattttcttttctggaccggcatcttacgatatttacgtccgtatttggtgagtactcccactgccctttctctccctcctcggtgtcctactcgtctgggaaatattcatctccatactttcttttaaaatcaacttcttt

SEQ ID NO: 129406 - DNA, 517 bp, Arabidopsis thaliana columbia
ttcccgggtgcgatcccacgtcgttccgcgtcattggcattaccgaagcagtgtctccgctcgccggaactatctcgttccttttttgtggccgatggcagctacaacgtctttcagtatagatttccctgctgtagatctagagcccgactctgatctctgggctttagtggtcgacgaccctacttctgatatcgccgtacttacgcactcgttcagccgtgatctctaactacatgtatgttatcgccggacctaaatcactggatgttacagtccccctcgctgaacaactgtaatatttgttattgtgactatggtgtacgttgggaagcgacagagtcactgaagcccacacatgcgctggcatcttattccattgtatcacctctggtcagcgagacattgcttcgcgactacgtcttacctacagccttctccgtcttcccctgtcagagactttttcttagcgaattccaggggaggttagactatttttatccggtctgtggcgaat

SEQ ID NO: 129407 - DNA, 733 bp, Arabidopsis thaliana columbia
cgaatttccggtcaccacgcctcgttgaaacccaattagtctcaccgcctgttttctctactttcaccacttagccatcgactgctcctttcactcctcctgcagagcttgcacgtctgactgccccttcttcacctgatgtaccttatgctcgtttcttgacttcctccatggatctcaagaactctggtaaaggtcattacaatgatcttcaagctatcttctctctttatcccggaagtccagccagtgactattagatcaccaatctctcgggcttcgggagatgggttattgtcgcctcaaaatggtaaatgctcaaggagtgattctggcaacacattcgggtatgacacaaatggagtctcaacacctttgcaggagtcaaacttcttctgtcctgaaacttttgccaagttttacctggatcacgacccttcagttccttaacacggcggaagattaagcgtgacgaacgattcatatgtgtatcctacaaatggatatggaaaagggaaccagaataggcataacagaagtcccaagcaagacatggaggagttagaagcttacagggccgtcctttggttttaggtgcaaattaaaacaattccacctagttcacttaggtagagaatcacctgatcgctgaggggaaggggtccttttttaaaccaccattcagacctttaccctctttcccaagcccgaattggaaccaaataaagtcctt

SEQ ID NO: 129408 - DNA, 651 bp, Arabidopsis thaliana columbia
cgtccggtagctcccggcagagcgaagccgcgccaatgattggctcatacctcgaggtctttattgtgataccggggaggatagatttcatgattgcatacgcctgtacggactatagggagatttacacctccgccgcaggctcactggtaataacggacgcataaatctctgtttgttcaatggatcggccagccagtgatttatcacgagcggatctggacgagtgttaaacgtcccgagtcaccatcattaggaattgttagaggccgtatggcactaattgtcacgcggacaggtatgggaccagtgaattcagagtacttaaaatggggacaaaaacaacggtcaacattcaaagactagctcttaccagagctcacatgatcgaacggctctgctatacttactctacaaactcagagaggtgtctcttccaaatatatacctctgtaagaagacccgttatttcgaaagattcatgcgttagatgatcgttcccggtttttatgccaacgtttacctgcaaccggtatttttgcgtacatcgttattatcagaaaataacgtccccaatcgctgggctgtaatgacccgcaactactggccaattaaaacaaacacgctgtacacccgcaaaaccctttacta

SEQ ID NO: 129409 - DNA, 877 bp, Arabidopsis thaliana columbia
accgggatcgaaggggcgccccacgcgtacgtattcgcgcaaagaagtgaaagagcagtgaatatattcttgttttgttgctgcaggggataaggagagaaaagagatggtgattctgagagaaacagaagtgatcctgagactctggatggctttttgtcttctcctcacttgtgggttgatcgggttggatggttagaccaaagagattgattatatgcaaatgaacgataggaccaaaagttggttaagcatgttggggctgagttattcataaaatgatgtgggtggtgtgtataaaattgtgttcaactaggggtgggttggtgcatctgattgaacataagaacttcaagttccaaatgggttctatgacctcttggatcaatagagaggcatacgtggtattcgacgggaacattaatcgatgcggaatacgtgattgtttggggagacaggttcaaaggagcttcattggatgaaatggtgatacaaggtcacacggttttgttttaaaagggaaagtgccaagattttaaaactatattgggggagcgttcaggggggtacgtgtcttcgaatgtggggttttggatctatagcgtctttattaaacgtaaagggttttaaagatttaagtcgagcagccttaatgaatatcttgggggaggttattacttgaactctggaagtattggtatggattaaaaggggaaagctagaactggcgctgttgaaaaaaatgaactatacgtatactatggggggggagtgtgcttttaagaggtggatattccagggcttttacggtgtgacgtgttagacctgaggggcagaattttgaaggagacctgggttcactattgatgggggggcc

SEQ ID NO: 129410 - DNA, 522 bp, Arabidopsis thaliana columbia
tgcagtaccgctccggaattcccgggtcgacccacgcgtccgacatacaacatgcattcttaaacatgaatggctaaatatagtttctctctcttttctatcatgaatctttgagagagagaaactctctactttgcttatagtggctgccctaaatcagacctacccatagattttcgatgtagcggataaagcttccatcgtgggacggtttatgtttccgatgaccacccagttcttgttggtgaaagaccttttctcttttccacatgtgtacagagatcaataccgtgagctatcttcaccaaaacaatcctgctatcaccaaactcatcttatgcttgatcagggagtaatatcttcaccgatcatagaagggacctaccagatatgacttaggagaaggcttgcttgtgaacactagagagagagatctctgaacttattacacggtggaggcatggaatctttagctgaatgagtcctgcgaattatgtggagacaagctctttggtgttgact

SEQ ID NO: 129411 - DNA, 214 bp, Arabidopsis thaliana columbia
cgccccccgctgataatggcacggccgcctcattatacgctttttttaagcccctacagcaagctctatctagagcttcctgcccagcttaagattgactaatcaaacccgaagaccaacacatgcaacttgtataaattcatgaaagctccgcgatttcattttactccacacaatctctggaattatatttccaccgcatcacgaacgttag

SEQ ID NO: 129412 - DNA, 952 bp, Arabidopsis thaliana columbia
  unsure (1)..(952): unsure at all n locations
agagagagagaggaaagaaaaaaaagagcactaagacaccagcaaaaacacagcacaaaaaacaaacaaaagaaaaagccaccaacatgcacaaccaacaaaagacgaaaaaatgaaaagaaccacccacaaggaagaggnncnnaataaaaaccctcgtagaaaacaccaaatacggagcgcgccagccgaacgagcacacgcagtacagaagcccacccctactagcctaacaagagagagtccttatcttacccacccaaactacaacatgtaccacacaaagcaagagacgcaaaggaacatccacaagaaacagccaaaggaactaacactgagccacagaatgaggccgaaaagaacgtgcacgacgaaacgaaaagcaacaacagaaaaacagccagtcacatggccaagtgtcactgacatgcacccaaaggctccccgagaacaagcacaaggttaacaggaaaagcgccaaaattggggagacacaatgagaacgatcactgaaaaggactcgtaaacgaagcaacctaaagcaagagctgctggtgagtatgccgggctaaaggaaatccgggcataacacacgtcaagaggagatcatcaccgaaaagagagcaacatacctgaaactggacaaagaacaaaccctgcaagagcagaaacgtgcgggaagaaaaatatcaccagcggaacagaagctaagggaagacaaaacatagaagaggcgaaaaaagccgcaaaaccaacaaagacaacttagcagacaccaagggaacagacccccccaactcagggagacaatgaaaagggcaaccgacgaagactgcaaaaaaaaacaacaaaaaggaggccaaaggtacaaggaacagggccaaaaagaaagcacaggggggnttgacgagccccgggaaaaataggaagggaggaaaaccatcacaaaaaa

SEQ ID NO: 129413 - DNA, 769 bp, Arabidopsis thaliana columbia
cgaaaggaccagaagaagacagcgaccagaacagcgggacacagcgacccccagagcggcaccggagagcagcgcccaccgggcgccgacgcgcaccccagcggcccttgaccttgagccaaggcacccccccaaacggcggcgcacaaccgcgataaagaagaacgcaacccgcgggcccggcaacaaccggcacgtcggcaccaacaaccgcaaaaccaccacacgccaacaggcgccacggcgcaccaagccaaaacagaaagcacgcgcgccacgaggcagccggagacaacccgaacagagcccccagggcccaaccaggccacacgcccagcaggaaacagccaaagaagaacagagggaccgaacctaggcaaaccgcgggcacccagcgcaacgggagcggcaccccaagaaccccacaacgcaccccaccagggaagcaaccccccccaaagccaccagccacaaaggaacccgaaagaacaaagatcgaccgacgacgagaccccacggggcggacccaagcccacacgcacggagaggacaccgcagaagaggggcagggcacccaacccggaaaacaggccacaaaccacaggaccaaaacggagcaaaaaacagtcccgcgggaacaaagggggcaaaccccggaaccaagaaagcagggacgcggaagaccgcggccgcgaaaacgcgaccacaaacccccccgcgaccaccccccgcccccccaaacgcgcaggaaccggggccggaccgcccc

SEQ ID NO: 129414 - DNA, 889 bp, Arabidopsis thaliana columbia
cagaatcgcgccccgcaccgcgcagcaaaagagcaggccactaagacgcggggttttttttaagatacaacacgactgcaaactccgccgtcgtgggtttgcgtcacgctaagctatcacatccccaaagccatctttgaaccggtaaatatcgaaacctcaaacccatgtccgagtcagcctgtatagagatcgctctgtgctttccccctagctcgtcccgagagaactatatctcagacatatagtgcaatgtggagcagtgccatgccctgctcctcaatgcgtgacaagatacaccagccaaagatctgcatgagaccaaaggagcaagcacgtcgtatcatgcaaaagggatattcagtccacgttgaaactgaaatcccagtccgaattaaagagaagtcatcgcgaactacggcatgaatcgattacgacaagaccctctgtgtgtagtgtctgccctagtgactacgaataactatcctttcatggcgagagagcaattttccgcccctcacggggcggatagatcttcgggtggcaatccctgaatgtcactgagaccatgccatgaagagcgagctccaccattcggcggcaacgccaaagacaccgcccggacatgggcactgccccctacaagaagatgtacgtggcatactactgcacttctcgcgcaaaaaacagccgacagagggcccgcctgagctccttagcaaatggcatccagaaaagatactatctctagtaggtgggaaactaaaggtgagctatacgccagggaccgcagaggagagaacagggattatcggctaagcctacggggaggctaaaataggactagagctaacaccggtctggaattccggacagtccaaccgacctt

SEQ ID NO: 129415 - DNA, 702 bp, Arabidopsis thaliana columbia
gcagtaccgcctccgaatccgggtcgacccacgcgtccgaaacaagcgaaaactggaactaaatcctacacgggagtttttttcggtcgctatcttagaaaagcgctgggactgcggagctcaagatcccacaccaattcgaggagctccttacaaatgtcaccttcttcagcatgcctagctcataccagggggcgctcctagtagcctatatggcttacgggtcagccagcgacagacggaaaaaccaaaattcaccaccgaaacacgggctagataagagcaaacactgcaaaatgacgccgtgggcgacctcactcccaaggagcctctctccacctgggagcttccatcccactcggggaaccccacaaaatagggggcttggcaaataccgaaagcgggcctaccacaggggcatccccgaaccacacaatccaaagggcacctcgaagaacgcccccagccttattaaaacatttcccctgccctcaaaaaccggaactgcccccaacccaaaaaccttacccggaaacctggggagaaaacttggcccccgaaccaataatcccccgctaacaatgcagatcaaaatggcaaaccccaagtaaaggggaacccacgttatggtcaatccccccaagaagggtggccccccggggacaaactcaattcccaaaggtcgccccaaaacaaaaccgg

SEQ ID NO: 129416 - DNA, 645 bp, Arabidopsis thaliana columbia
tccggaattcccgggtcgacccacgcgtccgccttggaaaacaacctcgaaattattcccgttttaaataagatttttcttccaggcgctgagccagagaaagttctcagggagattgaggaggttattgggttagattgtagcaaagcgatattctgttcggcaaaggagggaattggtattaccgagattttggatgcaattgttcaaaggatacctgcacccttcgatcctgcaggaaagcccttaagagctttaatttttgacagttattatgatccatatcgtggtgtcattgtatactttcgagttatcgatgggaaagtgaagaaaggcgacagaatttttttcatggcaagcggaaaggattattttgcggatgaagtcggagttctatctccaaatcaaaattcaagtggatgaattatatgcgggtgaggtaggatatattgcggcttctgtaaaatctgttgcagatgccagggtaggagatcccattacacatttatcgcagaaaggcggtaaaggctttttaccctgggtaccgaaggaaacctacccccttatggtggtacttgcggggccttttttttccaagtttgaccgccttgaacccagatttttccccggaatcctttcggcccg

SEQ ID NO: 129417 - DNA, 280 bp, Arabidopsis thaliana columbia
cggaatatcccgagtacgaccccacgccgttcgcttgtcatacacatatcagtagtatagatgtctcgtgcctagaccggtattatttgtatcacagagtggcgatgatgtacgtcacacagaggtcgagcggaaggatgtgctgtccacttatgctctccactcgcatattacgcatcaatacgcagtcaacatatcactaatacttatacgaagcaggctccgcgcattattcattgtaactacctgccaggttggtctaagtatatcgttattgaca

SEQ ID NO: 129418 - DNA, 877 bp, Arabidopsis thaliana columbia
gcagtaccgcgtccggaattcccgggtcgacccacgcgtccgacaaacaacatgcattcttaaacataaatggctaaatattagtttctctctcttctctatcatgtatctttgagagagagaaactttctactttgtttatagtttctgatctaaatcagatctacaaataaattttcgttttaacggataaagcttccggcgttgtccggtttatctttccgattagatcctgatttttgtttgtgttttagcttttctttttccacatgtttacaagatcaattcggtttgctttcttcttcagaagaattctgctttcaccaaactcatcttttcctttataagggagtaatatcttcaccgtccattgaagggacctacaagataggtattaggtgaagctttcctttgaagactagattgagagatctctgaatttatttcaaggtggtggcatggaatcttcacctgatggaatccggcgaattatgtgggagaaagctcttggtgttgatttgatttaaccccacccgacggagcccgaggtggatcgtgggttcagccggccaccggtagttttcaccatttttttcatttcaacgttgggacaccgtgtttgggccacgacgggccccttttttttggtcctaaaccccttaatcttttaagaaattggggggggggttttaagcctggggcctttaaaaaaattttttaaaattaaacgttttgctaaaattgggtgaacagaggaattgggggctcttttttcaaataacaaaattgttggtgaaccacctcccttttttttggggggtttttaatattttccccaatttttgaaaaattttggcccccccccaaaaaacaaaaa

SEQ ID NO: 129419 - DNA, 600 bp, Arabidopsis thaliana columbia
gcggtaccgcgtccggaatttccgggtcgacccacgcgtccgatgggctgctttttagcagacggccagatgggagcttactctcgtttaacgaaccattcagtctacaatcgatcgtagaggaggttatccctttggttaatccaatcgcgtcactgaacaaactatctacgtgtctgtttttgagtgctgacttaccaacgcatgctattggtgatgcgaaacgtctgatgcaaacaatgcttaacctcctgcgcaacgctgagatagttactaatgatggtctcatctacatagatagccactctgatgaaacccgagtactcacaagaattaccatctgcagaatttttttcagactcttattgacagacacttctacctatgtgtagcggtgaaggccccacggtgtgggatgcacacacacaacattcctttgctctataccaaattcgtgcacgctctggccggagctcagaggaacctattcggaggaggactcgggctatctctgtgccaactgttggtccgtctaatgggaagatacatgtggatagagagtgaacgcctacagaaaggctgcacagtttccgtcatcat

SEQ ID NO: 129420 - DNA, 592 bp, Arabidopsis thaliana columbia
gctgtaccgctacggaatttccggatgcgaccatccgtccggttgacagctgtctagccggcgcgacctatttacagtttgctaatattcttataactcaagctgagctctaccatgtttgcgcaagcattttaaaacttgttatttcacttgacaggagcaagatggcttatgggcagatggctaagtgttacactatactctctggttatgcaaagtgcattcttgtccaagaatcaaccgccataccatctattgatgctgcatattaccgcgtgggattttatggagaaaagttcgggaaggacgacaagacatagtatgtctgccgataaccaccagatgcgcggcttggggatataatggagagactgctccttgtttgtgagccaacagtggacagttaccatattgtgcacattataccatattcgaggtgagagaacgcacaagacttgcgcgctggagagtgctatgtggagatcactgttgacgacgcactgatggccgatgatgatacagttagctgaagagagagtatcttacttcttacacctggaagtggatccgcacgagtgctagaacgcttctt

SEQ ID NO: 129421 - DNA, 572 bp, Arabidopsis thaliana columbia
gcaaacccggtgcgctcacccgtacctagcactgtaatctactgcccgacgttctcgtgctattgcaccaccggaggcctctcctaggattgcctctgaaagttcaatggctcctactgctgatgcaccacagcctattcccaagtctaatgattcacataccatatggcattacaaggacccatctggtaaccttcaaggaccgttttcaatggagcactttcgtgaatggaacaccactgggctactaacctgctaagctggaaatctggaaagctactgagccaccgatggactctggtctactgactgatgcattggctggactatttcagaagcagacccatgcggaggataatagctatatgaaagcttatgtagcagctaactctggtccatcaagccaatctgaacccaattgatgcccagctgattggatggctccaacatccatagagattcctatgaatttccaagatacttggacccaaggacggagtcgtccatcccctactcctaagcaaatgacagctgccacagcaaaaaggccaaaatttgagagcctatggtct

SEQ ID NO: 129422 - DNA, 489 bp, Arabidopsis thaliana columbia
gccggaacctcggtgcgctcacccgtaccttacatcctatagagcggccgtccttccgtacgaataagagccttggcggattttgcacaagatggattattgtatgtcgaacgatcgctcaaagatgaacaatatgttttcgcacagtcacagtcaatatgatattgtcgaagaggacaaaccactataggtggcccttgttctgaggttgtcgtgaataccggagaacctgcccaaggatgaaaaactaaacctgatggaatcattgccccggcgagaaagagatagagttacttggtgagaagaaacaataggctgaaccggagaaggttccagtccttgcagatgccgaggataagaagccttcccctaaagacgagaataatacacagcctccggaagagaagacaccttctgtggaagaggagaagaagcctgccgcgacaagagaacaaacctctgcaagaggaaagaaacgaagttgtagcc

SEQ ID NO: 129423 - DNA, 583 bp, Arabidopsis thaliana columbia
ccggaatttccgggtcgacccacgcgtccgaatgcttcatccacagagattgaaagccctctatttttctttttttagaagacaggagagccaaggatgctgattttggattggtcaagaacgcacctgatggtaaatactctgttgaaacatgattagcaggcacattcggttatttagcaccagaaccgcacctctggaagagtaacgacgaaagtggatgtgtatgcatttggtgtggctctcatggagatactaactgtaatataagctttagatgattcattaccagacgagagatctcatctagtgccatggttcagaagaatcctagtcatcaaagaaaacattcaataggcactcgaccaatctttaaaagctaactacgaaacactggagagcatttacagagttgttgagctagctggacactgcacatttcctgaacctcaacaaagaccacacatgggtcacgcaggaaacgagctttgtccacttgtagagaactggaaaccgtcgtgccaagaagaacaagagaggttgggaatttatgagaacattaatttaccttacgctatacaaa

SEQ ID NO: 129424 - DNA, 402 bp, Arabidopsis thaliana columbia
ggcgcgaccacgcgtacgaaggagcctctaaagcggacgccctgatgggcttttactcgcgtttcaatgaactattcagcgtaccagcgggcacagaggagggtaactccaccatggagctaagattctcagtgtagaaattataagcgtccttgatggtgactcggaacttaccaaatacgctctagtgttgaaaaactcgtggtacgaactagtagaaacaacgtgggcccaccaaggggcaagactaaggatggctacctctccttaatgcctgctttagggacccctaatcgcttaaaagaaatttaccatactcctagaattctgcttacgaggcaacttcacgtagacgattccaaattttcttaccctaattaaacctcacaaattttttaaaag

SEQ ID NO: 129425 - DNA, 574 bp, Arabidopsis thaliana columbia
atcataataccatagtatccaaccaatataaaggaacagactagaacccaaaaggatcatataggcaaacacaaaaacccacgcctatggtaatgaaaaacgaggtgatgcaagtcatgataaaacttaagagcgactccgggaaaaatactaacgaaggtctatatctccccactagacggcgacatgaaacccgtgctccatacaaaaatcaccagtacgagaaactttttcagaactcaacgacagccacctataccgatgtgcacaagggaagggacatagtgctgtaggaattcaacccccaaaaaaaatccataaggttacgaaccaaaatatagccacagggctatgagaccggggaactaaacaagagaaccctatcgcctggaagaaaggggaacctccctgcctatacctcaatcctccaaaaaaaccggggaattgaaaaacaagcgcccttcaaatgggggtaatcgacacaaaacccttgtatgcgggattaggcaaaaagggaggaaatggccctcccccaaataaaaaagggccctgccattcaatcattgtccaagaa

SEQ ID NO: 129426 - DNA, 695 bp, Arabidopsis thaliana columbia
ggaaatttggcgcgaccgacccgtacggaggaagcctctatagcgagagaccacatgcgagctcgcgcatgtttaaagaacgctaccagtataggggcgagcgcagaggaggacatggacgaccgagaaacagcgcctagactggaaaaaacgaggaacaacattaacttaatgcgcgcgagacagagaaaccggagctcgcggcagagaaaaacgagggaaggagcgcagggaaaaccctacgcggcaggtgaagaaactgactaaggaaggggacccccccataatcggcgcaaaaatcgaagcggctgcaaacaaaatcacaaacaagatcctgttgcgactgagagcaacaacctatactaagagagaacggtcaggggcacaacgttgggaattaacacaccaagaaggtccaaaagggggcagacccacaatgtggcgaaaggccgtaacgggccgggattccgaaggctaagggccaatcgcacctctcccgggaaaaaagcagcagcccttcggttggcggtaaggggtccggatatccacaacccaaagggggcacaagaaaaaaggggccctcaaattgggcccaaggcaaaaaccaatggggggaccaaaccaaaaaagggggaaaccacgcctccacaggcagacggccacgtcctcgggccccccaaacgggatgccaaaaa

SEQ ID NO: 129427 - DNA, 582 bp, Arabidopsis thaliana columbia
gcagtaccgcacctgaatttccggtgcgacccacgcgtacggttgtataatatagaccgggccatctgccttttacttaaaagtttttgatgactccaaccggctgtgtgtattctggtgtggataactgtaaacggttatgtggtgtctcggggattaagagtggtgagagcatggacaatgcatttcgagcatgttcacaggatcacgatcgggaagatcctaattcacagagaacgcgacaatggtcaacaacttgcctatgagaaattgccaaatgatatctcaaagaggcatgcactattgttggatcctattatcgggacaggaaactcagcggatgaagctttcatccttcttatgagcaacggcgtacctgaaggaaacatcatatgtataaaccttatgtcatcacctcaaggtgttcatgtggtctgcataaaataccccagaataaagatagtgacatgtgccatagattatgggctaaacgaacagtttcccgttattactgcgatgggggaggtttgacgacagatatttggcacagacgatgactaggccactgtggacctgcagcat

SEQ ID NO: 129428 - DNA, 600 bp, Arabidopsis thaliana columbia
tggccgtctgcggtaccggtccggaatttccgggtcgacccacgcgtccgtgttcacggtcagtggaagcaccatgagcttaaggtgaaggatgacaaaactcttctcttcggtgagaagccagtcactgttttcggcatcaggaaccctgaggacatcccatggggtgaggctggagctgactttgttgttgagtctactggtgtcccactgcaaagacaaggctgctgctcacttgaagggtggagctaaaaaggttgtcatctctgccccaagcaaagatgcgcccatgttcgttgttggtgtcaacgagcacgagtacaagtctgaccttgacattgcttccaacgctagttgcaccactaactgccttgctcctcttgccaaggttattaatgacaggtttggcattgttgagggactcatgaccactgtccactctatcactgctactcataagacagttgatggtccatcaatgaatgactggagaggtggaagagctgcttccttcaacattattcctagcagcactggtgccgtcaaggctgttgggaaagtgtagccatccctcaatggaaaattgaccggaatgtcttt

SEQ ID NO: 129429 - DNA, 336 bp, Arabidopsis thaliana columbia
tggcgtttgcagtaccggtccggaatttccgggtcgacccacgcgtccgaggaagaggatattacagaaatggaatgagggagttttactgttttaatacgtatgcacacaaggtgctatcgatgtgaggagaagactgtctatggtggacacatttttactggagaggtggtctggaggaaaggctgctacttgccctttgtaagcgaagaaactttgagcaacggtctagtgaggaacgtggaaaatctggtggttgttcttgatggttgagaactcttctgggaagcactattacaataatgtcagaattattgcagctatttgacactatgt

SEQ ID NO: 129430 - DNA, 591 bp, Arabidopsis thaliana columbia
gccggaacccccgggtgcgatccacgcgtacgagccaatactgtgatacgcacaggggagacaagagaatcaccggttcatataatgagcacatcggatttaggagcatcacctatcactgatgactgccctttcaatgatcactctaggctacaagaaaatgatgtaaacgaaacacctcacggtttatccaccacgcagcctccaaatagaacctgagagtagtgaaccctaaatacctgggttaagggttcatgatgagattccagagtcagagcgcaacctatatgcagtggatgactgctcagaaaagagtatggtacatgcttctgtggatcaccacagctcttcggcttctgtaaatgaaatttttgatgagtccactgaacttgtggagtgtccctgtggaaaagagccgaggagcctcacacttgaagaagccactgatacaatacttttttgcagctgcattgttcatgatgtagtataccaagctgcagcaatagcactggataaagcaaaagatgcgcctgcggaagaagaaatgttgcattcaacagcgacagtacttggaaagtcgaatgcgatcag

SEQ ID NO: 129431 - DNA, 560 bp, Arabidopsis thaliana columbia
gagcggcactgcgaccggaacttccgggtgcgctccacgccgtacgagggatgctttagagcggccgccaatatgtgagcttgcgatggtgataagggtaagacgcagtctacccttaagcggtgaagaggggatcaataccttgaactcaacatctttattggagaaactggtgaccgatttacttgtgactgcagagttaccaacctgtgttttggcgatgcgatgcgtttgctgcggacaagtacaaatgtcgtgggttacgctgagagctttactaaggaatggtgcgtctccatactggcctatgtgagaaagccctgcaccttacaagagatacgatccgcgggatgtgtttcagaacttatgagacaggcacttcttgcatatgtgagcaggttgagaggaccacatgtcagtgagcatacacgactactaggacattccgttacgcttcccttacgaccgtgttgtatcacgggctataggacacgagatactgaacgagtgatacccaatcgcccgggtggagagagcaccctctgtgggcttcaagcttc

SEQ ID NO: 129432 - DNA, 606 bp, Arabidopsis thaliana columbia
gtaaccgttcgcagtacccttccggaatttccgggtgcgacccacgcgtccgatctggtgctacgatttcagacatcgtggcgtgtttctgaggatttttattctaactgatgaacaacctgacatggatggatgtcctggtggtgagaatcctgatgatgaaggaggagaggcaatggttgaagaagctttatcaggtgatgaagaggaacgcctacgagccaaactggggaatggattgttctacagttgttagggataaagaacttcatattagttctgctatcttagctgccataaaccctttcttttacaagcggttctccaatggaatgagggaatctgagcaatggcatgtcacccttaggattaatgcattagacgatagtgcgctgatggagctttcaagctttatgattaacactccagaaattgttacgatcttacctgacttattagatgtgtcgatggctgctgataagttagaagttgcctcttgtatgaggtactgcattagacttctccgtaatatgcctatgactccagagtctgccctgctctattttgagcttccctctagtggcctaatggcccaagctgttcatc

SEQ ID NO: 129433 - DNA, 621 bp, Arabidopsis thaliana columbia
gcagtaccgttccggaatttccgggtcgacccacgcgtccgacggtatggattttacgagacggcaagatgggagtcttactctttttaaaatgaaccattcagtctacaagcgagctttgaagaggtcatctctttgataaagccaatcgcatcagtgaagaaactatcaacgaatctgattctgactgcagacttaccactcatgctattggtgatgagaaacgtttgatgcaaacaattttaaacatcatgggcaacgctgtgaaatttactaaggaaggctccatctccataatagcctgtatcatgaaacccgagtccttacaagaattaccatctccagaatttgttccagttctcagtgacagccaacttttacctatgtgtgcaggtgaaagacacagggtgtgcaattcacacactagacatttctttgctctataccaaaattgtccagccttggaccggaacttacaggaaccattccgggggagggactgggctatctctctggaaacggggtcgtccgggctaatgggcaagatagcaatgtggaataggaaaggcgaaacgcccctacaagaaaaggggctgccacaactttcccgatcaattcaac

SEQ ID NO: 129434 - DNA, 584 bp, Arabidopsis thaliana columbia
ggaattttccgggtgcaacccacgcgtacgataggatgctattgaggatgaccacattgttctcattaaagtgttgcttgatggaacaaagacacacacttacattggcaagccggttgtgaccaatgccactgtacatgctgtcgtggaaagttaaggtttgaatgataaagtggtagtgttcaagtactagcctcataagaagtaccgtataaatatcggtcacagacagccgaatactaggattaggattaccggaatcacagggtatgaagagtatccagcctcttccaatgttgcagttggagaagtaaatttttgacacaaaatgtttcttgaatgttaaaatttttctgatcttctctatgtaattgtaaggaccctggtcatttcatctctgctgagattccttttattaatatggaccttcttttgccattctttgatcacaaattctaagttagtgtaagaaaacttcattattgctcattcatcaatctacgcatactaatgaattttatagaataaaacaacttctaccaaaaaataaaaaaaaaaaaaggggggccgttctataggatcca

SEQ ID NO: 129435 - DNA, 604 bp, Arabidopsis thaliana columbia
ggaactctccgggtgcgactccacgccgtaccgcacgtgtactgcgattcttatcgagaattggcaagatggtgatgcttacttcttgtttaaatgaactcattcagtctacaagcgatctttgaagaggtcatctctttgataaagccaatcgcatcagtgaagaaactatcaacgaatctgattctgtctgcagacttaccaacttatgccttggtatgagaaacgtctgatgcaaacaattcttaacatcatgggcaacgctgtgaaatttactaaggaaggctacatctccataatagcctctatcatgaaacccgagtccttacaagaattaccatctccagaattttttccagttctcagtgacagtcacttctacctatgtgtgcaggtgaaggacacagggtgtggaattcacacacaagacattcctttgctctttaccaaatttgtacagcctcggaccggaactcagaggaaccattccggtggaggactcgggctagctctctgtaaacggtttgacgggctaatgggaggatacatgtggatagaaagtgaaagcctaaagaaaggctgcacagcttcgttcatcatcagg

SEQ ID NO: 129436 - DNA, 519 bp, Arabidopsis thaliana columbia
gtaccgcgaccggaatttccgggtgcgccccacccgtccgcttggatcctatagagcgggcggcctttttgtttttttatttattttaaaagaaccggtctctctacaatcgggggttgaagacgataactcttctttgaagacacgatcggggggcggagactaggacacgacccgaagctatgaagttataataacatcgccagggggagtagatgagtgaaatccggaggcaaaagactgaaaaacttttgcgcgacggtgtaaatgtactgtgcagaggacttaatcatagaacttctcatggtgagatggcactattggcacggggttccaaccacagggtgttcttcgccactggaatgagactccccctatgattaaagggggaacgcttaacgggatcccgatgtcttgggggaaggtgcacctacaacaagagaactttttttgcaaaaggacctgggcctagtaacacggaggaccttaaccttaactgaggggcctctcccgtgtcga

SEQ ID NO: 129437 - DNA, 593 bp, Arabidopsis thaliana columbia
gcagtacccgtccggaatttccgggtcgacccacgcgtccgatggtctgctttgtagcagacggcaagatgggagctttctcttttttaaatgaaccattcagtctaccagcgagcgttgaagaggggatctctaccatgaagccaacctcatcagtgaagaaactgtcaacgaatctgattctgactgcagacttaccaacccgtgctattggtgatgagaaacgtgtgatgcggacaagtctaaacatcatgggcaacgctgagaactttactaaggaaggttgcatctccatacttgcctatatcatgaaacccgggtccttacaagaattaccatctacagaatctgtttcagaactgagcgacagccacttctacctatgtgtgcaggtgagggacacagggcgtggcatccacacacaagacattcctttgctccataccaactgtgtacaggcttatggccggttctcacaggaaccatcgcggtggaggccttgggctagctttcttgaaagcggttgaccggcgtaatggacgatacatgtggatagaaggtgaacgcctaaagaaaggctgcacagcttcgat

SEQ ID NO: 129438 - DNA, 591 bp, Arabidopsis thaliana columbia
tgggccggaatctctcggggcgttccacgccgtacgattgtatgctatgtacggacggccttatctgagcttgctcacttttataagatttattgagtctacaagcgatcgtagaggaggtgatatcttccatgaagccagtcttctcattgaagaaactacctacgaatttgattctgagtgcagacctagcaattcatgccttgggatgagaaacatgtgatgcggtcaattgtaaacgtcatgggtgaacgctgagaactttactagggatggctagcatctccataaatgccggtttgttgaaacccgaggcctaacagaaattaccatctacaggttctgtttgtgatctgagtgacaactcctttttcctatgtgggaaggtcaaggactttgggctgggcattcacacacaagacactgcttagctccgtacaaaattttctcaggcgtagggccgatctaaccatgaaccaccccggtggagggacctcgggcctagctcttctcgaagagcgggtatgaaacgggcgttaatggggaattgaatacccatagtggtgaataggataagagtggaaggccccc

SEQ ID NO: 129439 - DNA, 569 bp, Arabidopsis thaliana columbia
gccgggactctcggtgcgctcgacgcgtaacgtagtctcttataacgtggcggaacaataatacaattatacattttaactctttgacgatgcctcaggcaccgatgccagagttctctagctcggtgaagctcaagtacgtagaaacttggctaccagtattggggtaaccatttcttgagctttgttttgatcccgcacatggctagcgtcgccgtttgagctttttaagatgggatctgtagagatccttaatgccaggaattcactccagtttgacctaaatcaggtcactatgttcttccttctttgacatcttcatatacactgtttacttaatgttcgagccacgcaccatttacctcggggactatgcttgttacaagccacctgggacgggtcgtaggcgctttaaaacttctgtggaacactctacggtgatcctccaggacaagcctatgagcgtcgcgtttcgactgagaatacttgaacgttttggtctccgtgaggagacttgtatctctacggctattcattatatttacatacacaccgaccatggacgcggc

SEQ ID NO: 129440 - DNA, 536 bp, Arabidopsis thaliana columbia
ggaatccccgggtcgttccacgcgtccgatcgtatgcaatggagcggacggcctgactttatcttactgttttttaaatgttttttacagcctgacaaacgatctttaaggaggtgatgtttttgatgaagccgatacctcgagagaacgaaatgatggaccaatctcatactgagctacagaccatgctgctaatgtctacgtaccgcgaaacgcatggtgcagacaacgctaaaacatctggcccctcgcttaaatagatactaacgaaggttatatcgtcatagtatccactatcttgagacccgattcttgtcatgaattaccatcttctgcatggcttccagtcttgaatgaccgcaggttttacctatgagagacgctcaaggacacaccgtttggaattcacacacgggacattccttttgcttgccgtaaaaaatatcgatactggtctgcagggcccgggcaatcttcgacaagggaaaactcttttactcctgttggataatggaaacctactcggtgtcctctta

SEQ ID NO: 129441 - DNA, 595 bp, Arabidopsis thaliana columbia
gcagtaccggtccggaatttccgggtcgacccacgcgtccgacggattgaaactcgggagaacggaagatgggtgcttactctttttaaatgaacccttctgtctacaagcgatctttgaagaggataactcttcgataaagacactcgcagtggcgaagaacctgtcaacgaatctgatcttgtgctttagacttacacccttatgctgttgtgtatgggagacgccggaggcaaaaaactctaaaccttatgggcaacgggttgaaatgatactaaggaaggttacatcatcctaataccctctatggtgagacccgactactgacacgaattaccatcgacacaatggtttacagctctgaatgacattcacttatacctacgggtacaggtgaaggacacatgctgtggaattcacacacgggacattcctttgctgtggaccaaatttcgacagtcctccgacgggaactcagaagaacctttccggtggatgactcgttctaactttatgcaaccagttggccgggctaatggaagatacatgtggatacaaagcgaaggcctaagaggaggttgcacaggtttgatca

SEQ ID NO: 129442 - DNA, 507 bp, Arabidopsis thaliana columbia
accggaactctcgggtcgtctcacgcgtacgatcggatgctgtcgagcggacggcctttgttgatcttactgttttttagagtttttagagattccacaaatgatgtttgaagaggtgatctctttgaatgagccgatctcttcagtgaccaaactctcagcgaacctaatactgtctgcagactaaccaactaatgctcttgtcgccgagaaacggtatggtgccgacaaccataaccatcttggaccccgctgaaaaatatcatatcgaaggctacaccgccataacgcccgttatcgtgatacccgagttcttacaagaaccaccatattctgaagtttctccagcactcatggacagtaacatctgtcaaataaagagcagcgtgaagagacactacggatgccggaagttcacaacacgcagacactcccttttcgctcccgtttcaacaacttacgtttccgcctcatagcgtgcccggggtaactttggccattggaaac

SEQ ID NO: 129443 - DNA, 591 bp, Arabidopsis thaliana columbia
tacacggagcctggaattctccgggtgcgccccacgcgtacgctcgactactgtatagcgagacgaccagagagaagtttttgagattttggtttcagctgatggagaagggaatccagaagcttagtcttaaaccaggaggtgtttctttttttctccagatccacgatctcaaaaacgctcctgagtgaaagaacagcttttggtcggaatcaagaaagacatcgagactttgcatgacagctatgcagaattcgtggccagaaacatattcatgaacgttccattttggttctacgccatgagagctggcctgtcgccattcttaactcagcgaaccaagagcacgtttgctgagggtcgctccgctaaggtcagagagactctccttaaggacattccagctgatgagctcccacttcagtacggcgggttcaaaacaggagactataccgcattcttcaacgaaattgtctctaaacttagggacaagcctgcatcatatgtagccatcgaaaggccaacatctgacactgaaggaacattggtataggacataatggctttgagaagggaagtgcattaccagga

SEQ ID NO: 129444 - DNA, 566 bp, Arabidopsis thaliana columbia
gcagtaccgcgaccggaatttccgggtgcgaccacgcgtacgattgtatcgtttagagcggacggccttattttggttcactatgttttgatgaacaattcactctacaggcgacagaagcagttgtgatcgcttgccttaagccagcatttttattggagagagtgatcacggaactagcacatgattcatacttccgcctgggaggtggggactagaatcgctggatgcagagaatttgaaagatcataggcggcgcatataccattgctagaggctggtacgtatccatagctgccggattcaggaggaccgattgcttactcgaattacgattccatgcatctgttccaaaactcatgggctgccactcctgcctcagtgagcgagcgagggactcacgtcgaggcattcacgcacactgaattgattcgctcattaggaggtggtcacacgctcactcacgacctggtgggaaccatcgcggtggaggacgagaagcccgctgtccgtaagctggtcgaccgggtcatggaagcgatactgtgcggtagaagatgactgcc

SEQ ID NO: 129445 - DNA, 565 bp, Arabidopsis thaliana columbia
ttcgccggaactcccgggtcgactccacgcgtacgacacaatctatcattatagcaggctggaacagacatcactttacttttaacaactataacttaaacggccaagcggagggggagacaagctctcaaagtaattgattttggagaggctagatattatgaggcaacttcttcctacacacccactatccacatggtgtgactgatcctcagcgagacatgctgcgatattactcataatcataggtagaacagctgctggggagaagtaacaactatagatatatttgcataccacgtcttatgagcaaagcgccgggcttacaagataaacccagatgcggacttctctttacggaatagctgcgggtatactccgctttgtggacccaccattgccacaagggtactactgaaccccctttacataagcctactttttactgaatgctggcaagctgagcccttcaccgatgcgaacattgccaggtagaaaagaggcaaatatactgcactggagaagggctcgtgtgggggcacatgtgaaagacagatgaaaccct

SEQ ID NO: 129446 - DNA, 624 bp, Arabidopsis thaliana columbia
cccgggtcgacccacgcgtccgctaaggaggttgggacttattcagagagatgtggaggatgtttttgtaaagaggaaagaatggactatatgtatggacgatggagacacgcatctgctcgtacacggaccattgaacataccgctaccggtcattctggcgattaaccggagcaacgaagattaccggtcaccatccattccggggctcacaaaaacattgttagaggatggtaagaagatattcaagaccacatgaaggacaccttttttgttcttacgaccaggactggtgcttgtagagtgagtggactcagcacgagatctgctggagacaggatcgttgctgtttctgactggacaatttagcttgctgtggattgaccaatacaagaggcttaattacaatggtgatgatgttgacagtgaatggcgacatagtgctgatcatcaagccttgtcctcaagcatgtcaacgatggaattttccacagacgcattggattgcctcacgagccgtgagcgattaccatgactgttgtgacgacctctagtgctaaacatcgcttgtgtgtgacagtcctcattgccctgtttcaatgtgatgagagggaggtcttttgg

SEQ ID NO: 129447 - DNA, 871 bp, Arabidopsis thaliana columbia
atacatcactgggtgtcgactatgcgctgtacgagtatgatcggcgtctctgatgctgcgttagcgatattatagtgttattatcactcaaccggaaggagagcagattgttgaacatcgtttagaacccaccaaaattattacaggaacgacccagcggacgaatgcaggggcgggaccaaagggttagagaatgggttttttttctgcacgagtggcctggacggggggttgatggacgctgattgtaatgggctgtatcgagcgccagcatctatatgcttgagggtcaaacgatgggtaagcaagggtgtaatcagcggggaagttggcgatgatgctatgcagcgtctacgatgaacatcgaatgtggaagatcagtgatatgatgatatcatagtgggagcgattgtggtatcacaagacgtgaggaagaagctgtttggggatttcgatggtctagctggaagtgctgcgatgtctagctttctgacacaaagagtatatccattacatcgacttgcttcagatacgagatgacacaggcgggctataggaatgcgctttatgaacccttctcgaatagtgaaagtggatgaaatgatgcagcggtgcaaatgcactgataagaaactgtttgttggttcaaaatgttctggttgaaggggttggcaaggacaactgctctgtttacaatgagctctgcgtggagttcgaagtcgaaccatgaatcgctcatgccttatgaatcaatgaagatgtttcacagcactttacgagcagggggacgggtagaaaatggacgtacatttagcaagaggaaaggaaaggaccgtgaatcaaaatcaaaccggaattgggggggcttatg

SEQ ID NO: 129448 - DNA, 742 bp, Arabidopsis thaliana columbia
tttgtcgacccacgcacccgtaccttcccgggatctgacatacgcctaaccgaccagaagacttttttttatgtatgagataatccgtgagatataatctccgttatgaatctggctgataacagagtcatgtctgagtacattgaaacacatccatgggttaagactgctgatgatattcaaccaatcggtgtgacagaggatccgcgatgtcgaacgctacagttgcacgagatgatgctcccagagctgttttgaccactgttgttaggatgccaacacttcatcccctatccttgcctctgatccttaccagaagactcgtgctatattatgggctgtactcatcgagcataagttctactacccatcctgttgggcatgggcaccattgcgccaggaacaagctggaatggagaaggaattgttggaacatcaaaggacgcttgatagatacctaagagacaaaccttattctgcggagaggtcttttgattcctaagccttccatgaatgggatacttcaaatgttgtaaggacctgtaaacatttcgggtatttatgttttccaaccaaagttgtgctattactttgctccccccgtacccacgaacccagccccgggaaatggtgtccaagagattcctttcaagagaccgttttgcgttccacaaaccccgggtgggcccaaaatctttagggaagggggtttaaacgttcctttgcgggaaaggccaaattt

SEQ ID NO: 129449 - DNA, 606 bp, Arabidopsis thaliana columbia
ttcctttgtcgacccacgcgcccgcgcacactgaagggttgagcatctaccggcacggagacttcggttatttctgcggaagagatgctcaattgatggagacgaccacttagtattcttgtgcgttgcgaaaaaaccttcaagcctctagcattcttcgatctcaaaggaggcaaaggaatgagtgagttccatgaggttgagctcaaagttctgtgattatgaatgggtatcagaagggggttgagaaccatgctgctaacgcaaactactgtcaacacggacgacatgtgatagctaggaaggaactaacaacctagccgcttagaacagagtgctgggatgatcttacctgcttcgaggtggcaatagggagatcattgaccttttcgaaacccgacacagattaagggtgaaagcgctgatattgggggcaacctgatgcgcgaatttgcatctggcatattatcttataaacttcccaagtgaagaagcctaactttgggagggcaaaaaagggaataatcttggggtgggctctggaccaaacagaggtaccccggggcctggggaccagcaatatcccaaatactagttggaaataac

SEQ ID NO: 129450 - DNA, 787 bp, Arabidopsis thaliana columbia
aacgaccccacgcgtatcggaaatatattgctttgggtgggaaagatggagacgtatcttttgttgaagttaagacaatggaaatctaccactacagtaagaggctgcatcttggtcaatccattgcttcacttgagttctgccccagtgaaagggttatgctgacaacttctagcgaatggggagagatggtgaccaaactcactgtaccaaaggagtggaaagagtggcacatatatgcactgctgttttgcttgttcatggcatcagtgatagctgcatacgtattcttcgagaactcatattcgttttggaagttaccaatgggaaaagatcaaaaaagaccaaagattagtctatttggaggttcctcctccacgccttctgaggatcatagtatgtggaacttggacctatagaaagattatgtaactttcctctgctttttcttctttctttcctatcttgacgcaaccgttcttttttgaattttttcctttctttctgaattttgcctctgaacaaaaataccctggtgggatttaatatgcaatttattttaccagaaccaatttacctggtctgccttaatcaaaacaaacaaattattcatacctaaaggggctggtgccggttctctttaagaggggatccccaaggcctttaaccgataccgccccaggccattgtccccacacgaaaacataaaccttcctttcttattaaggggggacacccccttaaaatattccaaatttctccattgggcccctcccgtattttttaa

SEQ ID NO: 129451 - DNA, 573 bp, Arabidopsis thaliana columbia
ggaactcttggtcgacaccacgcgtccgaaaataacaccgatctgaacactgcacaatgaccaagggattcttgtatttgactggcgcggaacgtacaggatgaggacgtagatggctgttgctgatatatgagccctctgtaaccacaatgaaaccgacccatgcgctaagactccggtccctgtacaaatgacctcgatacccaagaacactacgactctcatccacaacggtacaccgagtggtgaaactgtaatgcaactcgagcccattggtgaggcttggtcccattcagccctcatccttcccgtctggggctcatcctgaggactcttagctaccattttagcgctgacatacatcctgccaaacttcttgatacccatcgtgctgagtgagggcaccatgtgtgcgaattgacttgctgtactgaaaactgaatagtcaggaaccatttacggacgacgtcgaaaaacgagcctcgtaaaacaaagcctttttacggcggggtagttctttggatggcccacttattgccatgaaggtgtatagactgcacgccttgttttatc

SEQ ID NO: 129452 - DNA, 1121 bp, Arabidopsis thaliana columbia
  unsure (1)..(1121): unsure at all n locations
gaaaccagctccgacaatgcaggcggactcagacaaaccgcatttttatttgctgcacagacgtccggctgacggcttttagacggtccgcgctaaggagacgtaacctgaaccacacactgctgtgtcttgacctcgacacacagaccgaagcatcactcacatgtatagaacttgctcgtacacggtcttatggaaccgagcaggaggctaacccaattgagcacacgtgggagattccacttaggaaagcaaagttccttacgccattctccaatctgcagaaaggccacttggcaccctgcgaaccccttaccaagcgaagagcactgtctaatctccatcgctcattcaggttgatactcactctagccactcatgcaatgtgagatagtgcgaaagatcatatcnactcaactattggcctattgtgagtctcccgatctaaatgttctatacttacagacgtgtacggacctgtcaaacagaatcatgattcttaatgtgcttgcaaaaagaactcccacattccctcataggtgtggaacacaaatacgtgggaatcaggtgagcctcagaccgttaggtaaacgaatggggcgaagatgacaccgctcctaacattcccacatcttcatgaacgcgacggatcttatttcaccatacagcgtgagaaaacgctattaattctctcacaaccttcggaagatacactaggacgtgaaccctaacaccgctcgtctcggaataacggccttcaaaagtatgttctcatatatcaacacggatgatcttcgggtgatacaatatctgaaattcttcgaaactggattcacttggtaaaccaataaactgagcaacaagggcggatattacaatctgtcagtaaattgaaaaactccgatagtatttgaacgactgtttgctgtgagctccttatccccctacaatccctttacattaacggacggcccccggggtaataccgaaatatcttaaccttgtgcagtgagcatggtgctacctcttcttctagtaacgctcatgcaagaggcctccttattgtacgatcggcgacggctttgacacaatctccctctatgggccttatacgttaacac

SEQ ID NO: 129453 - DNA, 351 bp, Arabidopsis thaliana columbia
  unsure (1)..(351): unsure at all n locations
ctggcatgataagggcaaaatcatggcactggaccatggtgtntgagaccacattggcgtacagcacactgaagccccctctcaaaagccagccatgtagagatataggatataatcgtgactgtagtactcggacgacttgtgcatacctgacattggtctgccaccgtatacgacagaccgtgataccgacagtatactttagtaccgctagagcggttgcagcatggcaatcactaacagcatcccttcttaggtaggcgatatatgtcaactgctgctcttacgccactactcgaagtgatgcgtcataaagcagagattctcatgcttccacgatgtggtagcacg

SEQ ID NO: 129454 - DNA, 717 bp, Arabidopsis thaliana columbia
cgggattaccgggacgacccacgcgaaccgagaacagcgcgtggactatctgcatcatatgctacttctggtttcatgaatcaaaaggaagaagatggccagggaaagctaaagttacgctattcagaagaaggacgcaaaattactcgacacttaagtaccaaaaatcaggctactgcagaacagacatatgcttattatattggaagcaatggaactgacaaggatcctcaggctactggagcttacgtttttcgaccagatggtgtgctcccaattaaatctaaagaagaggctcaattgactattgcccaaggacctttgttcgatgaagcgcaccaggagcttaactcctggatatcacagattaccagagtgtacaagggaaaaaaccatgctgaaatcgagttcacaaatgggcctataccagctgatgaaggccataacaaagagattatcactaaacttacaaccaccatgaagacaaatggaacattttacacagactcgaaaggccgtgacttcatcaagcggattcgggacttcagaacagaatgggacatgcaagaggacccacccgggcggccgggaaaccaataatcccccctaaaaactcgggggaaaataccaaggccaaggaaaaaaaacccctccagaaagcttatatccggtggactggggaggggaaacccgaaggacccgggcaaggggggggga

SEQ ID NO: 129455 - DNA, 687 bp, Arabidopsis thaliana columbia
ggaaaaccggggacggacaagcgaccgaaaaacaagcgactgaggggaggagacgcgagggggatgtttgcgggactgaggggcaaaagcagagggggaagcgccctgagcggcaaagggccactaaaccaccgggagagggcaagcgcaggagccgaggctgcacacaacacgtgaccaccgaccacaaccacaaccggcgacaccggacggtgggcggagcaacgggacgggccaagcctaccgggagggtacacccaggcgcctcacgagacagagggggcgaacagaggacaagactacacgtggcagagcacaaggaagcacggccacgcgacgaacaaggagcggaggcggccgatcaacgggcgggatgatgtgggctactgagagcagaaaagcagacaacggttgggagagccccaaacggacgctgaggaagagctaggaggccgggaggctcttgggaggacaaagagggcaagtaggtcgaaggggaacctataccacgagcggaaccaacgaaagggaataccaccgacaagagaagagaggaacgtaaaccagggagcgctggggggcgcaaagacaggccgggaggaccgtcggggggaagaaagccagagaccagggaggacagcaccctgggcgatgagtccaggaacgaacggaagcccaggaggggcg

SEQ ID NO: 129456 - DNA, 1277 bp, Arabidopsis thaliana columbia
  unsure (1)..(1277): unsure at all n locations
agaaaaaaaaaaaggagaggaaaatgtggacgccgtggaagccacgaacggaagaacgggaagacccacgcgaccgcaaaaaaaaacgcagaccgaagacgacaaaagaagaaaaaaaaacacacgaaggaacggaagaggaacaaaaagaggaagaggaagagccaaggacaaacgaagcaaaaaccgggcgtaaaggggcacacagaaaaacaggcaccgagaacacacagggagaagaggagggccgaacggccaaaggagaggcaagaacgagacgggaaccacgccggaacacgggaaaggcgcaaaagagcgagagagtcgacacggcaagtaagccagcgagaggcaaagcgaccacaaagaaaatcggcgaaaagcaaaagcagagagagcgacaagaacacgacatggaggggtagaggaaggacgcaaagacgcaaggaggcgggcncacacaacgtggggagacagaccaacacagacatatgggagggcgaagagcggccgtccggcaccagcaacagaaagcgaggaaacaacacacgagaagcggaggaacggtccgcagagaccggacccacggaactacacaggacacagggagggacaaggccagaaaaagaccaagtgaggaaggcaccagggcacgcaagggaaagagaggacccaaaggcgggagaaagggagaaaagaagcacggaagcgatacccgaaccggggagaaggggaaaaacgaggcagaggcactgaggaggaaacgacagcgggagggaggggaacaaccaggggccccagccaggaagcaaagacaagaaaaggcggccacaaaaacagggagggagaaaaccgccgaaaggaaaaaggggaaaccgggcgaagggagacggcgggcccgaacgcgaggggcaaaaaaaacgaagagccgggaacaaaccgaaaggaaagaaaggggggaacgacaaaggggggcaagagaaagaataaggaacggagaaggaaggtaacgggcacgaagggggccaaggaggaagctacaaaggagtggggcggggaaaaacaacggaagaagaagagacctcgcaggaagagggggacaatccgaacagggggggagggaagaaacaccggaggcaaagagagaaaagagaacccgcaagagaggcggcgacagaaagaggaaaacggggcaagaaggggcgaaggggaaaaaaacaccaccccgggaggaggggaaaaaacagaacggggggaaaacgggaaaaaaagggggg

SEQ ID NO: 129457 - DNA, 956 bp, Arabidopsis thaliana columbia
  unsure (1)..(956): unsure at all n locations
tttcggtcgaccccccgtccgatcaacactgccctcttaaacaccaccgccttgctgattacccacacacaaatccccatgacgtctgttgcacaatgaattcgccagaatgcgcatgtgggaacgccacatgttgtcctggctttacacgagacgctgatgcccacttgatgttcctatgagcggggcatcaagatgccacataaaacccgtcgctaaactctctatctccggccacctatgtctaagctgccacaggcctttaggtcatgccttgaccggttgtgcagaaagcctatggcgatgggactatgccacacccgcaggttatttctctctcgcgtgcgttgacaagtacgtagcatacccttgccctaacgaaaaagacgaaagtctttctcaccgttcccaaaccccctcactcctaccttccttggggagccaccttcataagccccaatggggatgcgcgatttccaggctataggtccctccttaccaacaagtgccgccgccctcattttttatgattacatatcgggaaactgcccaccctccacgtcgtcgactattttacacctcacgtcttaatactccgttgtgatggacaccatacaaactcttatttctccacacctagagntccgctcggagcactctgatgctcttctagacccacccgtaagacacacaatgccgtctattggcggatgaggcgctcacccttggtcacttctccaagggtagattccggcctctctatcataaggaggaacactttcccgccagaacgttttctacggttctcacctcactcctactggaaaaggagttcccttactcctccgcgtaagaggggtataaccgtacacctttctccgacccccatattgaccagcgagataccccggcgtcacattttcagtgccacccggacccgatggccccctcgaatt

SEQ ID NO: 129458 - DNA, 579 bp, Arabidopsis thaliana columbia
cggaatttccgggtcgacccacgcgtccgatcacaaactgtggactttttccgtctgatgtcgaatattttttttaaaagcggaatgagcgacttcataaacggactccggaaaccctatgctctcggcgacgaacaagctaacttaacgactaaaggtcgtcaaagcatgttgcagggacacatacaactccttgtgaccaaccagtgcttggctcactaaaacatccccatgggatcgcaactggagataagcgaccaaaatgggtgccttctcttttgacttacaaacaggcttacttcttgatactgtcagtcgtttcgctcaatgaagtactaccagaggggctttgtgcagggtctaaccggacaatctagtgtgcagcggatgtgggccatgcatgagctgacataacagtggcgcttgtttctaactgagaaggcgacaaatgtccgcgatggtctaggaaacgccctggttagcatgtgactcaaaatgcgaacaatttttcacccccaagtcggtctgggcaccgtgggcctttccataggaaaaccagattttcttccgtttttttaa

SEQ ID NO: 129459 - DNA, 741 bp, Arabidopsis thaliana columbia
ccggaatttcttggtagacaccacgcgtccgaacaaggccctctccatcgaccggccggccgtctccactccttcttttctgactgaccatgcgatggggtgggcgagtctggctgatattgaggtgaagccgagtggggtggtagggggagtgcagatgccgttgcatttgtcgagtttgtatcagtcgaccaggagtcaggtcgagcagttgaccagtcgacagtcgagtcaacagagagaaatgcaactcatcgatcaagccatcaatcgactgaacgggtcgaacgacgacaagctgacggcgtgtcagtcgctgttgactcatctgtcgactgtcagtcattccacaccatctcatgttgcgtgtgttgacctgctcgagcactggctggccctccttcaagagctcgtccaccctccctccccctactgcttccctcttctctctccccacttcctcaaccgccgggaggttcaggccgagttccgtctctccgaagtgttgaaagtccgttacgacgagctacaaagcggaatcgaggcccccgacgacgaggttgaagaaaggttagtcacagcgcgactaagcttgatgggcgaatggcaacaaacgggtaagactggaaaggccggcaattcaaatgggaaagaaaggaaaggtggaaactgctcacgacaattccgagtcaaaacccattcccaacactctggttccaaacggtgatcggatacacaatc

SEQ ID NO: 129460 - DNA, 1143 bp, Arabidopsis thaliana columbia
  unsure (1)..(1143): unsure at all n locations
aacaacgcgacccgggcccggagggaggccggaagaacagcacagaaaacaagcgggacacttttttacacgaaacaacgggagatgcaccaaccacatgggggaacggcgaccgaaggcagggagagcaaggccaggacgagcgagacaggcaagacgagggctcaagaagaagaaaatggggacaggagacacgaccgcaagaaacccgggggggacgaggaccagggaacagcaacggcgagggaacaaaaaggggacggcggaagagagcagacgcgccggggacgggcgagaggaagtcgaagaggaaggagagaatccaacagggaacctagccaatcgcaccggcaaacgaatcgctacaaggtgcacggaggcagtgcatacacagatcaccgggggaccacggggagaacccacctcgcacagacgacgtcagggacgacaatcgcaccgtccacccgccaacgagccgcaacgcgacaatcggggcaggcgcaagaccgagggcggaccagcacgcgaaagaaggaaagaacacccgacgaggtgacaacatctcgcacgccaaggcgcacgatgacggaatgcgacggggaacagagcacagaggcgggcaaacgacgcgcgacagcgaccgcagagatgagagagagcaaagcatgaggtgcacgatgaaggacgagcatgaggggagagacacgagacggacgacccgcgcaacgaccggcgccgaggccaaacgggaagaaggcagaggaggcggcagcgccgcacgcaagacacgcagacgcgcggaacgcctagcaagataacgggaacgcgcacacgaggacaatagnggaaagcagagacatggggcagaaagaacgaggcagcgcagaaagagaagacgacgcgacacagacacgaaagaacgacgaccagcgagagcacgacgagagccgacacagcacagactcatacagcgcgacgatgcgagatgcgaaacgacacgtgagacgaaaccgaacggcaacagcgcaaagagcgaaccacgcgccgaggcgagacaacgagaacaggaaaaagggggccgcgcgcacgtgatagagcaggcagccgccaaggggaagaccgcacacgcgacacgcccatgac

SEQ ID NO: 129461 - DNA, 745 bp, Arabidopsis thaliana columbia
caattttcttgggcaacccacgcgcccgtttcctttttcttccaaatcctccaacattcgctgatcaattgctgattttatgctaccgaggaagatggagattctcaatcattcttcaaagtttggatcaccggatcctcttcatgttcttgccgtcgacgacagtcacgttgatcgtaaattcatcgagcgtttgctcagagtatcttcttgcaaagttactgttgttgatagtgcaacaagagctctccaataccttggcttggatgttgaggaaaaatcagtcggttctgaggatttgaaggataatacaattatgactgattactcaatgcccggtatgactggatatgaactcttgaagaagatcaaagaatcctcagcttttagagaagtaccggtggtaattatgtcctgcgagaacattatgcctcgtattgaatgatgtcttgaacaaggggctgaagatttcttactgaagccggtaaaactctcggatgtaaaaagattaagagatcctctaatgaaggttgaagaattgtctttcacaaagagttttcccaagagagagcttgaaacagagaatgtctactcctgttcaatttgcaacctcaaacccccccaaagaattcggagcttctttcccgatggcaaaaattccccggggacctggggatcttttagaaaacaaaagcccttttttcattattatccaagaacagccttctcaagagaactgtcaaat

SEQ ID NO: 129462 - DNA, 1219 bp, Arabidopsis thaliana columbia
cacatcaagcagggatcgagacccggagatatatagtgtcggcgctccatcccgagacgacaatgacctcgagcacagctagacgggacttgagcgcgagcgatcgaggtacgaataggaagatgacgaggataagcgtgaccataggggaggggaaggagcaagttggttgagaccatcttttggaaacccaccccaccagagattccggagacgagcgaacgcgacatgtgagaacaaggagagacgatgagacagtgacaagcaattttttttttcgcgagactaggacgatgagtacgagatatggaccgaaagggagactgaaataagaagataaattaaattgacggtgcatggatcaacagaagggcggatcaggggactttgtatagacggagagttacagggcgccgtaagataaacccgggagagggacaacaaaaaaattgacgatcgacgacacggaggaatgagtacgggcaatacatgtagaggtaacgatcagggtacgcagagacagcaatggagcaaatgagggagacaaacgaaaactgaacacataggggttagataaggagcaagaaaatgacttgcgaagttatgtgaaatgcgtacaagcgaggggtcgcgtacttaatttacatggtctctgtgcattcaggcatagaaatgtccaaaccctcacttgaggaaaaaaggggcaactagtaacggggataataaagtggtcgaggagaatattaaacaaagacactatcaggcgccataaagtggaccgcagggacatttactttaagttagacttaagcgagcgaaacgtatggactctatgaaggaaacgaaaagagagactatatgtcaatgttaagaaatgcgcgaaccggagatatatacgccaattaggtgaagagggctcgtatgggaaccaaaagcctgcggtgatcgaacaagagtataaatggtatcacggaggcagacggacaaagagcttaacacacagagggcgcagactcaaagtaaatgtccagtaggagcgaaaaatccaaagagcatggctatgtgggacatgacgccaatacggaacttcaatgcgatacgttgtgagacacggaatgtcagctagcgccgttaatgataccgatgcaagggcatgaggaaacgggctgctggtccaagcgcggacaaatatatcaggtcgagcacgaatttatgtaac

SEQ ID NO: 129463 - DNA, 1201 bp, Arabidopsis thaliana columbia
  unsure (1)..(1201): unsure at all n locations
aaaattagatgtacagagagaggccccggcccgcggcaaagaaacagacagcacacgagaaacaagggagaagacagagaccttttttttttttttcacaagcacttcaactactgataatgtcgtttgttgttgataaatcatagtcagataatctttcaatattactacgtgtcaacattatgtttatgtacatacacataatctatcgcagttatagactctttcgagtatgtgttcactatattgcttattagaactacattaggcttggacgctgatgagacttaaagaattttaaccaacactcgaaaatagtgtacgcttgagatgcgcactggtatgtgaactttgttttatatgttacgtctgaaaaatcactcctcgtactgatatctagttagattaagaagatcagatgaggaccatatgcacattattatcaaatcattgattagctgaacgtgagctatgtcgacgctatatgcatgagagcgcgttacgctctcagcatggtctctgtcgatctgaatagtgaatcgtttgagtgctgattcgatgcagagagtcagagccatntgtattgtcgaacgtctcataganttatggtctagcgacttgcgacgatatgttctgacgagcacgctatatcgaatatttccgatagatatgtcggtatagttcacactacggtacacctcccttatgattcttaataatattgaatatccctatatttttacactatgagtcgcatgatgaatagtagactctactctgcgcatgaatactgacaagttgtatgattgctcgatattgctgtcgccgctagttattctatctctctgtcacaggcgtccggcataattcgagaacccgttatgctatcgtatgatgttcattcaccctcacaaaatctgtatcactaatctgtgtgctaatgtacgttcgggatgaactatgttgatctctctcgatctgaccttctatccatgtatgactttttataagcatttttcttcaaatatattgtgtattattttctcgaaaacatttggtttggaggtatatttgagcttttctcatgatctttctgactgaataactggatttttggatatatcaatttataatgggtgatagttaatacttatcgtatatttacttgttaatcatttatcattattttgttgttccctcc

SEQ ID NO: 129464 - DNA, 456 bp, Arabidopsis thaliana columbia
cccccactaggtctggcatggggcccctggggaaaaagcccccatttggaataccttggggggaatccacatttaatcgatcaagcggcggaatgggcttttcctctaacatgcgtttccggcacggggccccctcctatattgacacaccgcctcaaatgtcccaccacatggggttcaagacacaaataggtgcataagactcccggttctcaagcacaattgccccctttgggttaattacaaagggttttttgggggaaattggtatgggaaaccaatgtttgccttggccgtaaatcactggatacctccaccgctaagaaaaagggtgcggtattaaagacggggcgtttggcaacctacagtgcgagacattttacctggggggccccacattactggggaaaccccctatagaaaggggaatttggaaccattctaaaacctcttttt

SEQ ID NO: 129465 - DNA, 728 bp, Arabidopsis thaliana columbia
cggaattgggggaaaaaacccacgcgtgcgggcaaaaaccacggatgcaccaacacaataccaccaatttttttaaccaccccaggcctacccatcgcacgaggggaggctacaatacatccggggccgccccgagcgccatgcgcacacgagatggaggccaaacaaccccgggaacaaccccaccacccaggagggaaggacgccctcaccgcagggagcgaaagccaccaaagggggcgggacggagactgcccaaacacacgccgaaatagcggccgcgtcgacagccgggaggcacagaaagatagggctgggggacccagcagctaacaaaagatgcccggcactcaaacgccccgccgaagtcgacgccgcggcgtgaccctggactacgctcaagaccaaagctcccgaccccaaactaaaagcaccctgcagcccatgagctcactcctaacccggagcaaacatccaccaccaggcaacacgctggcccaaacgaacaaccggcccccacccaataaaggaaggcccgagggagaaaaacagagcagaaacaagaaagcgccagagcctcccaacgctttaccctggacactgggactccaaccagacatgcacgatacaaaagctccaaaaacacccctgataaccccttgcacaaaacatacctatgacccatccaagaatgccgaccaacgccccgtgaaatgggacatcaggcg

SEQ ID NO: 129466 - DNA, 187 bp, Arabidopsis thaliana columbia
tgacagggaccggacccacgcgagccgaggaagaaggcggggacgtaacggagagagaggacgcggatggtttcaagaacagaaaagcacgagcgggacgaacgggcggggagagcacccaagggagcagagaggagagcagagggacgtcgcggagagagaggtacgcacaagggcggggcgacgt

SEQ ID NO: 129467 - DNA, 1160 bp, Arabidopsis thaliana columbia
accggtattgccggacccacccacgcgtccgcgacagggaaaacgccgaaatacgacaagcgtgcactttttttttgttgaccccaaaaactcacccgcgaggatgtgtctagacacagcaattaaaagcgagcagtggcacaaaagacagaagggcgtgcgggaagaagaaaatggtggcattggccggaacaggcattcggagactaaaaccaaactcgccccggcctcgatgactcggagcggagggcaccacaaagatgcatctctacgcgcttaaccccaggtctaaaggaaacaacttcaaaggaaaggcagcggcaacaatataataccggcaccgaccccttgattgtccagtaattatgggcactgaattcgaccacacaaaccgaggcgatgaatcaccgttagccgaggcggggccacaaaaatcccccggacagaagcgctcttcaaaccaggtggtagggaaccatattcaatgggttcaaccaatcccttgaggataggacgactcgaccccgtttagaatcgtgcaactcaccgtgtaacaagtccatccccaatccgaggggtccctaccaaaagacactctgcggcacaccgacagacagtgaaaaccttggcctgggaatgggaaaagcgaaatgaggaacacatacccgcgaagaggcagcgtcttcgcctcttacaagaaacaaggggtcgcaaacctcaccacctgggggataatttcacttgcgttggtagaaaaactcatgtgcacgggagacctggccgacagacgcaagggttcttaaacaaagcgcccatcaggcggttattaagcaggcgcccctcagggggtcagctacacccccccccatggggcaaagacctaccggggctgggtaatacattcggaaggcgccgctatagggccctttcttgtcggaaagactccccagttgtacacccgccctttctacgggaggtaaggaccctttgtcaatgcggtccggcgcggaaaccaacaccaaaaaaagggggcgtaccttcagaccccctttttacacgtgggctataaaagagccgtgaaaagggctgggaccagggaaccatgaaacccgtatccttcccttgcctcggcgaaaaacggacggcctgggctgggtaaa

SEQ ID NO: 129468 - DNA, 1110 bp, Arabidopsis thaliana columbia
gggagggagaaggacgatgaacacgaagaaggagaaagaatacagcatggacgaaagggagacgaggagcgcagacaagacgagacaaggaacggtaacaagggacgcgaacgaaaagcaaggggcgggaggcgaagacggatcacacgcagcgacacacaaaaagaaggaggacagagttggtaggacccgtctgtaagaacacggcaccggaaataccggggcagaaaccacgcgaccggcgagtagaaaaaacctgaagagacagagacacacaagcgaaccacggcaacggagaaaaggagagaaccacacggagaaggagaaaaaaagggagatggggaggggaccggtggaaccgccacgggaggagggaaggcacgaaaggagcggagtaggcggaggaaagtctgacggatacagagaggataaacgccggcgggaccaggaggacacccagggggaaaccagagcagggagaggcgacacgagagaggcgcgatccgagagacaccaagggacaggcgagaagtgataaagaaagagaggcgacaagggaaacgggacagctaccccctgagacctcgaagaagggatgaacgggaggaggaaggcgatggagaagcatccagcaggagagtgaaacgactggaaagcgagcaaggaacaggagggaaaactaaagagagggagcggagaggacaggagggaaagaagaagggatgaattgaacaaacaaaaaaaccgggaggggggctccctcaaggtagggagggatggcaacggcccacaaaccaaagatttggggcccgaaaaggcgggaaaagcgcaaaaaagaaaattggagaaacgcgggaagacgcacctccagcgtgtaacagaggaaagagcggccacagatagataagggaaacgaacacctcgacacacggctaagacgccaaaggaaaacgctcacggaaaaggggagggcacaaaaagagagcgggaggaaaaagaaacaaggggaaaacaaggggggcgacaagggaaaaaaaagaaaaggccccaagcaaaaattcgggagaataaaaagaaagggggaaagcggggataaaataggggagagag

SEQ ID NO: 129469 - DNA, 330 bp, Arabidopsis thaliana columbia
  unsure (1)..(330): unsure at all n locations
cggaaattcactgggaacggacacaacgcggcccggaagaaaacaagagcgacgagcaagaaagggcacggacgcagaaagaagaaagatattatttttgaggancacacacgcacgcagcagcaagccagcatcggggggggggcggagccgcaaccaacggtacaggaggacaccacaacgccacacgagagagacgacggcaacaacgtccgactagcggcaggcagagagaaaacgactaaccgaccagaaagaacacccgaacgaccaacccatcaatgcagtgctccgggaaggagcgaagcagagacactagaccgccagcac

SEQ ID NO: 129470 - DNA, 746 bp, Arabidopsis thaliana columbia
gcacgtattcccggatcgacccacccgtccgaccaaggacgactccgtctatccgattcgtcataggctttttttgctcgctcccacaggagaacgatgatcttgtgcttagctctgctctcattaagcatatcgccgagccaaggcttcctagggacagaggaaaagatcaaatccgctgtcttttactcaccaaaacttgtgacgaatccagaatcagttgcaaatccttacttattcgacatcgatttcccaagaggtcatatcggcctcaaagctttcgatgctgaagtggttgacgatgagtgcaaacccgcctttctacacggtagctatggtcaccattggattgtcgagccatactatgtacgtaaaggttccaagcttccaacgagagtatttgtttcgaggcactgaacccgcgaggaagagactgcatgcaatctggaatccaagtcagaatttattctttcacaccagttacgggagcactggggctgtatcacctgacgggtctttgtgtgcaggtgagagccacgacagagctggtacttcatgtggcatatcgcttgcggggtaggaagacttttactcccttggggaacaccaccttgtgtggatccctcaaatctctaaagggggtattctttaaacaatttcggactcctggatctcaacaaccccatgagggtgtttgggacaaaattgtattaaaaagggatgtcccgtgtcaacttgtgtttggg

SEQ ID NO: 129471 - DNA, 912 bp, Arabidopsis thaliana columbia
cgaaacaaaagacgccacaacacaacaccacaacaacaccacgacaacacaaacaacacaaaagggacgaccaccacaaccaccacaaaccagaccgcacaacacacaaacacaacacacacacaaaaaagcacaccacccaaaggcaagagagaccaacctttgatagaaacagtcggttaagaaacccaacggccacaaaacgagaagaacccacccacccgaacacaaaaaacaaaaaatgaacaagagacaccagaggaatgacctgtttacaccaaccccttcaacaaaacacccaaacggcacaacgaaaaaccaccgccgacccaaacgacgaagcgtgaaagaaaaacctccggcaaaactcaaaagatccggcgagcaatctccgtaacaggacaaactccgacaactcaaaaccatgcaccggcttcacctcatacctccccggagctagctgcaacaacggaagaatcaacaaactctcactcacaaacctctcactccgcggctcaatctcaccaaacctatcaaactgaacaaagcaccaatccctagagctatcatcaaaccagatctccggcgaaatcccaccggagattcagtatctcaataaccaagccaaacaaaacctcgcaccaaaacaacacgacggagaaagcactccgaaaaacgctctttgcgcttacttaaaacgggaccaacccaagcaaaacaaaacacccagcaagaaacccccaaaaaaacgcccacaaacgaaggaccccggagaaacgaaggagaccaaaaaacaaaacaacaccccgaaaaaaattcccaaaaaataatcagaacgaaaaaacggaactgggggaaattcaaccccgaaaggctaaaaaccaccgaaaagaaagcgccaaaaaaggggaa

SEQ ID NO: 129472 - DNA, 1153 bp, Arabidopsis thaliana columbia
  unsure (1)..(1153): unsure at all n locations
gagtagacatgatgatgagcgagaacacgatcgatacgctcagagcaagacagttaacccgctaaccggggaggaggccgacagtggtagaaccgncggttaagcagccaccggtccggaattcccgggacgacccacgcgaccgcataaacaaaaaataaaatggcgcattatacatcagcattctattactccggaaactgcgcatcctacgcacgtgtgagctcagaagagatatgggaagcagggcacatgaaacacccggtgaggatggcgacaataacagatccggcgccggaggaggtaactcagacgaatacggggaggataccggcaccttggaccaggggcggagggcactgaggcaagcgtgacggggctaggcgggtatacggtgagagtcggatccagagacggcacccacaacgggaaccatagggagtgtgagcctcggatcaaagtggaaaaggcgaacgattgggccgatcagaagttgaatctattgagaacgataggggccccctaccaacaattggcaaagcgcatagcgggagaataatctcctggccagccacaaacaaggcaaaagggagttaggcactgggcagatacgggggaaaagaggaggggaacaaacccaccaaaaatgggtggaacggcatatcaggctaccccaacgcgggaggtgccacccctggccaaaccggaaataacacccgggacgcccatggaacgggaaagcctcgtcaacggcaaagggggaaaccgagcgaggcgtggaacctcaaccaagaggcacacggggaggtgggaacaaaacgctagcgaaggaaaattgaggctcgtccaagtgtgggtggatacagcgcccccaaaccagtattggcaaagagaagaccagcggcccagaaaagagaaaggggggaaaccactttctacacaggaaaacctcacaaaggggggaaggcttcataccaattcccgccattggggagaccacgagtgagagggcgccaaatgaaacatcatgagaaagaggcttgacctaagaaagactggggccccaccccggtgaaggggaatatgagcaaggagctacccgggggggggatacacagaccggggggaaaccgggaaatttcttggggggcac

SEQ ID NO: 129473 - DNA, 1122 bp, Arabidopsis thaliana columbia
ttcctggtcgacccacgcctccgagaatacaatagagactctaatatctcctcatgtacaagacacgttttatattggggaagcatgctgtgagctcaacacacaactcgttgggggcgttccgtaaaagactatagggaacctaaaaccacggagcaacaggggcctaacgcaccatggaccaccacataagactgctcactacctaaccgtacgaacatgacaccctgaccctagcaaaaccaccgaaccccgatttgtacctaaacgagattcaccccgttgagagtcgcggtacagccgactgtggcatagcaacagcgaggcgtaatcccctgtccctgtgtccgccggagtttatggcaacgttcactaattccaccccttgttaccggggataacttaccttccagcaagaaatcctggcaacacgtcgccggaacgcacactagtcttgcacaatggaacttatgggaccgaacttaaccctaccaagatagcgtcgactaacataactactgaacgtaaaattgtacaccatactcgcaaccttggcgatcatatctgtcactgagcacctattggtcccacgcagtcgcacagataccgttgaaagattcagccgaggtccacaaaaggctaaaaccattccgaaaggcgaagattcggaaaccgaaccgaccctctccgctcatgctgaacagaccatggggacaataccgtctctatgcccaggaaacttgactattgccggactggaagccactagttgaacaaacgtggtcaaacggccattggttgggcaggacagaccctccgagaaaccttcccctcccccaaaggaaatcctttccatgacaggtgcccataaccttacttggccccaagagaaatactcattgggaatctaaccctttaccctaacctagacagctaccaattgctaaacggcgagcaccacccccataaaactgacagcagagccaacattaaacccaggtacccaacagcagctcgaaaacacagactgtgaccccccttccttgaacgcaaccctagggaccttaaaggaacttaccctgaaccttcagtccccgaaacgaaccaaacccaacacgggac

SEQ ID NO: 129474 - DNA, 1237 bp, Arabidopsis thaliana columbia
agcggaaaagacacagaacagaacgagaggggaagaaacggcaagaaagagaaagggagggcaaaaagcaaagaaaaacacccacaacgggaaatgtgacaccgtgaccacacaaacggaaaaaagggccggaaacaggaagggaggccggaagaaggaagaggagaggattatggagggaggacgaggacaagcgggaagaaagggcgggggggggcaagaaaagagaagcacaaggacgccaggggggagaagagacatcaagacaaagacacagataaccaacaaggacgagcagaggtgaaagaacagattgagcacggggatgaagaagagaggagaagagggcgcgaggggaaacagaggaggaagacgagacgaggaaagaccgacacgaaggaagacacagaggaacgaggcagacgaggagggggagaaagagagaagcaagggacgagacgagagaaagaggaaaaggggcaagacacaagacgggcgagacgaggcccggggacagacaacaacagaggaagagacaggaacagaaacgcgagagagaggaatacaacgaaagacagcagaacgggcaggacgaaaagagaaggaaagaagggaggagaaaaaaaggaaaggggaaagacgtcacgaggagggaacacgccgagaacaagggggaaaaagacgaaggaacagaggaggggagacaggtggagaaacggggcaggggcaaccagacagaaaggaggccatggagagagacgagcgggaagagcagagggaagagagaagggggaagggcagaggggcacagagagccaacaaggggggcgagaagagcggacaagaaagaacacgcagagcagaggagagcaaaggggaaacaagcgccagaggaggagaaagggccggcaagaagagagagaagaccagaagagagacaggggaaaagagaaggagagggagaagagagaaagacgcgacacaaggacgagagggcaagcgggaaacgcaagacaggacgcaggaaagacaagggacgcggagacgcgagagcacagaagcaagacgaagggagagccgagcaacagggacagaccgaaacagagagatgacgagagcaagaggcaaggagaggagaagagacgaaggagacgacgagaaagcgcgaagggaaggcaaaagaaggggaggccgacagaacgaaggcacaagatcaagcgggcaaagaggcggacga

SEQ ID NO: 129475 - DNA, 701 bp, Arabidopsis thaliana columbia
attcctgggtcgacccacgcgtccgagaaacaggcgaaacagaaacggaacaaaaataaagggaaggtcattttgaaggaagaaaaggtgagttttgcaacacatgcaaaggatctcgaggaaaaccaaaaccaaaaccaaaacgatgaggaagaaaaggattctgtcacggagaaagcacaatcttcagctgaaaagcctgatactcttggagatgtgtccgacatatctgattctgtggatggttcggctgacattcttcagcctgatttagaagatagggatagtagttctgttctttgggatactgatgccttggaaattcatcctccatcatcagaagggagcagtagaggaagaggcatttcgatatctacacccaatggaattacagaaggaaagagtcattccactatggatgatagttcttcaacttgttctaatgattctatccgatcgggggtaaccaatgggtcctaccaagggaattccttgaatttccgaaaccagaagtcgccgaacaaaggaaagaaccaacaagtgaaagcaatgactgatgcccacagtttagcgagtgaaacagatgatcaaccctcaacacttggaacagaaccccagggtcagaattattcttccgaagcaagcaacgttggtgaatctgaatgggtttgtgtcttccacatccaagagccagaagggtc

SEQ ID NO: 129476 - DNA, 775 bp, Arabidopsis thaliana columbia
  unsure (1)..(775): unsure at all n locations
gaaaatactaaatcctacttgttcttatactccatgctgtaataagaaaataatgnttttatggcgaacatcatggtcaacacataaaaccaacatgtttgtagtgctgtttaacttatgccggactcaagcgcctctatcaacaccatctagatcgaaagttgagctagaatctctctttagcgctcaataggactctccattatctacactatcagtgcgaacaaccgaacttacaatcgcacacacacggtatgcctgccgtgaccgcgtgaggccataagccaccggtagactgggacttcgcttcatttgccggctttggagatcccatcccatgacaggttctacaccgcagacctgacgatggactgttacatcagggacactccctaactctttgctgagatccacacatgaaagcactgccatcgctcacattcaaggagacttctccaggcagatccaacgcaagggatgaatgttcctcctgggagcatgatacgatccgacggttgtatgagcttcaaacttgatgctgcggaggagctcggtgtcccggatgctctttttttggacaactagtgcttgtggcttatttggctaacctttactactatcgcttccatcagaagggattatctcccataaaaaatgaaagttacttaacgcccggcacatttgggccccaaatattcaattggataacccgtctatgtaacaaactttagaacttatggggacaccacccaagtcttcctttcccaaaccacta

SEQ ID NO: 129477 - DNA, 743 bp, Arabidopsis thaliana columbia
  unsure (1)..(743): unsure at all n locations
cccccccgnattttcggggaagaccccccgcggcggagtttattcatacaccgagctttgcatactatttgctgcggggttgatcttatttagtctggaaccggtgtctgcagcccatgcgcggatatgaaaaacgggtcggtttattttgtcgatcacacaaaaaccgaagaccataaaaaaaaccatggcgtgtgagaagatcaaggtggcaaatcccatctgcgagatggatggtgatgaaatgaccacggttatttggaagtctatcaaggataagcttattactccttttgtggagttggatatcaagtactttnacctactgttttctcgccgagacgctaccgatgacaaagttactattgagagggctgaagctactaagaagtacaatgtggcgatgaagagagccatcgtgactctaaagcagcgacgtctgaccttagtatggacggcctgccgacttggataagtccaaatgggaccccaagagttatgctgaggtgagcagatttggctgagaaacacattgaatagaatgcccctatcgagacctgggccggtggcaagccttaccgactggtaggcgagcttttgattcccatgaacggcccactgacgccgtaatctagggacctggggcaaatgacaattgatgctcttgcggaaaacaatgtgaagggaaagctatcccggatcccgcaccattacaactgggcccaagggtgggggcttccctt

SEQ ID NO: 129478 - DNA, 295 bp, Arabidopsis thaliana columbia
cggaatttccgggtcgacccacgcgtccgacaactactagtggaccggggacgatcctactcaccgaagtttttttattctctctacgaaaacttggagatgacgatctgctgcacacatgtgatctctcagacaatgtggattcgtggatcagccatagatgggtatgggggttacaggatgacgaacatgcctcttcttatgtgcatgtacagaggggctacgaagaagccgccataaaattgggtccttagaccttgctatattcagacaaactgcggtattgggttgtgac

SEQ ID NO: 129479 - DNA, 265 bp, Arabidopsis thaliana columbia
aacagaaaataccgcgaaaacaccgaccgcggccgccccccgccgcaatatccccccacaacatcctgccgccgtttttttttgcgccacgaccgccaaaccgcggcccaccgccgcggggggcgagccacaggagaacgaaacgcgccgagcggccccgccagcccctccccccaagagggcgcgggaaccaccgcggcgcacgacggccgggcacgagacacaatggcgggggcgagacgccgccacatcggaccgccaccac

SEQ ID NO: 129480 - DNA, 448 bp, Arabidopsis thaliana columbia
ccccgccgaaacccagactgagatagaccttgacgatgaagtttagctgaacttgttcatccttgcccctctgaagagagtgtagttttatctgttgaccttacaccacttactgtcccttactgttccgttctcatgggaaaaattgctgcaatggagggatcttcaggagatttgcagcctctcctgctgctgttgtcgaaattatacacccatatggacatgtttctcacacacaggtcttgatctatggcagctttgccgactctgattatggttagacgtttacgactcttgatcctaagacaggcgaaggcattgctcatgtagctgaaggcgatgctgaagatatcactcgagctgctaaagctgcaaagacggactttgatgaacgaccttgctctaagctgagcgcttatgagaggtcatgcagttatgcccgaggttt

SEQ ID NO: 129481 - DNA, 632 bp, Arabidopsis thaliana columbia
agacagacgcgaccgaggaagaagaaaaggaggcgacaaaaacaaaaccaggccaagaggttgccggcaaaacagggaacacacaaccccgggagcgacagggaggaccggtacagataccggggggcaacacccaaggacaacgtatcaaacgcaagcagaaagaacaagcggcaacacagagaaaggaaaggagacaaaggaaggaacggagcagctcgcagactaacagataaacacagatgcaaaacacgaaagaatcagagaacacacaccaactgaggggttacacaggacaaacgagaagctcaaagagataatagggcccgacagaaccgcaaagcgagagcagacgaaaggagggaccaccaaaggagggaaccgcactaccgacgacggagctgggagcattataaagaacacaagcagacaaacgtggaaggaagaacaagagacagccaccggcaagaaaaaatgcatgcaccggcgaaaaggacccagagcaaaccaaaccaaaaagcgaacgacgacgaagagacaacccacggaaaaccgggacaagaacgcacgaaaaaaaggcaaaaaaaaacgccaaaagcacggaacaaggaacaaaaaaggggccaacaggg

SEQ ID NO: 129482 - DNA, 651 bp, Arabidopsis thaliana columbia
gcaagtaccgcgtccggaatttccgggtcgacccacgcgtccgcaaaaaggcgctatagaacccgaactgataactacatggtagattttgatcaaacatagtcaagagagcaacaacgctactgttcgggctaaaagatataatcacggatctatcatggagactctaacggaacgtatgcccccacacatacatgagggaatatgacggtgatcatcactcagagggcatagatgcaggatcaacgcttcgatagggtatatagcacaaatgaggtctcaaatagtacgaaactcaatacacccagaataataagacgaacgctgactagaacgtacacactgtctagaaagactgacccacaactctcacatcaaatacagcacctgggcatactcctggaccaaacgataatgcagccagttactactacccagagagcgtctactacgtaaagaaacagttcgcaactacctacggtgaccatttcatatatgtcactgatcatggatttagcacaaaaaataatggggactttgcataatggtgactgccccctaacaacttcgaacagatgtatccgcttgaattttaattaacaagtcttccctccagagcccaggtgcatttcaccgggaagcaaggggatc

SEQ ID NO: 129483 - DNA, 798 bp, Arabidopsis thaliana columbia
tgattggccgttctgcaagtaccggtccggaattcccgggtcgacccacgcgtccgagagagaagtgtttcaatagtttggcgtgaagatggccggaggatgcggatacggcggcgcatcggggaaagttgattacgtcttcaaagttgttctaatcggagattcggctgttgggaaatcgcaactacttgctcgattcgctagagacgaattcagcatggattctaaagccaccatcggcgtcgagttccaaactcgtaccctctccattgaacaaaaaagcattaaggctcagatctgggataccgctggtcaggaaagatacagagccgttacaagcgcatactacagaggagcagttggcgcaatgctggtttatgatatgacgaaacgtgagacctttgagcatattccgcgttggcttgaagaactgagggcgcacgctgataagaacattgtcatcatccttattggaaacaagtctgatctagaagatcaaagagctgttcccactgaagacgctaaagagtttgctgagaaagaaggactctttttcctcgagacctctgctttaaacgcaaccaatgtcgaaaactccttcaacactctaatgactcagatatacaataccgtgaacaagaggatcctgcatctgaggcgactcaaataaccccggttcattggctggtaagaagattctcatcccaagttctgggacagagattcccggttagaccagcacttggtgtacttcttcttgacctggctcctactcaagcaagaatcattttttttcct

SEQ ID NO: 129484 - DNA, 446 bp, Arabidopsis thaliana columbia
ggggagaccggagcccggagaaggagctgcctttcccgcgcggggcgagggggggccgcggaaagagggcacacacgcgcaccgcgaaagaacggcgccggaggggggcgggcacggaaggggggggagggggggggaaccggggggaggaggacgcgcgggggggaccagacacgggccgagacaaggcgccgaagaacgaagagcccaaggagaaggggcgcacgcgggccgcgggcagcgcagcccccgagcaccacgaaaacaggcggcccagacgcgacgccagccccacgcacacacccgccggcgcacaagcggaccaaccaaacggcacgaggcgacggccagagagcagagaggggacgagaggcacgcggacggaggcgcgcggacacgggggaggggggggaagacaggggcggcgagaagcgggagagccaggg

SEQ ID NO: 129485 - DNA, 761 bp, Arabidopsis thaliana columbia
accggactttccgggtcgacccacgcgtccgaagaaagacatgaaatcgctgtactctttggtagcgaggaaattattggctctattgctagcaccgatcgtatgcttaccgttcgtgagacacgaatactataacgacatgcgagtgttacaagctggtcattgatcaggcctctcagcataacgaaaaactctgtgcagtgtataaacaaatttgttaatgttacttcctagcccctatggctgtcaattcaccgccttccatatgtacaacgccgctcttgttcagattgataaaagaagaagtattgactacctattcttcgtagcgaatgcttcgggttgcagggttgggacacacaatgcatatggtcgtggaaagggaaacatcctctcgaatctatgtgagtaccatagatcttacttatgttttcatggacgcttacactacagagaaagcttgagacgaaatgggtcatcttgtatatggagcgccccctgacgagaggacagctgtgactgtccataagcttttcggttacccaactggtgaagctatccgtgaggttgttaacccaatactttgctatccggctgtggctggctcctgactttttaattgagcccttctcggctattattaagttggaatggcaattggctcttgaactattttccgattatacgatggaccaacttattggtccttaataaatgggcattaaatcgggctgttcccttaaaccggaaggggaaattat

SEQ ID NO: 129486 - DNA, 723 bp, Arabidopsis thaliana columbia
tggtccgtctgcaagtaccggtccggaattcccgggtcgacccacgcgtccgatagagttaacacaacagctgacaatggatcaggagtttggaaggtttccaatatgtgcaatcctcaaagacatgctagacgcccctgaagaacacaccgagaagactcgtaacaacgctgcaatagcttacatgcgagacgcaaacgcaatggctgctacacgcagctgacgttgtcgagcacccggatgcgtacgttatcgccgtggacatgcactggaatctaaggagatgatatgcatgtccagatagagaacgagaacgtgcttgtggtgagtggcataagacagagggacgacatggagaatgaacgtgtgaagttagtgaagatggacaggaagatgggcaagtttattacgtgctccgtggtacacgctaatggagttttgaacacaattaatgaaggtggtactgattgtgcggtggaagagattctttcgaagcctaggcttgctgatctaggcataacgagagatactagcgtccgcaaaaatgtgacatgaagaatgcccctgtcagaactgtgttggcacagatttggctacggttatgacaccttgcacgttagggagataaggccgtgaacttgaacaagcgagaaacagcattttgtggtccctaaagacctctatgctatttttagccaagctgcttttcccttggacctggtc

SEQ ID NO: 129487 - DNA, 700 bp, Arabidopsis thaliana columbia
  unsure (1)..(700): unsure at all n locations
tggccgtctgcggtaccggtccggaattcccgggtcgacccacgcgtccgcttctacagattgcacaacaacacggttaacatgatgatgagtgtttaccgattgaaaaatacagagagcttcaacaccaccagcttataggacaattagaaggccctgacaaagctagcggaagccgacgcacttaaaaagggaatcatcccaaacccgtaggaaatcgctggagccactgatatacagactggaaactcgctccggtgctgagatgcagacattcgacggccctgtcggagctaatgtacctctctcacggttgtagactgagactgccagttcatactcggtgctcgtacaccctgctctttactgctcatctgaccgctcaggcactggcaacatagctagcactaacccttcaccacctgttatgaaatngatacccgagggagaaatgtgggtactttgccagacctgtttacatacattactagtatagtccatctcgacaacctaaaggcgtctgcagaagtcgggcttgggtataacctaggcctgcctgtcgaggtgactgtggcggcaaacacaggtgtgaatcttgctattccggacagggccgtggtcgagaacaagaacatcaatggtccagcaggtcctcaggatccaacatatccgacgcttgtttgctctctcatgggaagac

SEQ ID NO: 129488 - DNA, 809 bp, Arabidopsis thaliana columbia
  unsure (1)..(809): unsure at all n locations
ttgacctttgattggcccgtctgcaggtaccggtccggaattcccgggtcgacccacgcgtccggccgaaagaccagataaaccttcagctggagctgggcaagacagtcgagatagattctcaggtgctttagaggcatatgctagaagaaatggctcaagaagcggtgtggtacaagctgatcgatctagaccaagaacctcagagaatgtattagcatcgtcaaaggatacaacaccacaaaactatgagagagtcgaaagaccaatctcttcaacaagacacgcaagttcttcaagaaaagctgttgtatcgagcgtacgagccacttcttcagctgatttcacagagaaccgctctagcagagttgtcccaagcaatggccgttcctcaaccgctcagaggactcagctcgtccctgacccaaccactagaccgtcatcttcttcttttacccgagctgcgccgtcgaggactgctcgtgacatcacgctccagagctttgagctactcaccatagggaatggaaagaggaagtgagaggcttggctttatcgtgagcgtgttggaggacactgcgacattttaatggatggagactttgtttttatttcacgaaattatcggtttcctaatttaaggaataaatcgaacatcatttgattacaaattatatgtgataaagtatatgtttttaacttgttaaaaaaaaaaaaaaaagnnnnnnnnnnnnnnnnnnnnnnnnnnnnnnnnnnnnnnnnnnnnnnnnnnnnnnnnnnnnnnnnnnnnnnnnnnnnnnnnnnnnnnn

SEQ ID NO: 129489 - DNA, 789 bp, Arabidopsis thaliana columbia
accggaccttccgggtcgacccacgcgtccgacagaacccagaatcgtgctcaacctgcttgttccgaggtgagaatttgagtattttcctcactgtgaacatgagcattgctgataagtgctctttttactgcaaatacacggctcgatcctgcacgccgatgaccccaggctctaatcgtacatgcgagatatacttgggggaagcgatcctccagaatgacccattacggagtcgggttgaaaacatgatacgcggcctgaagcaacgtgctaaggagatacgagtttgttccaccgtaaaacggagtaacaatacctcccgcgaatggaggaatgccaacgtgttaactgggtcaacggtatatcattacgcactgggttgtctggaacaccttactctggtcagaatctatatgggattcacactcgattgggtcctgatggtctgagtcatgggttgggaacaatatcggtgactgacgacattatcacatctggtcctgacttaactgacaaccacttggaatgctcaatgtgctaatggtgccagctcagccaatggaagcactcggaccaacgctttcacagatgtgcgggaaggcggagaattctttgatgagctaatatgctatggacactatttgagacgaagcgccaaatctcatcgtgccagcgacctggggtaaccggaaggattaacgaccggctggcgatttgaagaagttaggccgttgatttctgcaggcccacttctttacttagagacctgacatgccccggagatcc

SEQ ID NO: 129490 - DNA, 661 bp, Arabidopsis thaliana columbia
ttttggaatttgggtcgaagtcaccgtttcgagaaactttataaaattgagaggctttgttgtaacaagcttttttaagttttttgacaacactgggtaggtgtacattgtgtgtagtacaatagatgaaatgtatttttttttttgtaagaattagtttgttttaatttatgattttatttttattttttatttattttttttttttgtagtgatgttttatattagaagtaattttttatttttttttttgttttttttgtatagataattttagttttttagatttatctctaagagttcttggaaattggttataattcattaaatgttgtaaatttagatgcctagttgttgctgtaatttgttaggtatttagtaaatgtattatgaagtgattggtaataagtgctgtgaggagacagtgtgttgttatgatgggtgattaattactggtatttcattagttgttgattttgttgtcatgttgatggatgagtttattatatttatatatttattttattttagtggtgttttattttttagttttgatcagataaagatctttcatgtattagaaatgaggtgtatgaagtgggttgttatcgtggcttgttaatgttgtgtgatgtcgaggttatatgtataggtattattt

SEQ ID NO: 129491 - DNA, 548 bp, Arabidopsis thaliana columbia
ccacgcgtccgcagcacgctgaacttatatttggccggaaaaaaataattaaacttttactctataccgatctcctatcctagtacatatagatccaagcggaatctatggctcgacgtggattattgatcgcggtcttcgctatcttgtccgtcctgctagacatcttaccagcttctcgtgatcaaggtctcactagacgtactgtcgaccgatcgatacccaagagacaaagcatagttgtcattcagaaaccctagggcaggtttgttgcatagaaaaggttatgatcacgggaaattgagacatgctgagtcaatatgtgtgcccccctttgcaacaagcgaacccctgaaacatgatcctagcatgtttagctagataactgagaagtggaagaaaagcaaatgtgagcgtgagtgtcaaagaaggtcgtgaggcacgctgttaatcttccaagaagagaaaaagggaacccccccgatgaggctctccgatgggtgcctttaggacaaggaatgatagatgaaatgcctctctcgatacga

SEQ ID NO: 129492 - DNA, 850 bp, Arabidopsis thaliana columbia
gcagtaccggtccggaattcccgggtcgacccacgcgtccgatcgactgtaagtgttccaaacacattcaataagcttgtatctcataagcttcagcggaccttagctgtcaacttacatgcggcaaatctgagcctcacggagaaaattggaccaagtccctatgtttattcgctggaaggaattatgaatgattgtcgtgattacttccaagaaacaaatagacgagtctctttcgaatatgcccttgtagctagaatacatgatgcatttgagcatgctggggtacttgcagaggtacgctgtgaatggaatgaaactcatcacgcaactttgataccttacaacccggtagagggatcagagtaccagcgaccttacaagaaggcagtactatcgatagcatgtgcattaggattcgcataagatagcacccagcgttctgtagacaatgaagacttgatacaactgctgcttggggtcacctgaagaataagtttcagaaaagacctttgcttactgagacggatagtcaagagtctcaacccgatgcagaatctgtcgcttgatgattgccctggactgcacaaaatatccggttttgcccattgagatgagctctgttcaccctttggggttgtaagaggaagacatggggtcaatccccggaagggaaaaaactcgtcgtgaagggtttggttgagtcaatggtggccccccaagggtttgattaagattggaggcaccgtttttgaaatgttgaaccaccttttaaagaaaagggggtggacgaataattttacctttggggttaaaaaattcataaacccaaggggcaacctaatccttt

SEQ ID NO: 129493 - DNA, 791 bp, Arabidopsis thaliana columbia
ctttgaaattcaatggtccgtctgcagtaccggtccggaattcccgggtcgacccacgcgtccggacagaatgtttcaagccttaaacatttcatgacatgtgtcgatgtcactacacaacaagagttctgcattccgtctctcatggccctatccagttcaatgagatcgttacaaacacatgaattcaagatcaaccacggtgcatggatctcgacagtgaaaccagagtttggtcctgaaatatcataacgaattgacgaagctatcagaacatccgacgagaagatagaccattgccggtccgagaatatctgaactgataactgctctctcaactttgctcggagaaaagggtgtgttggagattccaactgtaccaggtactccaccgcttcttcaatctaatgtggctgcacttgaatctttccgcaccagagacttcatcttgatgactatcgcaggcggttctggattctgtcaggtgagcataccattggcgctacacaaaaatcttccggattcggtatgattggtagctaagtatggctcacacggtaatcttctgactcttgaggatgtctttgctgcaattatttgattgacatgtcataaacttaatgcacttcgagcatatcaattatgctctctgttgattatggcatctgagcatatatgaatggttttcttgtccccaaccccacagtagaataaataaagtgctgccttttgtggacaggtgcccttaaaaaaaaaaaacaaagggcggccgctctagaggatccaaactt

SEQ ID NO: 129494 - DNA, 771 bp, Arabidopsis thaliana columbia
ttgcacttccgctccggaattctccgggtcgacccacgcgtccgcttcctcactgtagctcgtcctcgctacaccatctaccaatacccttaaccatggctgccgagaagaacaataggattacacagggtacgaacggaagaaagaagaacgctgttgatcccttctccaagaaggattgctttgacatgaaggctcctgtttctttcacgatcaggaatgttgggaatactcttgatttcacgactcatggtaccaacattgcctatgagggactgacacacacggtgtctgaggacactcttgctgatctacactatgatgaggataatgcctacacgaacatccctcttaaagctgagaatcttcggggctggaatgtgctgtctcaggtctggggtatggatttcacaaccaacgatctactgtgattggtgaacaattggccgactttgattgtagcccatgtatgtgctataaccacatacggctacaccttgatgatgtcttgattcgcctctccaattagacgtgctcaccaactgaagcgttcctgttacgctcaatccatcgcaatccctcatatccgcgcagagatgagtgacactatggtgaatgacagcttatcttgtgacctctaggagctactatccaagtgcatcccatatgccattcgctgagagattgagactgcaacacagggcatctactcggtgcagaatgtgttcattcgtagagagatatcctaaacgctcccactttgcctttgaa

SEQ ID NO: 129495 - DNA, 1223 bp, Arabidopsis thaliana columbia
agtacacgtccggaattcccgggtcgacccacgcgtccggggagtgttcacacataacaacacaccccccgttcatttatctctgctttgcggcatcgcacttcagggataaaagtgaatggtggcgcatgtaaaccccgacccaaacaactgcccgctcgtgtattcttgtgatagccttggcagttccgccgccctcatctgcgctggtacgaccttgttcttgaaccgggatctgccctctacatctcagcctgcttatggtctgccacgtcctccattgcagcccctctcttacaagcgctctctcgtgtaacgaagaacgtctcccatcgagagtggacgttctctgttcatctgctgtaagcatcctgctgctccgactgtagtctccgacgggtcgatctgccccccgaatcggccgattctgtatggatcgctttcctcgatcgtctctgttcgaacggatagattgctccccctcgcgtgtgaacgcaacgcacacgctcgcttggtctcacatcgtctaacacttcgttgggcgtcgtaaaataacctccctcgtgtacacatccgataaaaacgtccgcgacgtcagagtgtcgatcggcaaaaagcttctctcacgtctcgctaacgaataactccgttcagtccgtacggatcggccgttccgattgtacgcgtctcgccgcatcggacgcacgatgctgagtatgcgcgctctctggtttgttcccccacggcactacacactaccgcctctcgccggtgaactctcctcccttctccccgcatcgcctctttttctccatacctcttggacgctgctcccctatcaaatcccctcactttccccgtctgcgataccctgacttctcgtacccggcgcgcggtcgacggctttttcgctctgtccccccgccccgcgcatgagatggccacgggccatccgttgacaccgacctgcccgccgtgcccatctcgcacccaaaaaaaaacgtcggtgtgagttacatctctacagttggcgtcccaacttgcaccccttttccaaatcccgccgcctaaattatcattatttattccccgaatctcgacgtacatgtggtgtcgtggcacttcgtctcccggggacaaaacataaccccttgttcctctataaaaaaaataaaaaaaaagggcggccccctcttaaagggatccacaccctctcccccccc

SEQ ID NO: 129496 - DNA, 1068 bp, Arabidopsis thaliana columbia
gacgaggacgaacgcgagaacggacgcgggcaacacggaatcgagaagaggagaagagacgaccacaccgggacaaagaggtgggacgacacaaaacagaagggtggacacgcgagacgtgagaagcgataaggagacaggaaaggtacacgagacagccagcagcaacggtaaaaagaggagacgagacgaaaagagaggacaagagggcgagaacgacaagagcacagaaggaaagaccgaacaagagtccaacaggaaaggggctgaagacgacaggatgaaagaaaaagagacgaacgggagagcagaactatagagcggccaacatagagaagtacaacgaaggtagcagcgacacaaggcggagaagaagaaccaagtgaagaaaggccggagagaaaagaaatagaaggcacgacgcgacaaacacctggcaggatgactgattaagggcagacgcgaagaccgaatcggaagacagcagagcgcacggaccagaagacgaaggaaggaagcgctcaagccggagtgaggagtgggaacacacagagcacgagaaaccgctacagaagtcaggacgcagagaatcgtagcgtcgtcccaacgcaggatgggaggaacactgaatcggcgggacggcacggaggacaggacgaaggaagggatggacgaacggagaacgaagagtgcaggcagaaggacgccggcgcgaggaaagtcaaggcagaggcgagacggatgacgaacgaacacggacgacgaacgaggaggaggatgaggacggacgtggaggtggaggagacgaaggatgacgacggaggcgatgaacgacgacaaggacgaagaaggacgaaggagcacgaggaggagggggatgaagagcgcggaagacgaggagacaggcgcaggctgacgcggacggaggagaagacgcacgagacgatggagaacaaagaatggaggcgaagacggaagagaccgatgggaaaccgtgacaacggaggccgaagacccatgcgacgaggcaggacaacgtagaagaacgggacgcagaagcagaaggaa

SEQ ID NO: 129497 - DNA, 314 bp, Arabidopsis thaliana columbia
ggctagtctgacgttgcagtcggtggatggtgacagctcggagataaaaaggacaagtttgtttgaaattaggggggggggatacggaaagcgagagtatggaggaaaggattataaggggatgggagattagaaaggggtaggtagaattgaagagagatgaaaagagggttttgtgcgttttaatttaaacttggtcggaagggttgtgggatggtggattggtgatgaaggggaatagggtgttgaggggaggtgggagggaaaggagagtatgaggggcgaggggtggggggtgtgggaaggtggtaaaa

SEQ ID NO: 129498 - DNA, 825 bp, Arabidopsis thaliana columbia
ttggtccgtctgcaagtaccgctccggaattcccgggtcgacccacgcgtccgcaaaaaggtatgattggaccagagatgataactagatggtttcttccatttgatcatagtcaagagagcaaagatgcaactgagcgggctaaaatatttttccatggatggttcatggggcctctaacagaaagtaaatacccagacatcatgagggaatatgttggtgatcggcttccagagttcagtgaaacagaagccgcacttgtaaagggttcatatgattttcttggtctcaactattacgtcactcaatacgcccaaaataatcagacgattgttccttcggacgtacacactgccttgatggactcacgcacaactctcacatctaaaaatgcaactggtcatgctcctggtccaccgttcaatgcagccagttactactacccaaaaggcatttactacgtaatggattacttcaaaaccacttacggtgaccctttaatatatgtcactgagaatggatttagtaccccaggtgatgaggactttgagaaggctactgccgattacaagcggattgattatctctgtagtcatctctgttttctcagtaaagtcatcaaagagaagaatgtcaacgtgaaaggatattttgcttggtctcttggagataattaccgaattctgtaacggattttaccgtccagattcggactaaagttacgttggattttcgcaaaatatcactgggtgataagagacccttaaaagcattctgggcaaaaggggttccaagaaatttaataaaacgtttcccgccgaaaaa

SEQ ID NO: 129499 - DNA, 778 bp, Arabidopsis thaliana columbia
  unsure (1)..(778): unsure at all n locations
gcagtaccggtccggaattcccgggtcgacccacgcgtccggcaagggtatcttcagaactgacaagatcaaggacgaatacattgtcacacttgttgatcagttccctggtcaatctatcgatttcttcggtgctttgagggcgagagtgtacgatgatgaagtgaggaagttcgttgagagccttggagttgagaagatcggaaagaggctggttaactcaagggaaggacctcccgtgttcgagcaacccgagatgacttatgagaagcttatggaatacggaaacatgcttgtgatggaacaagagaatgtcaagagagtccaacttgccgagacctacctcagccaggctgctttgggagacgcaaacgctgacgccatcggccgcggaactttctacggaaaaggagcccagcaagtaaacctgccagttcctgaagggtgtactgatcctgtggctgaaaactttgatccaacggctagaagtgacgatggaacctgtgtctacaacttttgagctatattatcctgcttattaatttgctgttttactcctattgtctcttttgggttatttttctcctttgtgtaattgaggattggatctttgcctcttttgttccctttttttttttatgatgtacaacacattggtaatttaaaattgcctttgccttaanaaaaagttcanccagttgccgttttttaaatggagagaattgctacaatcccttacaggggggcggccgcttttaaagatccaaacttaccttcc

SEQ ID NO: 129500 - DNA, 698 bp, Arabidopsis thaliana columbia
cagtaccgcgtccggaatttccgggtcgacccacgcgtccggaccggtctttatcataatagcgagtatgtaaggcttttgacattttaccctactacatgagggaggacaggaatctatcgattgcttactcgccttgatgcctaggacgtgaactatcgtgctcaccctactacagggaaggataccggttggagtcaccacactgcggaggttagactcaatgctactgatctgccatgcagtactacctactgcacaggtcggactggggaagcgttacggatggaaggagaagatgtgacgtgacatttgcccgaagcctggaacgaacgagacctaacgcaagtctggtaagcactacaagccatactcaatgcgcctctggcggcagcgctgatgaaagacctgcagatcgaacagaccatatgacggtttttttagggggagtggaactaaatactcacatctgtagtcgtgagaagcatatgtatgacttgaccagacgttagcactggtaatagagactaccccgaaggtaaagttggttggagaacgaggatacgtgtattatctgtgttaagggaatgttttctgattggcggaaccgagcgcatttgggaaagcaaaaaaggccacattcttccttttcttgccgatttgggcccttctccaaggaagaggaaaccccacacggg

SEQ ID NO: 129501 - DNA, 722 bp, Arabidopsis thaliana columbia
cagtaccgcgtccggaattcccgggtcgacccacgcgtccgaatggctctgttcacactgaacaacatatcccataacataaaaaatctattaaaaaaaaagagaagcaaccaaggcataaggtgagcaagaagcttcaatgccactagaaccaatcaacagctactcttacaggtgggtagttaactgtccttatttagaagctaccattgatgatcatcatcaaacatacgagaatccatctccttcttcttccttgattgagatggatccaagattgcctccttctagaagattcttcatcaaaacatctcatgaaaggatcttcaagatgcataacttcgtgtctatctccgacgaacatcactctttagttcacgccgacgagctcttccgcgacggttaccttaagccttatcgattaaagcccacgttcgcggctaccgaggaagaatctgagccgttggatacaacaccatgggagaagattgatacacgtggccttaacagcaagccttgtcctacttgttcaagagagctaaagagagtgcccaaatggcgttggctgaagtatctagatctcttgacgccattgtgtaagagattaaggaaatgtagatccgctgtaacaaccggaagtatcggtctggatttcacgatccgtgtaacgactttgagtaggagcagaagttattctgctgaaatgacatctccggccaaaa

SEQ ID NO: 129502 - DNA, 737 bp, Arabidopsis thaliana columbia
ctatcacgtcgcatgcacgcgtacgtaagcttggatcctctagagcggccgcccttttttttttttttttttttttttttttttttttttgggccacggaattatttacttgcagagaaaaatgacagattgaggctgcttttgcagggttaactcaaaatcggtaggaaaaaaacaatgggagatggtgcaaaggaaagggatgcaattcactctaaatggacaaccattctatgtgaatggcttcaacacatactggatgatgactcttgcagctgacaattccacgagaggcaaagtgacggaagtgttccaacaagcctttgcggttggaatgacggtaggcaggacatgggctttcaacgatggccaatggagagctctccagaaatctccctctgtttacgatgaaaaggtcttcaaggtatatctctacccctaaagcttcttccttgaagacttttctactacttaaaaggtttgagcaattgggcaggccctcgacttcgtgctgagcgaggccagaaagtacaaaatcaggcttatactgacattgggcaacaactgggacgcctatggcggcaaagctcaatacgttaaatggggaaaccccctccggccttaatactacctttccgaagaacgaactttttttaacccaaccccccacccctttagaaagaaatttcttacccaaaatcccccattgttccccgggggtgaaattaattttccca

SEQ ID NO: 129503 - DNA, 809 bp, Arabidopsis thaliana columbia
  unsure (1)..(809): unsure at all n locations
ttnnnnnnnnnnnnnnnnnnnnnnnnnnnnnnnnnnnnnnnnnnnnnnnnnnnnnnnnnnnnnnnnnnnctttttttttttttttttttttttttctaagaatttgtcttgatgatgatagattatttagagatagaatcgatgagaaagacactgaaatcccaaagtttatcggcgagagaattgttggtagcaaatttgctcggagcaacgatgttacagtcgccgaaatactttccggtgacgccttcgagatctggatgaagtgcaacgtagcatgttgttgctgctccctgaggtatatttttccaaaagaggaaagtcatagccctgaagaccttcatgctaaaaccggagtagcgaaagagattagtggtgacaagaccagggtgcaccgaatttatagtgatgttcacaccttcttcctgtagtctacgagagagtgcattggagtgcaacaagtttgagagtttggactgtccataagcccttctctccgaatatccagcagggtcattgatgccttggaacttgataccttcagagtaagtataagtatgagcaatagatgacagattcacaatccttccttggactccactttttcttgcggaacttttcatttttgtccaaaagcagatttcgtcaaccgaaaaatgacccaatgtgggtttggttgccaaattggggattcaaatcccattcttcggtggagcttggaagggacaaaaacataaccaccctgcatttgtttatgaaaaaatgttgagagggaacatttaaggggcaagaaaactgtttacaccgag

SEQ ID NO: 129504 - DNA, 762 bp, Arabidopsis thaliana columbia
cactatgacttcgcatgcacgcgtacgtaagcttggatcctctagagcggccgcccttcattttttttttttttatttcaaagacccagcgaacctatagatgcataacaagacttttaacaaaatggtaaactcatcattaccactatccagatgcaaaagataggtgaaactggttacacaccatcaagacgacaatgttcaatcataatctctaactacgacttgttgaacaaagcctgcccgtatgctgagagtggtatcataatgttccgtattcgtgttatatcttcatgggtcccaaatggctttacttcggttgtggtcggtctacagcattctctgatatctgggtaaactcatgggtaacaaaaggcttactagggttgtggttggcatccatcatgactcggtattatggataaacaccatgtgacacaaaaggtattaccaagggtggacggtggactcctaaaatggagttgtggtctgcgggttaactctctgaaggcacatagaagtcgactgttatagatagtctgtggttagccatactaaaaattacaaaacgggtaaatttcttcacctcgctcttgatggatttttctcaggtgaacagcacattggggttatttccaaaaacctgacatcgctacgttcatgttacccttatccgaattatctcatacctctaaaacacactaaatatgcgtagactttgtgtcctttcctaacggatagtgaataaaatcggagttctcc

SEQ ID NO: 129505 - DNA, 245 bp, Arabidopsis thaliana columbia
ctcactgtaatgttatgtttattttcgatgggtaattagtagtgtttttgttttatatgtattagttaatagttattgtatgtttgttgtttttataatttttatagtaaagtattttggttgtttgttttgttgtaatagttttatttctaggtctgtatttgtagaggtatatcatatgtttgatggtaaagttttgatagaggtttagttgttattgggatagattttaaatttggtagata

SEQ ID NO: 129506 - DNA, 811 bp, Arabidopsis thaliana columbia
  unsure (1)..(811): unsure at all n locations
ccattgtccgttaccnnnnnnnnnnnnnnnnnnnnnnnnnnnnnnnnnnnnnnnnnnnnnnnnnnnnnnnnnnnnnnnnctttttttttttttttttgaagaaaatcatctctttgtattagtgaatgtctgaatgactttaattacaaattttaaatctattcagacaaagagaaacagatcaaacgaaacaaaacagagacaagactatatatattggaatcttgtctgcgtcgaaacagaatcagacccatgaggttgatgaagatccatgtccattgctaacaaagcaagcgtaaagctcgtcgaataccaccacttgatcatcatgatcttcatcacaagaaccaagattagaattatcaacaggagaatcttgatttgtgaacagagcaagctgattccttgctctcttcagctcatcttggagaaactgcacttgatgctctaactttgccttgtcggagagagctgcttcgtgcttggactgaagagtgcagtgttggacctcaagagactgagtcttgaacctggctcgcttgttttggaaccagacagcgacttgtcttttgaggagaccaagctggttcgacagttgaagattcaaatctgggctaagcttcttgttcatagtgaagcacttttccagttggctaacttggtccttggggtaagcctcttctttcttgtttttaccccttgacttctggagaaattcctcccatttttttcctctttcttttttttgggttattttcctttttgggtaccggcaccgcccttggcggttcgaaccccccgggaaaaattt

SEQ ID NO: 129507 - DNA, 782 bp, Arabidopsis thaliana columbia
tatagaccagtcttgacgtcgcatgcacgcgtacgtaagcttggatcctctagagcggccgccctttttttttttttttttggcaaaagaaggtacatattaataaaaggaatctcagcagaaatgaaatgaccagggtccttacaattacatagagaagatcagaaaaattttaacattcaagaaacattttgtgtcaaagatttacttctccaactgcaacattgggcgaggctggatactcttcataccctgtgattccggtaatcctaatcctcgtattcggctgtctgtgaccgatatttctacggtacttcttcttaggcttgtacttgaagactaccactttatcattcaaaccttgactttccacgacagcatgtacagtggcattggtcacaaccggcttgccaatgtaagtgtgtgtctttgttccaacaagcaacactttgttgagaacaatctggtcatcaacatttgcatcttttagcctctgagtgtagagatatctccctggaaacactatgtattggcgtccaccaaccataataacagcgaaaatctcttctcgtttagctttttcctcagaaacctccgaaacatcgggaaaccacccacagcttcgaatattcggaggttttcgggttcaacttttcgacgaactgatttcctgcgaattttcggagacaaccgttaaatggcggttctaggactgtcaacgcagtgggaagggagaaaaaaaattcacgtcagaggtttaacccacattaaacgaaaggttt

SEQ ID NO: 129508 - DNA, 361 bp, Arabidopsis thaliana columbia
tcacgcgagaaagacaacgtaaaagggcacaaaatttttacaatagcaggggcaaggagggggaaaccagaaattacaaaagagaaagaagaacaatacgtgggaaacgaaaaaaggtataattaaaattatgaagaaggtaagagggaagaacaataaggactgtaaaaaaagaaaaataaaggggctcaaagcaaagaagtagacaaaggagacaatcgaggatagagcaggaacgcatgaaaacgagtaggaggaaaaggcgaacggaaggaagaaaaaggtaaaaggaaaggaaagaggagaaaaaaacgaacatttaagaaacgggaagagaaaacgaaaaggggaaaacaaaagg

SEQ ID NO: 129509 - DNA, 813 bp, Arabidopsis thaliana columbia
cttgacgtcgcatgcacgcgtacgtaagcttggatcctctagagcggccgcccttttttttttttttttttggatgcaaattatgaaaagctaaaccggatctgagattaccggatcttacaaagccaattgcacaccacgaaggttcttgaaagacatcatcctttgagatccccatgaaaaaagaaggaaggagaataaagtacagatgtggttacacaagtagatatatgatatctcttataatggttgggcaaacacaggtcacaagttatacgcatcaaacaatgtcactgcaccaattccagtcagtcagacccgggttttttgggatacctttaggttaccaagacaggatattttggtttctaaactttaaagcaatctgaaaacaatgttagacaatctgccagtcttttctatacatgtcaacaaactccgtaacactatcctagaacatcaccgagtgctatcttgaatactcatcaaagatgataacgaggccaaaacacctatcacttgtggggcgagataacctgatcaccacaccaatgcaattcctctaacatgtataccttatgactaaaaatggctccatgatttttctggaaacaatgtggcctatttacaaagtcacatatttgtattccacccttgtggcctgcggaattggaacccaattgcaaggttgcccaccttcgaatataaagaagtttatcaataccccgagggaatattcttgaagggttttcgcttaggggtttttaacaactccaaagtcttttccttttcttgtgtaaaccctaaccaggt

SEQ ID NO: 129510 - DNA, 814 bp, Arabidopsis thaliana columbia
  unsure (1)..(814): unsure at all n locations
gttnnnnnnnnnnnnnnnnnnnnnnnnnnnnnnnnnnnnnnnnnnnnnnnnnnnnnnnnnnnnnnnnnnncttttttttttttttttttttttttttcccggaaatttacttttattgggctaggcccaaaactgtatatctttgaatcatcgaaaaataattttaagatttttttttatctttacaaccagagattaagattaccaacctaattacatatattcccccacccaattatctaatcacccaatcaaaaaatccagaaccctttttgatctttaagcttggcatcttaagaaaaacgccaacagctttaaaaaacaagagcttgttgtggtttccttgtcctgtccaggcatcacgacattgtaacatttcctgtactgttcgcttcttcaactcttttagaagaagaaggagcttcttgtttcataaataatgcatagaagagctcgttccacgtgtcaggaacaccgggaaggcaccagtggttacagtcttggcgatgaagcggtgcaggaccatgcggaccgaaatagtagagtgatgggtgaccattttttttttgagcagccattgccgttatgttcaacagtttcactttaacagtttttgatctgtttgagtttattaacaaccacattttttgggattttttaactggtcccagggtttttgatgaaacccaatgagggttccaaattttttggtaaatgtcttaacaaatgaacatggtccctcccggtttttacaaattttcctttccctttaaaaagcaccggggggccgaaaagttgcgaaaaaaaaaaattt

SEQ ID NO: 129511 - DNA, 737 bp, Arabidopsis thaliana columbia
tacactatagaccagcttgacgtcgcatgcacgcgtacgtaagcttggatcctctagagcggccgccctttttttttttttttgtaatatatctctttaattacattaccttaagaacaagatgcattttcagagccataaagttgaatcattatatgcacacaaaagactttcaactttggtcacaagtactctactacacgcctttgcttaagcttggagtacagatatctgaacatttggggaagcttttccttcaagtctccgaagttcagtggcaatgtcgtaaagagcggaaacgctatcttctgtttgcccatatattttcacttgttggagatgtagcattctcattaaaaaccaccgtacttgcttaccaaattgggctgcatcctcagtaacttctcctttttttttcccaacaactacttcgtatatctctaggtgagtaacaggagattttactaggtaagagattgcctgcttcatgttccttctgcagggacacacattaccacacacatttgtggctaaatggaaaagccccttcaacaaaagggttttcaaaagtgggcatatacttaaaaggttatggaaatccgatcccaaaccttaattttttgggaagccgaggggtttgaaacccgggaaatataccgggacccgggtacccctgggaggggcggttacccacaagattttacccccttattataattgagaggtgcggtcaattt

SEQ ID NO: 129512 - DNA, 329 bp, Arabidopsis thaliana columbia
  unsure (1)..(329): unsure at all n locations
acacccttcgatgtcagctacacaagctggatacctagagcggccgacctaacttaataacccgctaattttaccaatattgcaacccaaaataacgggatcccatctgggggcgatggcatacaaaggggagtcggacgccccgcgtcctataaaacatacattcacccaagacacgaacatgggtcaattagtcccttgcaagagagacctacactaatatgcaatcaccctctgaattcgagtaaccccgcctaagcgagtcctcagaaccaaattggtagattgatancagactcactaatgactttacgatatgcacgtcgatg

SEQ ID NO: 129513 - DNA, 819 bp, Arabidopsis thaliana columbia
agctatgcacgtcgcatgcacgcgtacgtaagcttggatcctctagagcggccgccctttttttttttttttttttttttttttttttttttagagaaaaaatagcaatcaagttcagaggtaacaaacagaattgcatcaagttttgatttaaaataaacaaaaaggattcttaagtttttagagttttaaacagccgaatgaaacatcaacgaacatactctcgcgattctgatctcttagaccgcttgtactcacgttcatatctgaagtcatcttcctccattttatcgtagcgatgactgtaccggtctgtgtccccttgatcgtcttcatagtagccacgagttttttctggctcgccacggtactctgcatttttttcacgggaccgaccaccaccctcatgctcatattcacctccttcataatcccgctccttctttctactgcggtctcggtcatgatcccttgaagtacgatcccgtcccctgtcacggtcacgggggtctttgtctcctttgtcacgggtccggtcacgatcacgtttgctgtccctatccctgtctttgcctccttggtctcgggctctggggtgcttatcctcttttgggctgtcacgagaacctctttcgaggttgttcgtgagacagtttcacgagaccctttccttttttttttccccttttccccgagaatttcttcacgccttttttcccggtgggcctctcgaaggcctttccttctggacctggggaagggtttcttttcctttggcggggttggtttgtgtttccccaaaaccaaatttttttttcc

SEQ ID NO: 129514 - DNA, 834 bp, Arabidopsis thaliana columbia
cttcacgtcgcatgcacgcgtacgtaagcttggatcctctagagcggccgccctttttttttttttttcgatataaatttattttattaatgtgtctaagcagcaaaagcgcaacggatgtgttcaaatcacaacccaccgaaaaaaacagatacgtaaatccgagagtacattaagcaatcatatgacaaagttcaaatgcaatgcgacccctccagcccccaaccaaaaacagccatgacttttggggagacacacacacacacacagagcatacgtcacagcttaagcatcagcaaacccaagctcagaaagcttcatgtgggcctcagcgtaatcagcgaaaaaggcattttcatcagcagcgtttttctcgaccaaaggacggaaaacagggtcgtccaatagtgctttgtcagagacaagctgaaaaaggccttccttctctccgctcaagagttccttgaagtaagagatgtcgaagattaaagggtttgatgtccatgcacctttgaagccagacctattcttgtgggcatgttccaaaatgggggcaccatataaagcgacaatgtttttgttagaaaaaccccatttgttttagcaaagaacatctcttaaaatgggtcacaaaccctttggttaggctttcagggaagaacgaccccttcttggagaggtgggtttgagggcctttgttcctttttctttcccaatgggtgggaaaaggggaattgtcaatgggccccccacaagtaaaactttttaaaaggggcgaacataaacaccccagtaaaggcttgtatgtgtgaaattcctccctaataaaaaaaa

SEQ ID NO: 129515 - DNA, 818 bp, Arabidopsis thaliana columbia
ctatgacgtcgcatgcacgcgtacgtaagcttggatcctctagagcggccgccctttttttttttttttttttttttttttttttggaggagaaaaatgcatagtatttgagattaagagtatgaagatgatgtccaaggaaaactcataggaaacatctaagtgtacatcatcttgattttgcttctctttgctctgactctgacccaaaattgtgcaaatctatagctttaacactcttactggtttgatctctctagttatttatcagacaggaatacaataaacaccacactatatgtatgtacctatgtgggaaattacactaaagcagcctcctccacattctcagcgatcttgcctttgacaaatccaacataaaggtcacttccagttgtgtcttcttttgagagtctcctcccatgaccaccttccttcatgttcttaacaaactccactaactgctgccaattttgaccctcaaataaccgcttgttcattcttaggtaaataaatgcggttaacccattttcagaatctgacctatttgttgctaccacttgtccgaatgcgcttgagtcatatcggtatagcgcgttctcccctgctagttcggttccggccctgcttgtggcgtttttgaccttgtttgacccagacctttttgggggagcaaatttcggggtgcttaagggtttgcttcccccgtctttttattttttccattgccagggtggaaaatttgaaaccaacaaactttccattgtttttgggtggaaacaatcttttaaaacttatttggggcaagagaaaccccc

SEQ ID NO: 129516 - DNA, 767 bp, Arabidopsis thaliana columbia
  unsure (1)..(767): unsure at all n locations
tnnnnnnnnnnnnnnnnnnnnnnnnnnnnnnnnnnnnnnnnnnnnnnnnnnnnnnnnnnnnnnnnnnnctttttttttttttttttaggtttaactttttattaatggggataattttgggttcgaacaagagagcaaaaaagataaaactgtaaaactgctaaagaaaaaagaagattctgttggatatggtgaagaagagaaacgctcctactcaaattccgaaacaaaactcatgagatttctacagctcgtcctttgcggccgtttcctcggtcttcttaggttcctcactcttggtagactcttctccatgagaagttggcttcttctcactgttcttctcaacgaagtttatgaagtcttcctttgtcctgtctccttcgtacactacaacatttccgctcgctgacctgaagtaaatggtcgggaatcctttcacatcgaaggtatcacttgggatatcatttgcggttgcgtccaattttgctatgatcacacttgggtcgttctggaatgacaaagccacttcgtccaagattggagcaagtttttgacaatgtccacaccatggtgcatagaactcaatcaagacatttttttcagactttgaaactttttcgtaaggcttttgggaacaacaaccttacagggttgttgtcttactggaataggtgggatttttgtggacagaacttttccgtcctggaagtcttgaaccatgattaaattggtaaccctaacgttgactttaaatactttttgtt

SEQ ID NO: 129517 - DNA, 1094 bp, Arabidopsis thaliana columbia
cgcgaccgcgaagcccggaaccctcttatagcggtcgaaccgtcaaccaataagacgctttttcttttttccacatacccctcggaccactcgggcggagggccctcacgcgaaatacccaaccatctcccaaaacggggaactccgagaacagaaagagccaaagcctcaattggacggatcaaatccggcccaaccgcgaggtctgcaggcctggagcccccgaggaaggacccagggacacgtccgagagacagcacgccccagtttcaccacctctcctgggcagactcagactcaccaaaagacaagaattggaacggagagaagttggtcgtgcgcaccaatagttcgtatgcatgacacagatgaactgctaaaaaacctgcgacctcagagcacgccaccgaagggactccaagaggagcgcgactacaagcggctgtccacaaccgacagtgacggcaacaggcggagagcagcccactaatccagcggagagacagacaaatccacccgcaggaatcactgcgggtaggaaacagcgatatgcaagatggaccaccagacagggcactcgcttaacccctgaagccattgaggattcccctgcggcctaagcaagccgaagaccctggactaacacgggggacgactacgcgagcgacggtcaagagcctagggcgggaaccagatgcacaccgccccgcctccccgcaatgctgtcagcgtgctgtgatccagtgaccagccagagaccccgtaatccgttggtgacaacaacccgcctccttccgcgggcgccaacacaagggtgagaacgaggccagcgcataccatggtgggcagagacgatgcccacgaggcgagtcatacacgctgagtgttgaaactacacaagactgtgcgaacacaccgtagcgagactaggacagaagaatcgggcacagccacgcgcgaacgacgaccgcaccgctgagtctgtgaagagccctggacggcctctgttcaccaaagggcggagacgcgacgctgtgcggaactcaccccgtagcgggcgcggaaacagaccagctgactgggaaaaactgcct

SEQ ID NO: 129518 - DNA, 821 bp, Arabidopsis thaliana columbia
  unsure (1)..(821): unsure at all n locations
nnnnnnnnnnnnnnnnnnnnnnnnnnnnnnnnnnnnnnnnnnnnnnnnnnnnnnnnnnnnnnnnnnnctttttttttttttttttttttttttttttttttttttttttttttttttttttttttttttttttttttttttttttttttttttttttttaaaaaaaacaaaaaaaaaacccttaaaattccctggctttttttttgttcacccttccaaaaacaaaggtaggggcttttgatacaagggaaaataaaaatttcaccggggggtacaaaaagaaaactggaatcccccccttttttttttggttttttaaaaaaaaaaaatttttaaaaggggggaaaaaaaaaaaaaaatcccaagttttgttttttttcatggacctaattaaccggggttttgcaatcctgcgaaataccccttattgggaaaaaaaagggtgtcctaaaaacccgggcggtttttcctcgggggggaaaaattgaaaaacttttgggctgttttgttggatgggcagatttttttaaaaaggggggggccaaaaatccaatttgtttttgcatcccggtccccttttaatggtggagctcggaaaacacttggggggtctaattgaaaaaaaaaccctcccctctaatttttttgtttaaagaggaggggtttctcttttaaaaaaggggttttttttttcccacccactttttgggggggacgaagggtttttttggtgtataaaaaaaaaaagagggggctctttaaaatttttttttttccaaagaaaccccctatataattatttttttttataaaaacaaaaa

SEQ ID NO: 129519 - DNA, 1060 bp, Arabidopsis thaliana columbia
cgcatgcaccgccgccctacagcctggaaccttttaaacggaccagccctatttattaagacggttttttttttttctctcggcataaagctacccatgcttggattcatcccttttcacttttcagtctatctaaaagaaaaagctgatagggggcattcaaatatttggtaccccatttgtatcgatcaggctgaacgaggccacctcgtatcatctttgctttctaaataaccctgagggcaacatcttagtacctcattgatgtgctctacaagatccaacacactgcttagtagtcttcatccaacggccctgagctagatgcttactctgaaaacaccgatttggtcccgggtttgggcaccacacccagtaaaacctaccgggtgcagatcttttcctttgatacacccatacctttagttgtcagtacactattaggcaactttcactaggatcacaggcacactgggtactccaataagaggctccccccactaaccagtaagcttctctcccaccaaagatccaccgcgcggcttaacatccatctatagaatcctgactaatggcggtaatgggtgcactcctcttaaagatcagtgctatactcgggagctatagattgatctatcctgcgaccctcgggtgattctaattaaaaaaatacgcccgtgtgcaaaacacagattgttggggtttttatattcttccacccactcattattattaaaatcatttctctcccaactgggcgctcctttatcggggggggtgcaacaccaatactaccctctttatggaaggtcgtcatacctctttttgaacaagctcaataggaccatgattctgcatcactctttctcgaatttcacttaacgtcaattttatcttgaattctgcagctttcctaccacctgtgactcaggaacacatcttcaattataatatttcatgtgagtgtcgttgcgaaggaaactttgtctttccttcttaaatctgttttatctctgacgaagcatccgtttgtccatataaaagtatcattgtgaactct

SEQ ID NO: 129520 - DNA, 736 bp, Arabidopsis thaliana columbia
gctatcacgtcgcatgcacgcgtacgtaagcttggatcctctagagcggccgcccttttttttttttttttttaaacaaaaaagaagttgcattattacaagggagtattaattaaccaagttactctctagacaaaaccacgttcaaagccaactcatgtcacatctctcctctaaacttcaaagccatcacatttacatcacatctctatccatatacacagatgtgagtgtcttaagtttcaaaccaaagaaacaaaaccagagacgatagacaaacatggtaagagcttaatgaaaacctcaatctacaagggacatggttcgattctgttttgggatgggctctatgatatgtggagagacatgaatgaaacaatgttgtgcacattgatacatgtgaatagtgaagaaagaaacaaacaaagaatgaatagtgaaacatctacagtacttggagttgcaatgcaaatcaatgcattgtcgtgtgaagaagatagctggatatgtttgtcacttgtgctgtcaacagctttaacagaattacctgatttagggtcagagacattatcagctgtgttagacaatctccatgctgctctggtttctcttgttggatttcgaagagaaagcacatctgggacccagctcttttttttggcttaaacccatttagaggatttttcgcggtttttttccggtcttcccaccaaggaatccaatttcaatgttattt

SEQ ID NO: 129521 - DNA, 737 bp, Arabidopsis thaliana columbia
  unsure (1)..(737): unsure at all n locations
nnnnnnnnnnnnnnnnnnnnnnnnnnnnnnnnnnnnnnnnnnnnnnnnnnnnnnnnnnnnnnnnnnnctttttttttttttttgcttaattcgttctttagttataaagctaccaattcatagattcatcccttttcacttttcagtatatataaaagaaaaagcagataggtggcattcaaatatttggtaccccatagatttttgttgggcgtaagtgttgaccgttcagcttgctcttaaattacctgagtggctaatctaacgacccatgtaaggaccaccatacccagcaccatgctgccctcttcccgcaccgccctgaccaggttgctgagtctgataaccgccctggtacccggcttgagcaccgtacccaggatagaccccaggtgagatatttgcttgagtaccatagccacttggcattccacctacagctcctgggctagctgtccctaatgtccccaacaaagcctgcccaaatgcttggtttaaacccaacccagcaccctgagatgccagcaaagctgtgagggcctggccaatggccggattaaacgcctgcacagcttggttattaccagctatgaaatgtccatggcctccaggggcaccataaccaattggtggtcgttcctttggtaaccgggaattttgattggtgagaagttatgggttaatgttgaatgttgctttaacccctgtttttgggccccaatcaattttgccttttt

SEQ ID NO: 129522 - DNA, 677 bp, Arabidopsis thaliana columbia
  unsure (1)..(677): unsure at all n locations
tnnnnnnnnnnnnnnnnnnnnnnnnnnnnnnnnnnnnnnnnnnnnnnnnnnnnnnnnnnnnnnnnnnncttttttttttttttttttttttgactactttattgagatttttaatgtatattgatttcttttatttgatagtctgttgtttttttgtggttaacaaaacccgaagacaaaaaattgcataaccacggccggtgttgtgggattcccctcccaaaaccacttctttgaagaaactggcgatggaaaaggaaattttcatgcggggtgccaaagagggaatggtaacccaccctcatttatttgggtctttagaaagaaggaggttttttaatgggggatgaaaaaaacaagagttccaggcactggctttttgtggtgggcaaaataaccggggatttgaacaacaggacctacccctgtaggggtaaaaacagagtgggccctaaagaaccctcttatctcatcgcgggcgtagaaaacgtcagcttcttggggagggtgtttttttatccaggccccctcaaggaataagcggggcataaaaaaccacaagcttgggggctaccgcgctccttttcaggggtggtggcgcaggccaaaatttttgcggggtttggccttaagaaaaaaacgatccccccggagaacccctcaattttctgtgtttt

SEQ ID NO: 129523 - DNA, 783 bp, Arabidopsis thaliana columbia
  unsure (1)..(783): unsure at all n locations
cgttnnnnnnnnnnnnnnnnnnnnnnnnnnnnnnnnnnnnnnnnnnnnnnnnnnnnnnnnnnnnnnnnnnnctttttttttttttttttttttttttttaaaaaaaattaaccatattttacatgaacaaattattcatacatttgggcttaagagaaaaatggttagcatttagcagcatctgactgatgtcgtcatggatttggtctatatctagtatttatcatgtcctctaagacaaacggaatacacaagtatgcatacatcaagacatatattgcatacataaattaacacataagtttgagcatatctcttactaacttggatcacagtggaggtctctccaacgagacatacccgaatttgcctttgcgaaaatccgttagtattctaaatgcagcttgatgactatctccaccaaacaaattaagaccaagcgtcttcacaaattttttcccgcagttgccttctagctggatcttgtatcggttgtaaagagcctttgcgcctacttctggaatccgtgctaacatctgcacaaggattccagcaacatcagtgaagtcataagctttctctccaatgtcatcacaaattgccagctttatagcagctgcttgatcatcgatacgcatagggaagcattcccaggtgaaatttaagaggatcacagatctttttcccaaagccttttgaccccaattttcatttttcttcctagggttaaccacccctgggtcttttggggaagctttggtttgccgccaaaaaatttttttt

SEQ ID NO: 129524 - DNA, 736 bp, Arabidopsis thaliana columbia
agctatgcacgtcgcatgcacgcgtacgtaagcttggatcctctagagcggccgcccttttttttttttttttatttggagacatggcgatcttttcttgatttacaaattaaaaatagcactttctagggaaacgagtctgtaaactggcgattatggcacaatccccttcacgaggggggaatgaacaacacaatccccacatttttgctattcaattcacctgaaaaaaaatataaaacgcagcataacctgacaggccatacggttggatatggactaagagccgacacttacaaacatatttctctcatccttcaacattttttactaataagtcttaagaaacagcccggccatagcttatctatgctgggtagatattcttttcccatttttccttgacgtgagtgctgggaaattgagacgtacctaacgtcttttgtgtctaatcaacaagtctacgacgtgggatgcttaagaagacaccaaatcgatccgttgcggctgctgctgatgtgaaactgacttcaccattccaacgccagcgggttccttcactaagatacagtaaatgaagttccacaacccgaacactgtttcccacaatttgtttttcattttcgcgcccccaaccttttttcccgctgcccgccattcccccgctttccttggaaaacccttaggtctccccattttttttgtttccggaaccacctgggggaacccgaccccc

SEQ ID NO: 129525 - DNA, 779 bp, Arabidopsis thaliana columbia
  unsure (1)..(779): unsure at all n locations
cgtttnnnnnnnnnnnnnnnnnnnnnnnnnnnnnnnnnnnnnnnnnnnnnnnnnnnnnnnnnnnnnnnnnnncttttttttttttttttttttagcgaggcaccaagcttctcattttttgccataaagagtcagattcatcggaattaattgcacaaaatgatgagaactcagaaagcatatttcttgccaataagccataaccaacccaaagaaattcctacaactgctcctcctaaaataaaaaccaccagcaaattccctaatgcattcttctccggacccttgtacccgttaggggctatagtcataatgcaaacagtgagatgtccagtagttaatcccaaaatagaaacgagcataatcatccatcctttatcaccatattttgcagtgaaatagaatgccggaacgaggaaataacgggtcaagaccgcaatcgttagggcctttctattctcaagcttcagccatttcaccagcggtgcgtacctcccgaacaaatcccaaaaattgtatgtcgctactaggataagtgcataccaatcacctagtccgtgttgtcccgtgttttcgtataagaatccaggaaaaatggataatgtcaaaacgtagatgaggaataaattcactgcatggctattgtttgaaacaacaactttttttttcttaacatttgattctttgaaatcatcattcaactcaaaatctgataaaaattttgggattcccagccggccagcaaagaatcaggcaaacaaaccagtttttagaatccc

SEQ ID NO: 129526 - DNA, 789 bp, Arabidopsis thaliana columbia
  unsure (1)..(789): unsure at all n locations
cgtttnnnnnnnnnnnnnnnnnnnnnnnnnnnnnnnnnnnnnnnnnnnnnnnnnnnnnnnnnnnnnnnnnnnctttttttttttttttttttatcttaaaatccaaaaagccattataaggtttgcttaaacgagcattcgccctccaaacacactggaaagctataataataataatccataaatgtctgagaaaaaacacaaacgatgcagaatataaaaagtaacctaaaggtaaagcaaattccaaaacttgacagagattcttcaacggatccagcatctgttttctcttgttcggattcatcaacgcctgtcggtttttcctttccctctcttgcctgaaaacaaatgtttcggtctaagcgttggtataactctgtcagcttcaccacgacgtgcattcttgtctctctttttgtgagatttattgctaatcttaatggccgataacttctgagtagagtctttgaatccttcaccaggcacaacttcatgtgcaggaggcctcgactgagatcttgatatcgacatagctctagactttgatctcacacgctgcttcttgttcgactgttgctcatcatcaacgtccatagcattattacccgcattttctgatcgaacccttcttcctcccctctaaacttggttttttgcacgggcccaattgcaaaaaaaacgggatcaaagttccccaattagctggataaaacttccccttaacaccaaattcctatttattgtgtagtggggggaacacctattttttggtgccctttaaattac

SEQ ID NO: 129527 - DNA, 786 bp, Arabidopsis thaliana columbia
  unsure (1)..(786): unsure at all n locations
ccgttnnnnnnnnnnnnnnnnnnnnnnnnnnnnnnnnnnnnnnnnnnnnnnnnnnnnnnnnnnnnnnnnnnnctttgttttttttttttttttttttttttttctttttttttttttttttttttttttttttttttttcccgatgcgttttttcccaagggagcaccagccgtaacataaagaatcctttattggattacaaaagaaccgtttcacatgtttactttttgaaatagaacaaccccgcaaaaagccaaaaactaaaccatacgaaaagcccaaaggcggataggtttccgtttttctatggtaaaccaattttcttttggggggaagaggattggatggatttatggatcactttggaaaaatatccccctcacgaaaaaggggtcttttaagaaaaccttgttcacaaagttttccacaaaaaatcactttgaaccggccccttccttttctcagctttcaggggcttttaaaacaggacctaaaacagggatggccaattctcactttttttcagggggggcctttaacatccttacggggatttttttttccaggcgtggcctttttatcccccccatgggggggatactggcccggtgaagaaggggaaaaaacccgaaaagtgttgggaaaaacccccgccccttggggcgttgtaaaatggggctttgcccccctagaaaatttttggggccctcctggggaaactggttttgtttggggcacctttgaagagggtgagaaaaaaaaaaatggggagaacaggcgggggg

SEQ ID NO: 129528 - DNA, 792 bp, Arabidopsis thaliana columbia
  unsure (1)..(792): unsure at all n locations
gttaccnnnnnnnnnnnnnnnnnnnnnnnnnnnnnnnnnnnnnnnnnnnnnnnnnnnnnnnnnnnnnnnnctttttttttttttttttttttttttttttttttttttttttttttttttttttttttttttaaccataaacatttataaacattttttttaaacaaaaccccccccaatacttgacaaagcacaacttatatttttatgccccaatatatatataaagtttttttttttccttccaaccaaacaaagaggcatgtactataaatacattataaccccaacccaaaaacaccaaagggggctaaattttaaaataaaaagacaaaaagggggcatttaattatttaaaataattttattaaccaaaacctattgttattattacccataagggggggggtagggtaaacccaacccccccaaggagaaacattactcatcatattcaaattattgtaatatccggcgaacccaaccgcacgattattaaaaccacaggcgtgggtttggaaaaaaccaaatcctgcaccggtggattgaacaaaatcaacgattttttggaaagattggagtctggggctaaacttcttcatttgtagggggagaacaaaattctcggcttggattttttatgaaaagcttgaaatgttaccgggggggggtttgttcacaaaaatttgtacgggtgtggccaattcggaaaaaaccctgattttgaaatctcggaacccccggtttataaatattatccaaacaccgtgtggtttttattgtgttttcacc

SEQ ID NO: 129529 - DNA, 787 bp, Arabidopsis thaliana columbia
tacactatagacgagcttgacgtcgcatgcacgcgtacgtaagcttggatcctctagagcggccgcccttttttttttttttttaaattttaacacccatgttttgattcaaaagaagagagggagatctttgtttgttttctctgtataatcattcagtctggaaacaaaacatagcaaatcatgaactaagacatatagaggctttttgtacgctcagtttagcttaagtatcagatggtttctctgcggtttttccttctttgttgatgtgaaagccttcaatcttctttgaaacttcatccacgctatgcttcactctcctcgagctagtttcgttctcttcgggatttgctggtgttgtttgccagattctgattgtcccgtcttcagatcccgaggcataggataaaccagtgggagtaaacctaacgcagtgtactggaccgtgatgtcccttgttgcatccaatctcttcgccagtgtagaaatcaaacactcggacccacatattctctccaccagcaacaaatttttcaccagactttggctccaacgatgcagattcaatattgcagggcatgtcgtaactcttcactagtccaaaatggttagcgtcccagaaattaacagtttgacccatcagcagttgttatattcccgtccctttttggctcactttaacacttggtgacagggaaaacttagtttcttaaccgtttggcaccaatttttccccactcccttaacattccccaataaccttaccacccccccattttcaagt

SEQ ID NO: 129530 - DNA, 837 bp, Arabidopsis thaliana columbia
ctatcacgtcgcatgcacgcgtacgtaagcttggatcctctagagcggccgccctttttttttttttttttttttttagcagcaaactattctggttttaatatatgcatcaattgaagttaacaatacatgatatacactgaatcagaagagtttttgataccaatgctgtaagattaacaactgtttttggatagtaatagtcctgtgacctcccctctcacagtatggactggagctgctttatctcagaggattctaaatcatcacttcccgcatcttcttcagatgctgatctgtagacttccaccatagctttccctttatcaagcacttgagaaggaactgtttgtagaagactgtccagtgcggttaacgctgttccaagctgtgacttcatcaatacaacagttgcatttgaatctttcctcgacgcacgtagaaacaacgaatccagttcttccaatgctcttaaacatcgatcaacatcatcagtggcggttttggagaaaccatcatctgaagcatactgagcaacagctcgaatgttttacacgaagagagctagcaggaccagaccgcaattggcgtctacccgcctcaaaatcaggtttctccacatttaaaaaattcccctcaagaatccctggattttgtaaacttgaacctagaaaatcacctgggtgggtaccattaatgcctttaaagggtgggaatccaagggttttctttcccttctttgaaccggtatttttattcccaaatttttaattccaatttaagagcccccccacgcccattaggccattcctttttaggggaagggaaggaaaggaa

SEQ ID NO: 129531 - DNA, 797 bp, Arabidopsis thaliana columbia
ctatcacgtcgcatgcacgcgtacgtaagcttggatcctctagagcggccgcccttttttttttttttttttattgcagatttgttatacgtttttatttcctttgataaagactgaaataagtattgtcacagtagagataagagacgttgaaacatgaaaccattagtaaagattcactgaacatcatttactttcaagaactgctttctcctgattgtgaatcggtaagcttggtgctgaaatcccaaaccttcttggccaattctgtatctttgacaagtggtaatggtttagcaatgttgctatcttggaagtattcccctgaaactcctgcaacttgaggattcaatgccacatagcaagttgttgccgctccctgtggaacagacttgagtatatatttagccactgcaccaaccgctacagccaaataggggttgaagtagcgcccgaggttagtcataatggctcctggatgaagcgaatttgctgttatattgactccatcttccttcagttgctttgtaagctcgttggcgtgcaacacattgcagagtttagattgtccataagctcgcatactactggaacttgacttgtcattgatcttatcaaaacgaacttcttttgtataccagaacccgatgaggcttttgatgataggttaacaaattcttccttctccgttggcttttcaccgtgatgtgcctcttcaatttggatcctagccagaaagttttaagttaaacacgaaaaattgacccttaaattgaattgggttggccgaaattgga

SEQ ID NO: 129532 - DNA, 765 bp, Arabidopsis thaliana columbia
gttaccctatagacgagtcttgacgtcgcatgcacgcgtacgtaagcttggatcctctagagcggccgccctttttttttttttttttcataacattcgtagcaacattcaaagaaagccgaatccaagtatggcttaagcagaggtgatgatgtatatacaagtcaaagaacttaaattctttagaacaaagttttaaacttgagaaaaagctcttcttttaatcgaatcaatgatacccaattggagctggagcttcctttagttcacgaccttggtagtgaatatcagatgcaaaatggtttacatcacggtgatgagcctcgtcagcacgaacaaccatcacaacatcacgaagtgtcgcatcagcaggaagcctccagtaatcaatagcaatagccggagcaggaacattctcaatgttacctttgtcaagttccttgagaaactcagtataagaatggatcgcttcttcttcaaggtacccaaccatacgatgagcaaacttgggagagattaagtaaccaaggaaataagcgttgaagaagactccttgcacagtgatcacgagcgctcttttgtaccattttggtttcgcgacttccatgaatgtcataagatgcattctttcattctctggttcctcaagaagagccctaattcatccttcactttggtcaaaaagttaaaacgatttgcagtgtataacatttctccaccattccagtactgttgttcagtttaagcataatactcgcatccata

SEQ ID NO: 129533 - DNA, 803 bp, Arabidopsis thaliana columbia
  unsure (1)..(803): unsure at all n locations
tnnnnnnnnnnnnnnnnnnnnnnnnnnnnnnnnnnnnnnnnnnnnnnnnnnnnnnnnnnnnnnnnnnnctttttttttttttttttttttttttttttttttttttttttttttttttttttaacaaaattgcaaaagctttttttagaaaaaaacataaccgttaacaagaccaaaatagacaaatcgaactttcaaaaatttataactgttttcctttttttggagccttttaaccaaaatcactcgtacaattttttggccgaaagagttctgagggttttggttttgtcctttggagctttcgcttaatacttctcgctcaacgctatagctttagccacgggtttcatcttccttgcattctttggtctcttcatgtttggcgggttacaaaaaagagtagctagtttcagggatccggtttccggagctactttcaagtctccggtttccgtagctagtttcacgtcaccggtttccgtagggtccatgggtaccgccccagctttcatattcattggaaacttcggtcttttcatcgggtttcctttcctcgggctcatcaagctacgagcacgagaagcttgtttcccgtcacacggtctccggagggtccatcaccttgggggggtggctttagaagacgctttttgaaattttaaaaaccctcccatggggagagcttcccccggccttttatttcttttctgtggggccctccttacttttcggccaaattggctcgaaattagggggcaaaaaacccccccgaaccgggcccccgaaagccaaaaagccaa

SEQ ID NO: 129534 - DNA, 727 bp, Arabidopsis thaliana columbia
agctatgcacgtcgcatgcacgcgtacgtaagcttggatcctctagagcggccgcccttttttttttttttttttttttttttttttttttttttttttttttttttttttttttttttcaaacatttagcgattttcacaccgacaaagagtaagtcgagaggctgttgtttcccaaagctaatattggggggttatcagccactatgggagtcatcgactgtacatgaaagggttccaaccatggttttctttgttggggagactttttggggtggtgggggaaagccatattcccaggttgggaatagggggctaacacaatactcaggggggggaagggaacctttccttaaggggggggggagaaatttggtccctggatcgaaaagcccgttttccttgggggggactaaaacagggttttgttttttgggaatttcgaaaaccttgggggcctcctggggagccttaaaaccggtggggaccatagcaccgaaggtggggcccatgcggggggttccatcgacctgggaagggtccatgccaccaacgattatgccgggcacaattttacgaggtgttttgacgaggggatcctgggcagcttttatgttaagtccccgcataccctccgggtttttttgaatcccgttggatgccttaccgaagggcgctttgtaggggaaaaaaagcttcccctgtgggggacacatttattgggccc

SEQ ID NO: 129535 - DNA, 833 bp, Arabidopsis thaliana columbia
ctatgacgtcgcatgcacgcgtacgtaagcttggatcctctagagcggccgcccttttttttttttttttttttttttttttgaaccaagacttataaaaaatttttttaggaggctaaaagttaaaatgttaacaaaaaaattgcatagcttagtgtccgtttaccaagaatatatgcccttaagcctaattttacatttggatcgacccgcaaaaactatgtgggttctgattgggaaaatcttgtgaaaataaccaagggtggctatactggaacttgcaactgtccatttataattttaaatcgaaagtctttgattttaaatgcttgcaaagggagacatcggcgtccactatttcatcttctgcgaaacactttggaccaacctgatggcgctttgggtttactctaacctgcacagatttagtttgaactgaagccacaattttaattgactgaacggatgttgtactccttccaaaattaaaagatctatccctgaactcgagtggagcgattctgaaaccattgcgagcaatgggttgagaaacaggaaatcaaatgactttggaacctatgcctttgctttccaagaagaaaccctctttaacaacatgaaagtccaggttttgtgaatgtgcgcccatttaggaggaagggatttaaaggcgcaacggctcgagaaaaagggccccggatgtaacaataatttgtggtctccttaggggatacttttggcccctctaattgacacaaaaggactctttttcttgttttgcccaaacctttttttttatttaaaaaaggttggcccccattggtccctttttt

SEQ ID NO: 129536 - DNA, 717 bp, Arabidopsis thaliana columbia
tacactatagaccagcttgacgtcgcatgcacgcgtacgtaagcttggatcctctagagcggccgccctttttttttttttttttttttgaaatttaaaaaaggggggttcaaagagagaatttccacagttccatctaacttcttatgaacattaacaacaagttgacaactacaatttcacaagcagaatggtgctaattactttcaccattaggttcactactattacattaagaattatttttttctttactttgtttttgtaagccgaaacccaatttgttcaaaaacatggctcataagatcatgatactcctttggattcaaagtataggtagcaagccagaaggtcttccaagtctttcgaagctttgatgttggactcttctatcatcccaatcattgattccctgaaatctttctttggatcaacggaccgtttcatcacaggcaacctctctagaacataatgtttgctctatgatcttctagacaggcttctacgagttcctgagagttgaattctaggtgaattcactcttttgaggtttatcccaacagatggttttcttgccctagaaacttgcctttggtacttgttatccgctttatatacattatcatcttcatctcttgaaattctcacaagaaagaagggtttttttgcggcttttttaataggcttttgtttgaccgtaacaaagccttttttttt

SEQ ID NO: 129537 - DNA, 837 bp, Arabidopsis thaliana columbia
  unsure (1)..(837): unsure at all n locations
tnnnnnnnnnnnnnnnnnnnnnnnnnnnnnnnnnnnnnnnnnnnnnnnnnnnnnnnnnnnnnnnnnnnctttttttttttttttataaaatcttatctattctcaacaaataatatcgtataacataactcttacaaaaaaatatcaaaataacaattaaatagaaataacaacatcaaagaataaatatcatatatatcgtactaaatacataacatttagctaactcgccgtatgtaccatcgtagataccaaacattataaagattcgtaatagaaccataattctcttcaacataatcacatataattttattgtaacatactaaatatttgatcctcttgtgttgataggttctcatctaaacaacactaatgcgaacagtttttttaacatagtaggaatctaaggtgtaaacatttttgtgtcactttatccaatccgataagtaaaatgtgaatattatatacatgatgtgggaccttgttgatgaaactaacattgagttagagatgaaaatacaacaaaatcatatttgagataccaattgtagatgaaaacgatgagaaagtagatgaggaagaagaagtctaagacgataaagagaatgaacagaaagaggttggggattaccaaataggacctttgaagatgaccatttaaaaaaccattggtaaaagggtagttgccaaaaaattaacatttatacataagatgggacctgaaatttttttgtttaagaaaaatataaggaacatggaccgttggttaagaggattttttgggtgaaccacctttttacttttacccggggggaggctttaattattgaaaaa

SEQ ID NO: 129538 - DNA, 814 bp, Arabidopsis thaliana columbia
ctatgacgtcgcatgcacgcgtacgtaagcttggatcctctagagcggccgccctttttttttttttttttttttttttttttatttttttttttttttttttttttttaagggacattcatttcaaatataaaaccgggttggatattatacctcaagactcccataaaacaaagagctggttttacaacctaggaatgataaaaatacttaaatacataatcattcaaatggaacaatgttttactggaatagcaacttcaacgagggtcaaaatctgtaatggttacatcattgatagtttggggattggacctgttcataaagtcaaggccatttcgttcttgggtgcttattattggaaaaaaaaatccatgttgttgaggatcaggtaaaacataccaattgtttatgaacatcatgttgattgtcgacaaactggggcgaactgtgggattgtgttgaacacacagcaacgcaatggggatgcattttgtcactttttcggttttacaattttcccaaatggttggatccaccagttttaatggggaattgttttttccaaccttcaagcggatgggaccaaaattctaaactggagtgtttgacttgggggtagaatttgttatttccaccaccatttaatttttaagaaactaaaaaatcccgaaaaatattaaacaatttggaatcttttttgaaaaaactggccccttgccttaaaaaaatatattgggggggcattttaaaaacccgcgtgttccaccaaccaaatttttttttttggaaaaaagaccccccactttttaaa

SEQ ID NO: 129539 - DNA, 762 bp, Arabidopsis thaliana columbia
  unsure (1)..(762): unsure at all n locations
tnnnnnnnnnnnnnnnnnnnnnnnnnnnnnnnnnnnnnnnnnnnnnnnnnnnnnnnnnnnnnnnnnnncttttttttttttttagagagaaaatggcaaacttttaattttatccgtcatcgtagctaaactggtatagaaccaaccattgttcaaaatagtactaaccaaaaaacaccacaaaatgggcttctttaaaaaagcccaacataaaaagtcttaacagatcaaaaaaaagcaagtaaaagagatagagataggagaaagagagaggtcaatgtccaacaaattagtcgacctcctcgatcttaggtccagcaccgcctgaagcagggggagcatcatcgtccataccagaggcacctggaccaccggcttcaccaccagctccttggtacatcttggcaatgattgggttgcagatgctctccaattccttcatcttgtcttcgaactcatcagcctcagccaactggttaccctcgagccattgaatcgcctgctcaatagaatcctcgatcttcttcttgtctgcagccgggagcttctcacaatcttctcgtcttggatggtgttcctcatgttgtaagcgtagttctcgagagcgttcttggcttcaaccttctttttgtgctcctcgtcttcggacttgtactttttagcctcttgaaccatcttttnaaatctcatcctttggagagacgaccccttgtcattggtgaagggtgatccttgttctttctgttccgcggaccgcgtggg

SEQ ID NO: 129540 - DNA, 231 bp, Arabidopsis thaliana columbia
tctcactattaaactgaaggcgaggggggaattttgataagatagggtgacatttttaaatatggagaatatttgataataagagaagtttattattgtagagtttgtttgttataaagtttatattttggtattagtgactcaataagaaaagatatattaatgtatgttaaccattatcattgaagaagatgggtggaatgtgataattatattattctatgaaggtaa

SEQ ID NO: 129541 - DNA, 416 bp, Arabidopsis thaliana columbia
gcggcaccgggaaaacaagggaacccccaccagggccggcccagcccaccaaaacaccaaccttactcacatttttaacaaacataaacgacccagacaagacacacaacccggcacggcgggccaccacaccaccaccaaaccccaacccccccaccccacaaccaacacaaacagacacccaccgccagacaccgcccgccgcacgagaagcaacgccccccaacaccccccggacgaccacacaacgaccaccaccacaaggacaccccacaccacccacgaaccgaaccccacacaccggaccaccgcaaaaccgcccccaagccactcaccccaaacacggtcagcgccagcacaaacacacccagcacggcgcacacacgcgcgatgaccccgaagcgagcacgccacgc

SEQ ID NO: 129542 - DNA, 610 bp, Arabidopsis thaliana columbia
  unsure (1)..(610): unsure at all n locations
atgacttcgcagcacgcgtacgtaagcttggatcctctaaagcggccgacctttaatttctttttttgtttttaaacacgccgacaaccncaccagtgtcgataggacatgggtaagtttcatactttataatacaaaaagacacataaatactgcaaatataagtacatacccttattatgaagactacagaactgaaccatagcttctgagccgttacggaccgccgacaaagacaccaacacatcgatccgcaggaaccgatatctatcctatttaccttaactccaaccttcacgaaggagatcatatgtgtcttaagaagatgcggaaataaaagtgtgttggggaaaatcacggaaccatggagttggaggcacatggcccagatcatcactcaagttctcttcttctttctcactaaagcgaaaaacatacatcatcccaaaccacaacgccaaataaaacccttgccagaaaaacttggcaacaattaacaatattatgctcggggaccaatttaggaacggaccggcataaaatcgccaacgtagtaaggaccaaaaaggcgccacaccaaataacccgctcgaggcaaataggttgaact

SEQ ID NO: 129543 - DNA, 710 bp, Arabidopsis thaliana columbia
aaaaaaactggagcttcaccgcggtggcggctcgctctagaaccagtggctcccccggttttattttttcgcggccgcgtgggagcttaagtttttttctatagcggaaaaaaagggtattaacccatactggatagatattcggcttgatgtcttaagaccagtactaatcgtgctgactattgaaatggcttgcggacgggaaatttgacaagctggttcgtatcaactcttggaagctcgctcgcccaatatcatgcttgctgcgccgatctactctccgcacgcctgcgagaagaaatcgatccatcaccaggagctactcatctttaggagggcgttctaatcttgacaattccccacctttacccttttgtcgaccagcggttcctgcttaaagaacgacaccatttgacagctacgcgggaagtctatgcacagtttttcgtcaggcactcccgaccgagaggacattcaaagccgtttgacaccatcacaagaaaaaaccgactatgatcgcccaagggacaagggaattttgatgtccggccccccccgtacaaaggtcccctttgtggcacaaaagacatttttgcctagttaaggagatcatcgcaatttctctcccacaatcaaattattgggggttaaaaccaacccctaaatgccctttcactggactctcctttgcttatcatatatcgcaaccc

SEQ ID NO: 129544 - DNA, 677 bp, Arabidopsis thaliana columbia
actcaaggtaacgttagctggagctccaccgcggtggcggccgctctagaactagtggatcccccgggctgcattatatttttggccgcacaacattatagatcttgagattcacagaacttattaaagccgaaagatacatcatgaagcaaaagcaagatttatacagctgattttacttcttcaccgaagaacaaaacaaaaaagggaagttggcaactttacagtaaactcaaggatagaggttattggtcatcttccaccagataattgaatggcatctcggttatgcatagaatctttacccgaatcaaatcttctctgcaaccgttcaaacttatgacgtctcgtgacttccacgttgtggcactcttcccatgtctccgcaagcgctgctacttctaacagactgacaacttcacacataactggtaggacttctggtgaaccttgtgtacaaagcaaagccgcttgtatcatcatctgtactgattctttaatatactctgcatccaaattcttatctacgagtgatcctaatctcttctctctttccagtttgttcaagtgggtcagaaacaagacatcatcttcttcctccaaacgggaaaagactattgcgcggtgacctgtaacaagctgaaaaagcataattccatacgcgaaaacattggttt

SEQ ID NO: 129545 - DNA, 993 bp, Arabidopsis thaliana columbia
tttagggtaaaaggaaacccgaacccccagccgcggacggcgggccgccactagaaacgaatcggaatcggcccgggtttttaattttaagacgcggcccggaactacaacaactccaccgggggggggggcacaattcaacaagagagggaaacgcaccacccgaaaagacaaaatggaattacgaaacccggcccaacccaccccgcggaccccccccgcctcgcgaacgaaatccctaaaacgcagacaaatgccaaaccaagcacacaagtcgcaacgccccacaccgcccgcgccagcggagaaaccacccgagcagggggcaccacaaggaccaaaaagaagaacacgcaggcgtaaggcacctcggaccccaaccaagggacgggcccccaccaccccagccaaagggccagccgagaacagcaacacccaaacaagcggatacccaacaggggctggcggcccaaaacaagggaacacaataccccggagaaggatcctcggcaaaaaaagcgccctggggagacccaagacccgcgccgacacagaggacccacgagcgaagcggaaaccaacacacaaacaatgacgacccgaacagaaccaggtaatgcagcaccaaggttccgccatacacgcatggccacaccattccgaccgaaaaaagggagtgccacaccctggacccacacctggcaaacccccacactaagcggaagtagacccaccccgagagactccgacagacgcagcgaacaaaagcgagaacagaccccaacgggggcaaacaggaaccccacctacttgggcgaacgagccccccgccatacacgatgattcgcaccccggacctctaccccgccgacaacaccgtgaacagggagccctgactgaaacgtcggccagaggacaccccttaggggaaccacaccgcgccggcacagagacacttctcagaaccatgcggcacaaccgcagacacagtag

SEQ ID NO: 129546 - DNA, 572 bp, Arabidopsis thaliana columbia
aaacaacccacataaggtaacaaaaaccggagccccaccgcggaggcggccgctctagaactagcggatcccccgggctgcattaattcgaggccgcaaacaccgcacacggtaagatacaccactagaccaacaaaaacaacccaaaccgggttcacccaagcccaacaacaacacaaaccacacttgaaccgcaacaggaaagcaaaccacccaagaaagctcgatgggcgcagaagacaagtcacgaaccgagaagcaatcgcattgcagcgaaccagacaacacgggcggaacacaagccccctgataaagcaccatgaactcaccagagaccaaacacggggaccacgaatgcttcgccacaagcgaagaagccggagagaactacgcaaacgctcacagggcaggcaaacaacgcagccgacagccacggtaacagcatggtgagacacaacacggagcacaacactcataaaccggacacgacgggctatgaaacgcaaacaaggggacaccaaagaattagcaagaacaaacaccacgcgggtctggagcagggaaggcaaaac

SEQ ID NO: 129547 - DNA, 514 bp, Arabidopsis thaliana columbia
gctggagctccaccgcggcggcggtcgctctagaactagtggatcccccgggctgcatgtaatttgcggccgctgaaaatcttccttgatgagctttgggcatattaatacagcccacgaagcacacacgtaagaaaaagcatccacctcttcgatgtgttattacttctacacctaatatcacattctgagcagagtgcctgactatccctcgcaaggcttagggatgagggtgatcaggtcacagcgctatcttgagcatcgaatcagcgaccaggaaaatcttatacatcttgtttatcgagactactaaacggttcttagctgcccgatacaaaacctttaggaccgactgtttggacctttcaacacgtttcttgtaggcacccttatttcacttagtgctttctccggccaggggggcgcttgggtacaactatctcgataaccagttaatccttcaaaaaggaacatctcccgggataccctattgttcgctcttagtctctttctt

SEQ ID NO: 129548 - DNA, 516 bp, Arabidopsis thaliana columbia
  unsure (1)..(516): unsure at all n locations
aagggtagcagaagctgccgctccaccgcggtggcggacgctctagaactagaggatcccccggtttgctttaattcgcggccgcgtcacacattacacgttctcgtgttcagcgagatcacaatcgcgtgctaccgcaaagcgaagtaacttaaagactaacagcactctacggtcgcatacaggtgagttaaccatccgtcttgcatacgagaactgattaatgtacagtgatactagctaaaacgcatgtctttataaagaaagttggtgcaatcgatgctgtgtgcaccacgcagcaatttaacacctttgttggatagacgattgctggcctccatcaatgtccctagaacagtgctcgggttgacagtctagagcaaaaaccccaaatgttttcaagacatagtgctgtggccacgcatttgatcccccctcatatttgnggagattaaatcgttatccaaccctgtggtctagttctctaaaacgagccgcgaggcaccaattctatac

SEQ ID NO: 129549 - DNA, 671 bp, Arabidopsis thaliana columbia
  unsure (1)..(671): unsure at all n locations
gaaacnnnnnnnnnnnnnnnnnnnnnnnnnnnnnnnnnnnnnnnnnnnnnnnnnnnnnnnnnnnnnnnnnnnnnnnnnnnnnnntttaattcgcggccgctgacttttcaaactgtagatggcaacatgattgtgcactgaacgtaaagtgtcaaggagtttcaagttctgaatctgacgctcaagaaagtaataacaagattacatcagcagctttaattgctaagaatggttctgcacattctgtttactgtggagaggggaggcagtcagttgagaagccattgaccattatgatggggagagaagaaacagaatacaaatgcagtaaaccgctttcttctggggtatatatgggtcttatgcagagaatggatcctgttagaactttcttcgatcgatttgaggaagtcaatgctaccatgaaagaagctgatctcacaatatgtgaattagtaaaggccaatgaaaaatcaaatagtgttactgaaatgtggcttcaaccccatgaagagttaataagtaaggaaaaaaatttgatggatgatcttgaacaggtcaagtctatactatctgcttgtgaaagaaaaaaacaagtcttgctaaatcaaacacacaccactatggcggacatggaaaattcaatgtctttgcttgaagaatatttcagg

SEQ ID NO: 129550 - DNA, 893 bp, Arabidopsis thaliana columbia
  unsure (1)..(893): unsure at all n locations
aacaacctataaggttaaaaactgactaacgggttggttatctcaactatggaccccgctttctttttccggaccaccaaattaactatacggtgggatcacttatgcccggctactccttatccaaggcacactgggacaccataatccaacctagtcctcaccaactataccatatcactcaaaccaagatactcactccgaaacataatgtacaaaattcttataatacacaaccaccataaactaccggatgacctcttttgctacggtgatcaagaaagactataactcctgtgaccatcacacagtaatcccgataatcagtttataaaacgaaccgcttgacacaatcccttctgctacacaatacctcctcctatcctcgctaagtctgctcaaggcataatgctacatcctagtggtgttctaacttgtaacttgcagttacacgtcgtaatattaattcaaggataatacaataacaacgtggctcaacaattccagaccatatgcaatcatcccccaaatcactatctccccgccattttctgatcacttccagtcactatgtcacaatcttgcggactacaactacataactagaataatagccattcaatgggacgcctcccatatagtcttcacccatccacgtataatatgatcttcacattattaatccataatgttaactatgccttccnatgtcccccctccttcaggcatcctgccctccattgcgtattctacacaaaactctaacatcttttactcgctacccaatagaaaaataagtaatactttaacatagactttactctcataattcctctcgtgtcacacgagtatctttcataattctcatcttactatctgttcagtaaatataa

SEQ ID NO: 129551 - DNA, 670 bp, Arabidopsis thaliana columbia
caacccatgggttaacaaaccaccaaagaagggcaggcaacaccagcggagcaacattggttaaggaagcagcaaaaaagcgggggggcgacacaggacgggcgccaccaagacgcaagaagcgagacacacgcagcacgccagaccaacagaagaaacgcaaaacgccagccacgcgcaacgagaacaaagccagaacgaagacagggaacgaagagaggcggaaacaaaaaaccgaggacagaacgccgaacgccgcgaggaaaagcggccaagccaacaagaagggacacagagcccgaacgaccggaggaccgacagcggggacacgaaagagccacgccggcagagagaagacaacgacgcaacacaagcgcacaggacaagagcacaagaggccacgacaagaacacgaacggcaagcacgacacgacacaaacgaacccgaccacgacgcgaaaccgaacaaccggccaccacgacgggagcagaaaacgaaagcggggcaaggacagccacgagccagaaagccacagcgacgcagccagcggaccccccaccaccacaaacaccagcaagagtaggaccggaacgacggacgggcgcgccgaggggcaaggcccaccgcagacgaggacacgaccagccaaaccagggacaaccagaacac

SEQ ID NO: 129552 - DNA, 719 bp, Arabidopsis thaliana columbia
ttcatgaacaaccctataagttacaaactggagctccaccgggggcggcgtctagaactagggacccccgtttgattaattgcggccggcggacggaatttgttttcattttttttaatttcacacatcttaattattcttcgcgcccaaatcaatataaactatcgaaacccgcactacaggggggcccccttcaatatccctaactgataactaaaaattactggaccacattaacaacttatccagaaaaatctgacccacaacaaaaaaccttgactaaattcccttttgcaacaggcccaaataaaaaagccaacctaacaatcttccaattgtacccaaacaaaatgctcaggggacaacttctcccccaaaatatttcctaaaaattcaaacttctaacatacacgttaaaattaaacggttaatttttctaaaccccaacacgtcccctaaataatatcctaataaacaacccttttttataacactcaaaactagcaaaatcttcaccctttcttatataaaggatgtctcataaagcatctattacctttaccccaataatcttgtgtcaaaacacccaatattctactccatacttacttttatataaaagatatactccgccggggataaccatacatcataacaccgattatacaaaaatacgcgggacctattataaaacatatacaccacggcatcatatatat

SEQ ID NO: 129553 - DNA, 794 bp, Arabidopsis thaliana columbia
  unsure (1)..(794): unsure at all n locations
aagtttaagttaaacgggaaaccccaacccgggaggaaggaacgaaagtagaaagaagaaggggcggccaaggaacatgcatgtaattttgaggaacgaaggggaaaaagaaaaagaaaagagacgggatgaagaacaaaaaaaaaaaaggagaaaagatgaaaaggaaaaaaaaaaaaagaaaaataacagaaagaaataaaaaacaaaaaaaaaaaaagtgaagaaaaaagggaaagagaaaaagaaaaaaaaaagaaaaaaaaaatacaagacaaggaaaaaaaaaagaaaaaaagtaagaaaaaaaaaaaaagaaaaaataaaaggaagaggaaagaaaagaaaaaaagagaaaaataaaaagaaaaagaagaagtgaaagaaaaaaaaaaaaaaaaaaaaaacgaaaaacaaaaaaaaaaggaacaacaaaatagtaaaaaaaagaaggaaaaaaataatagaaaaaaaaaaaaggtaagtaaaaaaaaaggaacaaaagaaaaaagaaagaatggacgactaaagaaaagaaaacataatgattttagtgaaacatagaaagaaaggaaaaaagaggggaagaaatagagagtggaaaaaaccgaataagggactagagaaggaaaaatngagagaataaaaagataaaaaaaaatatagaaaaagaaagaaagaatagagctagcaaggagatggaagaaagaaagaaacgaatagataaagaacgaaaaatccacggagaaggagaaaaaaagagaagtaagtaaaataaaaaaaagaaaagaagg

SEQ ID NO: 129554 - DNA, 574 bp, Arabidopsis thaliana columbia
acttaaactgaacccccaccgcggtggtgagccgttctaaaactaaagggggcaccgggctgttattattttttggccgctggagatctaaattcccaacaggatcgcatgaaaacacaaagacagatagtgacaaaaacaaacatcatttggatggttctttaaatgagcctcatcaacaaaaaaggctttttaaccccctacggtaaacgaaaattcgaatggttaaaaagaaagtttacaatcgatacgccatcatcatcttcttcttattcatcatcgtcatcttcttccctcggattgagtatagaagtcctcgcaaaggataccaccgtgagtggccaccaagggagcaaatacaagagactcaactgccatgagcttgacgaggatgttcaatgacggtcccgaaatatcccttcaaagcgctcaccaattgcgtctccacacacatcatctcttgtgtggcgtctgaaaccctttggtccatagggctattatgcggcggtcctggataccatcagaatcttcgaatgcaatatcctatcggcacgttcgttcccaaaggccaacc

SEQ ID NO: 129555 - DNA, 1123 bp, Arabidopsis thaliana columbia
  unsure (1)..(1123): unsure at all n locations
tttttgatttttttgtagagaagtgattaatatgttatttttgtgttttattaataatgtttgtggggttttatttttttatattataattattattaatttttttttatttttaattaattattttataattgtggtgattttatatttttttattttattgtttttattttgatttttttttttgtgtgtatatttttttgtggttttttgttagtatgtattagtagtttttttatgtttttattttttttatttgtttattgtttaatgtttagtgtattgtaattttagtttattagatgtattaagattttaataatattgttatgttgtttatatgatagttgattataagtatgtcgataatttgtgtttttgtgtttttgtaattttggtatttttgggtgtgttgcatatatgtaaggttgtaataggtatcataattatttgatttgttagagctatgcttattgttatataatatgtttgttaatattgtgttgttatgtatatatggaatagtgttatgtttgatatgaaggataagtaagtataatatagatctattgatatatgatgtatgtgagttaataagtattgtattggattataattatttggtaatatatttgtattattgataaattatatttatatattgatgtgatgttataggttaaggatatattttaatattttatangttgtgaatgtcttacttgtgagatattatatttatagatgaatattnatcttatttgtgtggtatatatttgtgttcgtaagatttgtgttttatgttatatattattgtggaatattttattaagtttgtacgaattatgttgatgatgtattgattaagttgttcagtgggtcataagtaatgttactttaaattatatagttatagtatttctgtgatgttctaatttgctatgtgattattttgagagttaatttgtttttttgttataattttagtatctttttttgttatgtatatatatgtgtgtttcatgtttaatgtagttgattttatattataaattatagatagatatctattaatttttttgtttgtttgtttgtatttttattatataaattatgatttatt

SEQ ID NO: 129556 - DNA, 511 bp, Arabidopsis thaliana columbia
aaaacgacccacgggggggcgtctaaggcgatcccgtttatttcacttgcatatcttcaggggtttcggataagccaccagacatcaatctaagccttaagcaccaacaaagcctaaaccgctaggactatccatcctttcttgactaccttcaatacccatgcctctgctgactttgatcctagactaactgaatgtcatatcgagaattttagacctatttacgactctacaccatctggctatactaaagctcaaatggtaccactatgcacagagttgctccatcgacaccgcaatctctcatctttttctgcgcctcccgccaaaacccgcaccgcttaaccaagcgctttgcaccactgaccccaagcaccatacaaaccattcccaaaacggttcttctaatcgttccttgacaaccccgtacttgggtaccactgcccaaccccatggcgccctactggcgcttcctctttggcccccttggacaaccttacacccacaaggt

SEQ ID NO: 129557 - DNA, 783 bp, Arabidopsis thaliana columbia
  unsure (1)..(783): unsure at all n locations
aaccccaaatttgggggaaaagagaaaccccgaaggccagagaacggggaccaaggaagagaagcaagaaccagaagaagcccaagttttacttgttaagacgggaagaagaaaagaaaaagggggggggggcaaaaaaaaaaaaaaacaacgggaagaggaggaggagaaacaaaaagcaagaagagaaaaaaggaggagcaaagaagcaaaacaagaaggaaagaggaagagaaggaaagagagaaagaggaaaacaacgaggagaaggaaggaggaaacaggcggcaagaaaacaaagaggcaagagaaagggcgggagagaaaagcaagaggggaccggaaacaacaaaagacggggacgaccagtaacgggagaaacagaaacgagaacgaccaaccgaacccacagaagggggaaaaaaggagaaggagcaagacgaaaaggccaacgcagaacagaagaaaagaagaacggcacaaggcaacaaagaggagccgacgcgagaacacaagagtcaaaaaaagaaaagagcggggaaagggcaggaaacaggaagcnacagagacagagaaaacaacacagagagaaggacgagcaagacgaaagaacagacgggaagagcaaggggcgggcagacaagaggagagaagcgagcggcgcacaaaagaacagcagggaaacaaaaacaagagcggaaagaaaaacgagagaagcgaagagagggcaagccgcggcagacgaaggcacacgagagggaaaggcaaagcaagcgaggccaa

SEQ ID NO: 129558 - DNA, 629 bp, Arabidopsis thaliana columbia
aaaaagccggagctccaccgtggtggtggccgctctagaactagtggatcccccgtttattttttttttcgcggccgcccggcggagaggttatgaattcgctaaggatgggaaggtctgcttctagggttggatctggtggtggtaacggcggtttaccgaggctagatgctgatactgaacgctcgaggcgaccgaggtcgttgtctagacagccggctagtaatcatcgctggtgcctcaagtaaggtcgactcggtgagcaacaattccagccggcggacgtcggtttttagacaaccgaatgatagggttaaggtcgagaacagtggtggtgttactgaggcagatccggacaacgccaattcccggcgaccacggtcgccttctgttgcccgtccctcgattgagaattctgacactgatgtagatcaagtctcgccttctacccatctaaggtaactgcaatagctttactgagtgggaaccgagtccaacataactggcctctctcacaaaattcttgctcggcttttacgaataaactaacaaccaagcggctctttcaaggcccgcgccctctttttcacagctccctacccaaattctccacaatatccacacacact

SEQ ID NO: 129559 - DNA, 379 bp, Arabidopsis thaliana columbia
  unsure (1)..(379): unsure at all n locations
gaaaccancgacccctgacgagaaacaacgcaagagaagcggaagacgcgtacggaagaaacagttttttttttattacacacaacgagaagggtacaaacgagaacgacagggagtgggataccttacacaccaatcaaccgcgcggaccccaacatgagatccaaacggtgaaacgagaacacgaagaccaaaagatcacatgcgattagcaatacgagcgtcacaaggtatacgaataacgtacgcatggaccacggctactacgcatcggactccacaacaaaacgcgaccaatgctcacacgccagacgaggacgaccacatcaaggacgaaaccggcgtgacacgcaaggattcgcaaccccgcgggcgacat

SEQ ID NO: 129560 - DNA, 296 bp, Arabidopsis thaliana columbia
cggacgggagacgacccaagaccgacaacgcagaacagcatacgcaagccggcaccggcatttgaacttttaaaggacacgggccacgccacgcgaggcaagagcacaacaagcgcacggggcaaacggaaccggacgacaaaagccaaatatcgaggaccaaagacaaggccgaaccccccaagcaatcgcgccaagaatgacccggggaaaataagagaccccaaacgaaagggcacctgcacggcgcggggggaataggcaacaacacagaacgccgcacgggaccaggccga

SEQ ID NO: 129561 - DNA, 214 bp, Arabidopsis thaliana columbia
aagaaaccccccggggggacgtataattacacatcacggtgttttttttgccgcccactcaaacacttgggttgctcttacacgagactacaagctcattggcaatttagcatagaggcaaggtcctccctacccacactcgtcaggctggaccgacatatcactttccttacaaggatatcacgacagttaatatttaggtttccctggcagt

SEQ ID NO: 129562 - DNA, 844 bp, Arabidopsis thaliana columbia
agacaacgccgggggcagggggccccagaacacagaacaccgccactaacacagcaaaaaaaacccgacgcggccgcccacacaacaacacccccaccccagaaccccagcggccaaacacaggcaaacacaaacaaaagaaacacaaacgacaccccgcacagaccgcggccaaaagagcagccccaacaacagagcaacaaccgccgaccaacacaaagcaaccccagacgaaacggagccacccgcgaggcaaccaccacgcacccaagaggaaagaacgacggaagaacgccaggccgaaccaacgaaggcggcgacacacccaccccgcgcacgccccgacgcacgaaccgaaaatctgaccaccacacccagagcccgaccagaggcacggacgcaaccgccggcaccgaaggacaagagacgaacccgcagaacaggctccactccggaaacagcgagcccaccgaagaagacaaccacggacgaggcgaataacacgcgacaccccggggaccacgacaagacgcgacgaacacgcacaagaaggaagagcgcgacacacgtacccgacagcgagccgcgaggcagcgcaagagccacgcacccacacaaacacccacagcacccacaacaaccaacacccaagcgacgcaaagagccccaaaaccagaaaaaaaacagcaacggacaaccgaagcccgacacgacccaagacccccacaacgcaaggcgatagccaaacacctagagacccaacagagacccgcacgcgtcagacgctcacgaagaacgcccaaaaccccccgcagccaaatagcctcgcagacaggacgcggaa

SEQ ID NO: 129563 - DNA, 480 bp, Arabidopsis thaliana columbia
tctagaaacttagtggattccacccggtttttttttttaattcgccggtcgcatctcaaaggcaccctgtgtgacgcttctagctgcgcatgattttaattccggatgttagactctgcacgatgcttgatacgtaacaagcgaacatgccgcatattgcttcaatgtcagaaaactgttgcttcgacttatacgtgctgccagacatgaccctcatcctacgggcaatggaacggacccttttcactaacctgaggtcggaaatcaccctgatcctgcttattaaactagaccaattttcgagtttcactcggggatccattatgaatcccgccttcagtggagtcgtcatttaccatacaccccttgctgggcatcacaccaaaacggcaaccctgccagggtaaatactgccccgtgaactggcaacataattgcaatccgctaccaccattacgaagtcttctatttcggcaataa

SEQ ID NO: 129564 - DNA, 887 bp, Arabidopsis thaliana columbia
  unsure (1)..(887): unsure at all n locations
aaaacnattttagggttaagaaaaaacataaatcttttatttgngcttggtagaaaaggaaataaaaaaaaggggaaacccccccctctgtcttgaaagagaggggggggaggagagaaaanaagatgataaggaaaattaataaaaaatcgaaaagaaataccaaaggaatgtctaaaagacaagatgttgagtagagagacaggcaaagggaaagggatcatgaacacgaaaaaatcgtaacacattcagagcataaagagaaacgattatatcggaaggaaggagggcttagtcgagagacggcagagaatagagagacaagccagcgaacatgagttgaagtgagggaagatgaaggataaatggcgtcgtcacgtgtggaacacaagaaaataaaggcggaggtggtcagggaagactatgggaaaaactgggatgggagacaagaggaagaccgagatacgaagaacatgaggaacgggtaatggatacataagagtgttataagaagaaggcgagaggaagaggaccaattaggggaggtaaaaataagcgggagagcgacgggagaaaaataatcaagctacaagggggagagaaaatcgcgaaaaaggggaagggcgaccgagacctgcttaagggaacgagggcgacaggcaaaatccttgggcagggaaaaacgaaggtacgtgggaggagaaaagtaaggtgaaataaagagaaggggagcaatgtactaaggaagaaaaggaagggaatgggagaggtgacaagaacagttgacgggacagagtcacattacatggaagacacggggagcatagcgacggatgggtaagcgaagggggaagaagacagggataaaaggaagagacgtgggaaga

SEQ ID NO: 129565 - DNA, 292 bp, Arabidopsis thaliana columbia
gcggcaagagttgacggcgctttttaaccaccatagtgtacataattgagcggtgaaaaaggcacggaagggaaggatctgggggaggggtctgtgagcatggtaggggaaggaggagaagatgaagggagatgatgtggtaagtggatataccgcaaggggtaggcaaagggcggcgagcatgagattcatactctggggtctggcgggcccgaccgaaacggagtattcgaagtgatgggagtcactttgtgggggcaatgtaggtgagctcgtcgaagggagtctgatc

SEQ ID NO: 129566 - DNA, 664 bp, Arabidopsis thaliana columbia
actccaggttacgattaaaggagccccaccccggtggcggccgctctagaactagtgcatcccccgggctgcagtattttttggccgccaggcagcaagagctgcagactgtagcattggaagattcaggttcctacaaagactgattcttgttcatgggaggtatttatataaccggacagcatttttgtcccagtattccttctacaaatcgttgttgatatgcttcatccagattttcttctcgtttatttcaggcgtttctggaacccagtttttcaattcagatagcctgatggcttattaacgtttctacaccaatgttcctgttcttgttagggtaattgataaagatcttagtgaagcatcagtgatgcaacaccctcaaattttggtctactgccaagcgggaaggcttctgaatccaagcacatttgcgggttggtttggccgatcccttttccacgcccattattggaatttggaaataacccctcacacccccctatgctctccgagaaaaaagctgaaaaatgggaaggaagcctcttggaaaatggggtcaagcctttctgcttcttggggcataggttatataattggggcttttcaaagagcccttttttgggtatgggcgggcgcttccacagcgaaaacaccccca

SEQ ID NO: 129567 - DNA, 321 bp, Arabidopsis thaliana columbia
acgctattgtatttaaagacaggaccggaaacaaggaacacgaaaggggggcggcggcgagacgacgagcaaacgagagcgcggccgacagccagcagacgcagcgaacggcaagccgcacgcacgcgacaagaagcgcggaacggccaaccggccgggacgaacgccggacacaggcgaccgaggcacagaaaaagcacgcgacgccgaccaacgcgaacgcgaagggggccaagaggcaacgggcgccaatacgtcagacgaggacacgacaagaacggaagaggaaacacgcacgaacccaaccaggcgcccaaacac

SEQ ID NO: 129568 - DNA, 904 bp, Arabidopsis thaliana columbia
  unsure (1)..(904): unsure at all n locations
aaagttnnnnnnnnnnnnnnnnnnnnnnnnnnnnnnnnnnnnnnnnnnnnnnnnnnnnnnnnnnnnnnnnnnnnnnnncggccgcggcaagttcatgttaaattttttctaacacacaatcaataccacttccccactacactaccatacactacacaacttttcctcatcaaccctaaaatactcactcactttacttatcacttcctcatcctacaacttctaatctcaccttccttctcgaccctccaccctcacccacacctcactctctcccatccttcacaaactctactctaaaacatattatcctactctaccctacaacctcatcccttcttattctaatatcttctcctcaaaaatattaatttctcttatctctaacgataaattctctcgtctaccctcataacatactcaattcctcattccactaaaaccataatcactcaccctaatctctcctcctatccaccttatctctatacttacctctctacatcaatcacctcttatctctccactctctcactaaatctatcctacttaaagcacttctccatcccttattctcatcctttccacctcttatcccccaccaccctccactatatcatacatctcgtacactcactataaccactacatcactaccttaccacactacttccccatcctaccccatcctataccacccctctccatacactctctatctcacactccttcanactctcccccccctcaactcacctcccacatccttctcttatcatcattactctccctcattactaccaactcaattatcacttccataccttacctctaccaatacctaacttacccaacccatctctcacactcctcactctacctatcaccacatcctcactcttac

SEQ ID NO: 129569 - DNA, 740 bp, Arabidopsis thaliana columbia
acggccaaacaagacaagaggaagcacgagagaaaacaaggggaaagcaattttcgatattaaagcgggacgaaaagcgagccaaacaaaacgggagggggggccggaaagcacagcacaagccaggacgggaaaggaggaagacaggcgacgagagaagagcaggagcagaaaaacggcacgcagacagaagaacgaccaaagggggagaggggacgacgggcgaagcggcgaaagaaagacgcagcacaaccgagggaagaagacaaaacgcaacacagaccaacgaagagcgaaaggcacggggcagagaagcgagaaaggcaagaacaaggagcgaagcgagaaggggaggggagggagggacgacgagacacccaagcacagacgaggacgaacgaacaaggagagacacgcaggcgagagaagcagcagccggaagaggacgagaagggggcgacaaagcgagcggagaaaacaaaagagaagggagaaaagcaacgagaagagagggaacaggaaagagaacgagagggggaagcggagacaagcgcgagagaggaggaggggacgaagcgcaagcgggagggagcggagcaacgggaggaaaaagaagggaaaagaacgaaaagagcgaggaggacagaagagaaacgcgggcaaggagaaacagaagcgggagagcgaacccgagacggagagacgacgcaaaccaaccaagggaacgcgaaaacgaaaag

SEQ ID NO: 129570 - DNA, 730 bp, Arabidopsis thaliana columbia
acacacactcaaggttagcatttagctggaggctccaccgcggtcggcgagtcgctctagaactaccaggcttccccgggctgctttaatttttggccgccggcgatccaccgagaggtgggtaacgggaacgatcatgaaatggagagggttgaagctcaccggatctaaatccgcgttggcatatgaactgatcagaagcagcacattctgcatcttgcagctgctgattggaaacagggggtatacgatgaacctggacgagaaaaagacgtctacgaacacaaagcttgaagagctgccttcggtgagtgaatactctgaaacatgaacgcttcatgaagaggctatgaaccgtacaatcagactgaaatggagtggggattggaacaggcctaaagagggggaggtagagaaatgactgcagagcgattttacgggagagttttcaacgatgctggagatctctcatctgatgagggcaactgtgcagtccaacttggaccatagtggcaaacagtgtgccaagatgaaccttatgagactcgactaggatcacttaagacttaggaagcacatcctaatgggaaaattatttgaaccccatctggggaaaaatgccatccccttattcctgaaatccttttgcaattacaggaattgggttatagtaataggtcaagaatggcccccaatattttttactctaaccccggagtattaaaacacc

SEQ ID NO: 129571 - DNA, 439 bp, Arabidopsis thaliana columbia
taggggttgaaagaaaaacccgagaccgaggaaaggcggcaggcgagaggagagacgacgaaacaagccgggcagccccacgcgaatcgatttgtaaagaacccagcgaaagaggaacgcaccgcaaaaaaaagggggggggggaagacgaaacaaccgagaaaaacggcacacaccgacgaaagacaggcgagaaacaccgagcgcgaaaaagacgaaccagagccccgacacgcaaaagggcgacacaccggacaaaggcaacgcacacgaggacaagcgaaacgaacgacacagcgcaagggacggacagagaacaaaaaagccacgcagacacaacagggcagggcgacaaaggagaacgagaagcagcggctaacgaacgagccaaagaaagcaggcacggcgaaggacggcgacggcgcacgcacgagacgga

SEQ ID NO: 129572 - DNA, 960 bp, Arabidopsis thaliana columbia
tttttgggtttttaaaaaagtaaaacccccctaaccccaaaaatatggtttacaaattactaaaaatatatatataacatgggggagaaaacattatcaagctttttttttttttacacgaacaatagtggaaaaaataaataaataaacttttaggatttattattaataaaaaaaaatatatatactttaataaaaataatatactatattaaaatataaaataataaataataccttaaaaatatttatattacaaaaacatatataaataaaaattaaacttaacaaaaactctatataaataacttattacactataatttatattaacttacaattattattatattgaatttattatttaatctataataataaaatttaatatatctatttatatctcttatcaaacaataattaatcaaatttaataatttatcttaaactcattctctcacctcaaaatataatacattaatcttaattaatcaaacctaatagaatagtacagtaactacataaacataatttctgatcatatacataatataaaaacttaaatatataatacaaattaatctctcccatttatttataaaaattattactaataatatatgtataaaaagtataagttattgattaataaaattaaaatattacttgattctattaaataataattatataatataacattgaatctatatcattcataaaaaaatttatttaataattttactaatctatatcacaaaaataattcaataatttttaaaacaacattaattaaactataactctataagaatttaatcaaataatagtatcttaaatccttccaatacgtactttaataactatatttaatacaaaatttaatacaacatcaattatataaatattatcattttatgaagttaattaatacactacgtaatattcatattcatataa

SEQ ID NO: 129573 - DNA, 676 bp, Arabidopsis thaliana columbia
aacccccatttaagtttaacaaaagccggagctacaccgtggtggcggccgctctagaactagtggaccccccgttttgttttatattcgcggccgcggattttggaagcggtaaggggattaccgaatgctagatcgactcgggtgtttgttgctgctagttcagcgcggagtcaaaaggaagctgatagaaggacaatgactgaccgtttagacgaccggcttccacgggcactgaagctgacagcgcactattcgacgcgaccgagaggcctcgatagttgatcatctcaacgatctgacaccaatgctaaagaaccaagcgcactctgtaacgacgttcgtaatatgctgcaggagcatttgcctactacaagaaatctatttctgccttggctttagcatctcacgcataggggatcaatgaataattcattgatccacccccatttcgcgacgattgccattccaaagaactccacttccgcacattacacgcaccaagccttgcctgatcgcttggagatccgactttactttattctagcgtatccaatgcgcggacattcaaacactttcttcaaaaccaccttacccctttttccaccagggcaatactcccagtcctctgagctccaggcctagttaacttcacccaacttcctagtatggggca

SEQ ID NO: 129574 - DNA, 515 bp, Arabidopsis thaliana columbia
  unsure (1)..(515): unsure at all n locations
aaaaaagcggagctcaccgcgtggcggtcgcttagaactagtggatcccccgtttttttttattcgcggccgccaaagagcatgattctcattgggtcttagaagaaaattacaaggacggctgcttggaaagcttataaccgctgctccactcaatgggggaggtccggaggaagcatatcggcttttatcttgacttaaagactctgatggtgctntaccaggggttatgggtgcattgcatttatcacctgacctaaggacggaacagattgtggtgccatatctttgtcaagcgaagagatagccatctgtcggcttctgcaagtcgcccgtcttcattcttgagctcaaggtctgcaagtgttagttgaattaccatttccttggccccagagatgcttcttttttcatgagcctcccaattttcatatttgaagctcttgcacatgataaagactctttcaataacttccttcactgatacctcgcaagtagttctcccaggcttttta

SEQ ID NO: 129575 - DNA, 703 bp, Arabidopsis thaliana columbia
gggttagcagaagctggagcctcgaccgcggtggcggtcgttgtagaactagtggatcccccgtttttgttttttaattcgcgccccgagcgatttgtataggtgactactgggcttgcgtcattctattcacaaacaacggaagcaatgtttctcctccactgcaagcatatcagtctcgatgataggcactagattcacccaattgcatcgtggaatacctattgcggggagactggcagccttcatccgatagctcatggactgctccgacactagcagagtcgtcattctctcttttaccaagtaacactgcttttgtcccgatctcggccgcgacagctttccagcactcactagatacacgagcgtctcttctcctggctctatggcgtccacttagtctttaagtctactactatatcctgttacccttggcacctgtattttactaagactaggtgagtcctactatcgcctgctcgatgctttttgcgcgacaacttcccgttccccttcgcaattcacatttgaacacacatctattatcttggtgaaagacgattcccctgcctacgcatcggagaatcccccttacccctctcacactctcgtccctaacaccttttttctcttcactcgatccgcttccctgtcccttgcacccctggaagtcccttcaactcccagcaccccctctctt

SEQ ID NO: 129576 - DNA, 587 bp, Arabidopsis thaliana columbia
actgaaaaccccaccgcgagaggggggaccgacgcggagtaacaagaaggaacccccccgaggacccccattgtaaatttttaccggccccgacggccaaggaacaccaccccgacaaaacgcacagggcggcgggggatacaacaccaaaaccaacgaaaaacacaagcagaacagagacgccacaacaaccgggaaacgacccacaacaaaagaaggaacggcaaccgaagaacaacaagaagaaacacgcctcacgagacacgaacgaccacaaaagccaaacccagggacgaacatcagaagaaacaacgagaccccgaacagcgaaaagggcaaggacaacacaaacacacacgcacaaaaacaccagcaacgaaacacgaacgccaacaacaccaccgacaaaggcgaaaaacgacacgacagaccaacgcacccaacggcgcgacacagacatacacgggcgcgggacaaccacccgacggccagcaccaaaaataggcacggaccggccggaacacggggccgagacaatgcacgcaccccaagcaagacgtaacggtaatccaactagcacgcgcaca

SEQ ID NO: 129577 - DNA, 638 bp, Arabidopsis thaliana columbia
acaccacactccgggttagcattaagctggaggctccacacggggtgcgcggatcgctcgtagtaactacgtggactctccccgggcatgtattgtaatttttcggtgcgccctggcttggaaacgctagtaggtgtagctgatgtacagaactgtacctattaagggttactatggtacctattgcgactgtatgagataatctcatgctgaggatatgtacaggtcgctagtgtggcagtcaataagcaggagtctagggcctgtcacgtgtatgattccacagtcgatcctaaggtcacaaagcagtacgctgtgagttgaacagaagcaacacgtattgtcaatatcttttctactgatgatagacgcaacacatgctggtgtactggcaggcgcataatacatctgagcatgcagaagctccacagattcacgacgacacttatgggattatacttgcagatccaaatcattctcctgcaaggcactgcgtgagcaatagaatcagaattgcagaggaccaatcaacacagttgtctggaaccctgtattcttgaccgaaacctatgttgactgacatttgttcagaagtacaattcggggagtacaaaatctaatggctgtatgtatgcgta

SEQ ID NO: 129578 - DNA, 1043 bp, Arabidopsis thaliana columbia
ggagaagcccccccccgggagaggaccgcacacgccaagaacccgagcccacgagcacggggaacgacgatattgtaaatattttcgaacccgacgaaccccacagtcagcagcacacaacagagcgggcggcggggggggcaatcaccgaacgacaaggaaggcactagcacggcccaaccagcagtaccaaaaaggagccgcacaacaccggggacacaacacgcgcgagcacagtccaagaccaccccaagcaccaggggcagatcagaacgacgcgccgaacgttacacaccggcaacaaccgaccatcagaacgcaagaacgaagacacagaacagcaacagccggcgacgagagcgcagacggaagcaaccaccgcgccacagcccgagcgcaccgccgcgacaagatcccgacggcaacgctccacgagcacacagaccacgacaccctcaccaacaccagcccaggagacccgcaaagcccccgacacaccgcggcccacgacaggacgccaaccgaacgcagccaaaaacagcacgaaagacgcccgcacgggccagaagcatccgccggaagacacaggtcaaccacgccggacgacaaccaaccagtcaacgcacagacaaaggacaagacaaccgccaagaatcgggccgccagggcacagacacaacccagcgactgaccagcaacaagcaacacgacccacgaccaacacctgaaaccaacagcatccatgagaaagaagaccagcaccgccgccacacaccacgcaacaccaaaccacccaccgagccgcccgcgcacccccaggacgcccctgacccaaacacacgaaaggccggagccgccaccgaccacagcccaaccggcgtgcgccggccacaaaacagaccgcgaacaaaacagccgcgacgggcgcgaacaccaccaccgcaagggagcacgcccgccaaccgcacgccaacaaccaacaaaggacccgccaaacaaacccggcagcccagtcagcacgaccaacctaccggcgcaacaca

SEQ ID NO: 129579 - DNA, 658 bp, Arabidopsis thaliana columbia
accgcggtggcggtcgctctagaactagtggatcccccggtttgcatgatttcgcggccgcattcgctttcactttgggtgtaactttccaaaggaactagagtacgatatattctacacataaatttatgacaccaagacagaagaacgaacagacagatacacacatcaaaagtaaaaaagtgaacaaataaaacaatgacaaataatttaaattctgcgttttttttaaccctcaaaatgggtaattatttgctcgcttctcaacagttgattccacattccagaatgtccgggccagtgactcggctagtgaagggatcaatcctaacccacaacaacgagaagattgaagccttgagtacagaccagactaccacaatggtaggagtccggttctgacgacccatcaaacccttgaggaaagggttcacgcgagcattcacacgcaaggcaaagaacaacttaccaaatagtggtccccatgaatggtattcactgctgagagaatatgagagttaaggaacagctttcacttagtttgcaatgagcacgccgtcgatggtcggaatccgaaaggggggccccatttcgaacaacgttgggggtcagacacagtcttcccgcctttaatctggaagctttttgcaggtaaact

SEQ ID NO: 129580 - DNA, 689 bp, Arabidopsis thaliana columbia
aaccaacccacatagggatagctgaaactgcagctccaaccggtgcggagtcgctgtagagctcaggaccccgcgttctggttgtactacgcgggcgaacccaactatatatcatcacatcgcccgcatatcatacattctttggttctacgtgacacaacgaacaggggcatgacagcaagatgcaagctgaacatgggcacacatcagctcacaaaggtctacacggtgctacacgattctgagccacgggaccctggatgagatgatcaattgatggtgcggaaggttccttacaaggaatatatgagctaaggtgaaacttctgggcaggctaaaaaagctgagaggatatcctacaggtgaggtgggagaacagcaatttgacaggccctctatgcttttacccaactcactggacggacggaggaaccgctgatttgatcaatggtgccaccacgcgcagagtaaggcaacggttggactctttaatggatcagtgagacaacagccgcttaacatggttgctgcctgaggatacacaatacgctgaaatgccctccgttctcacgttaaaatgaaaacggcagatacaaaactgggtcccggaataaaaagattcccaatctatgggtattgtatgcaaaaaagacctttaacggcttcgcaacacatatgtaaggaacccc

SEQ ID NO: 129581 - DNA, 685 bp, Arabidopsis thaliana columbia
aacccccttttggttaacaaaagccggagctccaccgaggtggcggtcgctctagaactagtggatcccccgttttttttttattcgcggccgccgaatacatatgatcgtgtgaaacggcgcacaaagctgccgtgctgagacctaattcgccgtcgtttctctaagtgaaggagtgctgagagatgtccagtcttgaagatatcaagaacgagactgccgatctgcaaaaaatttcgatcgaggaagttttccagcagctaaaatgttcaagggaaggattgacaactcatgaaggggaggacaggattcagatctttgtccccaacaagctcgaagagaaaaaggatagcatatttctgaagtttttggggttcatgtggaatccacttttatgggccatggaaacgcgctgaaatcatggtcattgctttggacaatgctcatggtcggtcttcggattggccggattttgctcgcattatctgtctgttggttatcaactctaccatcagtattattccaaaaaaccatgttggcaatgctgctgctgatcttaagcttgctcttgcctcttaaaccaaggtttttatggttggaaacgtggtattgaacaacgaagcttgctcttttttgctccctacgcagaattattgttacctcattaaatttagggaagaccctt

SEQ ID NO: 129582 - DNA, 665 bp, Arabidopsis thaliana columbia
  unsure (1)..(665): unsure at all n locations
agaaaaaacggagcgaggagggaaaagaatattggaggatgagttagtgggatgaaaagagttttattttagggagagggagtgtagggtattatattttgagggtgatattagagaataggtggaatgttttttaaaaggataaatgtattataatattatatttttatggtagttttattgattttaagtttttaattgaaaatgaaaaataaaagtgtttgtttataagtttaatagagagtgagattgatattttgtaggtatgagggaaattatagtggggaaatgggaggggggtggagagtagagtgagatttgaaaggtgaanaatagtgtttaagtaatagtaagaataatgagaatgaaagatattattttgaatgaattgtgattatgatgaaatcttagatgtaaagatatatttgtgagaatatattaattgaattaataaagagaaggtgattaaataaagaggtagattatatagttaggatttaaatgggttgttttaagattggaggaaatagaatagataaaggaagaataagtatgggtgagtaatttagtgaagtagattggaaaatagattatgattatagtttttgtttggagtagaaattaggaaaagtagtattgaaagaaggataattatgatttggaag

SEQ ID NO: 129583 - DNA, 676 bp, Arabidopsis thaliana columbia
  unsure (1)..(676): unsure at all n locations
gctgaagccncaccgcggtggcggccgctctagaactagtggatcccccgggctgttttttttttcggccgatgttgctctacgcgtagcttcatcttgccggcttcgaccgcgaccaggaggaagatttgaagcagttccgtcaatggggaagcaagacaccaggacatcctgagaatttcgagactcctggaattgaagtcactactggtcctcttggacaaggaatcgctaatgctgatggtttagctcttgctgagaagcatttggctgctagcttcaacaaacctgatgctgaagtagtcgaccactacacatatgcgatccttggagatggctgtcagatggagggcatttctaatgaagcttgctctctagctggacattggggacttggaaagctcattgctttctacgatgacaatcacattactatagatggagacacagaaattgccttcactgggaacgtggaccagcgatttgaagcccttggatggcatgttatctgggtgaagaatggtaacaattgggtatgacaaggtcccgtgcctgtcattaagggaagcttaaaactgtttcctgaacaacgccctacttttgatccaagggtcaactaacttacctattgggtttatggggtcctaccccaccaagggccgaaaccttcatacca

SEQ ID NO: 129584 - DNA, 387 bp, Arabidopsis thaliana columbia
  unsure (1)..(387): unsure at all n locations
gacttgcactcccatnnnnnnnnnnnnnnnnnnnnnnnnnnnnnnnnnnnnnnnnnnnnnnnnnnnnnnnnnnnnnnnnnnnnnnnnnnnnnnnnnnnnnnnnnnnnnnnncggccgccctagatcgatcggctatgggatctgcatggatttctagggaaaggtctttgattctccagaaaatggtacgaagcttagggttcaaattccggaatttaaacatcacaaatgagatattgtttaagacatcattttgaattcttaccagacagtttcaaaggtggctgctacgaccattttgatgctacccacggcacttggagacaggtctattcgagggtatcgctttcaaactgttatggactgacgccgtcacaccaactgttt

SEQ ID NO: 129585 - DNA, 372 bp, Arabidopsis thaliana columbia
  unsure (1)..(372): unsure at all n locations
cgaacannnnnnnnnnnnnnnnnnnnnnnnnnnnnnnnnnnnnnnnnnnnnnnnnnnnnnnnnnnnnnnnnnnnnnnnnnnnnnnnnnnnnnnnncggccgcgcggtaaatatcaactatggcatttacagagaagaaatcaagttagaaagtaaaagatggaaaaatgaataccagtcacaaagtaaaatcaaggagaaatagacatcatcaatgtgtgatcgttcaaaagagactcaatgtcaataaaatcgtcttcttcacagtcgactgcttcttcttctttattggttatagatgcacttgatgaagcctcattttcacggaagccctcaacaaccgttaggagtctacggtattgatcccgtgctc

SEQ ID NO: 129586 - DNA, 352 bp, Arabidopsis thaliana columbia
aattagcagagctgcccctggcggcggtggctgtacgaattgaggtaccgcatgcctgttttgttttttaagtcgctgtcgattttcattgaaggagaattgtacataccgcacaaaagcattaccgcaaaaaacgagattgcatatcgaaaaccaacacacaaacaaacttatgcacgcatacataagacaacactgcacacctctttggcctacaaaagcaaaaaaaccaccacttcatgcagtctaaacgacatcgtttaagggttgggtactctgacttcttgttctctcctctttttcaagacttgtgttgcgtgctagagatcacatgccgtaagtaggaggagag

SEQ ID NO: 129587 - DNA, 372 bp, Arabidopsis thaliana columbia
  unsure (1)..(372): unsure at all n locations
cgaacannnnnnnnnnnnnnnnnnnnnnnnnnnnnnnnnnnnnnnnnnnnnnnnnnnnnnnnnnnnnnnnnnnnnnnnnnnnnnnnnnnnnnnnncggccgcttttaccttacctattaggaacaatctctgacatttttcatatcgccatcggaattatacactaacaaacatactggcgctactaaatttttttatacctagatttcatacaaacatagactctttttcaatgcttaaaattaaaacgaccatcttacagactaaatctcagtgtacacttattcgcagatcttgtgactctatatcatctattttctttaagagaacacatacatccagacaattcctagtcttacgctctggaggcat

SEQ ID NO: 129588 - DNA, 363 bp, Arabidopsis thaliana columbia
aatcctgttacagagctggagctccaccgcggaggcggccgctctacaactagaggatcccccgggctgtttgatatttgaggccgcggacgcgtttaattaaagacacaaggttagactgtaaccaaatcgcgacacaaacaatgactaaggatctaattcccccaagcaaaggaacccaaccacggaatcactattcccatggagaacaaaccaagctattacacggaaaacgagcatagcaaagaataatgcacagcggccatgctcctaggaataagtcgaacttacttgttgtagattctagattagtacgcaaacgtactgactatgcgagtatgaacaaagcatgggccctatgtg

SEQ ID NO: 129589 - DNA, 383 bp, Arabidopsis thaliana columbia
  unsure (1)..(383): unsure at all n locations
actcccactcgcnnnnnnnnnnnnnnnnnnnnnnnnnnnnnnnnnnnnnnnnnnnnnnnnnnnnnnnnnnnnnnnnnnnnnnnnnnnnnnnnnnnnnnnnnnncggccgctttcacctttactttcacaaaatatgtataagatttgggaatttgctaaaacaacacgaccaaatcaactcattcacgcttctaaggtcgtgtagtaacagaagcaacacacaaactgactctgtttcacacacaacaggttaaaagaccttctgacagaataataatgtctgttttactaagctgagatttggcccgtctctgagagatatagagagaagagtgacacagcgtcttgcagatgtgttgatcttacatcttctggcaaagggg

SEQ ID NO: 129590 - DNA, 353 bp, Arabidopsis thaliana columbia
taaataagctgaagctacaccgcggtggcggccgatctagaactagtggatcacccgggctgttttatttttaggtcgcttactactaccaatgaagagaatgtgtacaacacgcataaaagcaagaccgaaaaaaacgagattacatttaataaataaacacacagacaaacatatacacgcatacataagaaaacactgaacacctttttggcctacaaaagcaaaaaaaccaccacttgatgcagtctaaaccacctcgtttaagggggggtactctgatttctacttcacttctctttttcaagacttgtgttgcgtggcacagatcacatgccgtaagccggaggaga

SEQ ID NO: 129591 - DNA, 362 bp, Arabidopsis thaliana columbia
tgggtacagggaacaggagctgcacctccaccgcggtggcggtcgatctagaactagtggatcccccgttctgtttgaattcgcggtcgccaaaccctcagggtctatggctatgaccaggatttcaacaaaaaccgaacaagagattaaactaaagttaagattcgagaaaacataataattcgcagcatgaagtgccaaacgttatagctcacagagagggtattaacgttccacattccatcgtagacactcccccactgttggtgaccaggaacccatttatgacacttggggctgttgtcactatcaacaacccttgagatcaatagctggataactggagcaaacttcacgcatat

SEQ ID NO: 129592 - DNA, 364 bp, Arabidopsis thaliana columbia
ctacaaggaacaaatgctggagctccaccgcggtggcgggccgctctagaactagtggatacccccggcctgttttattttgcggccgcatataccaaacctatttttaatatggctacccaaaggattagacacaccctggatccataaattaatgtaaacttcggcttagtgaaaacatcttcattcgcgattccttgagacacaccatattccaacaattcttgaaaagaaaaccaacatcgtttattccaaacttccaaaacgattgtgtcgaggaacctttttatgacacttagcactgtattttctattatcaaccctccagaaaaattgctagattatcggagcagacgggacgcat

SEQ ID NO: 129593 - DNA, 192 bp, Arabidopsis thaliana columbia
aacaaacccatttaaagtataacaaaacctggcatctacactcgcgagtggctggctcgcctactagtatactatgatggacgcacccacttttttttttttttgtacatcacggcggcaccgcttactacatacgataaaaacctttggatcagtggactgataacgacatcctactcatagatacgtgat

SEQ ID NO: 129594 - DNA, 372 bp, Arabidopsis thaliana columbia
  unsure (1)..(372): unsure at all n locations
aacacnnnnnnnnnnnnnnnnnnnnnnnnnnnnnnnnnnnnnnnnnnnnnnnnnnnnnnnnnnnnnnnnnnnnnnnnnnnnnnnnnnnnnnnnncggccgcttattgtacaccttttcttccaatgcttacacgtagtcctacacgcactagagattatcaatcaatgcagatttaccgaaaatcaaattaaccacaccctgtattgtctattgacagagaggactggacggtcatgattacgaaaactgatatcgttaacaacacttgtcagaaggcaatacattaacagatcatctaagctgagttgaacttgactctcgatcggtatgagaattgaacagactatgcgacactgtacagatctgaaccg

SEQ ID NO: 129595 - DNA, 375 bp, Arabidopsis thaliana columbia
gacattaaccctgactaaagggaacaaaacctggagctccaccgcgggtggcggtacgatcttagaacataacgcaggcccgtttttgtttgaattcgcggccgcaaccgaaaaacggaatagggcctcaaaacggaaaccaaaagatggaaaccagacactaagaaaaacttcgccctcgggaaaatatcaaaattggaccgacccagaccaaaaccggtaaacgcaacagagagatggccacgtccacaaacagcgacacaaaggacccaacgacggttgagaagagaaactcgggccacaggaactctttttggtcgccagctatatgcagctcatacaccacttgggttaaagggggtacaaacaccagct

SEQ ID NO: 129596 - DNA, 446 bp, Arabidopsis thaliana columbia
aatggaacgaacccagtttaggggaagacagcccggacccgaacgcggcggaggagagccccaaaacaaggggggagacccggttcagttttaaaaacgagggcggccaacacgggacacggagaggggggcacgcacaccaagacggaacggacaccccgcgaaaaaaccgccagacgagggggaacaggcaggcagaacacagcaaacacaccggacccacaccgaaggcgaccagacagcaggcggggcaaacagggaacggagccaaggacagacccggaacacaaccgggccaagccagaacacacccaccgcgggcgcactccccgggcccggaaccgaacgcagccgacaaccgcacacgccagctccaaaacggaaaccaacgagcagcccacgccaccgtagcccaagcggccgacgacgaagcaccgaggcacgga

SEQ ID NO: 129597 - DNA, 348 bp, Arabidopsis thaliana columbia
  unsure (1)..(348): unsure at all n locations
nnnnnnnnnnnnnnnnnnnnnnnnnnnnnnnnnnnnnnnnnnnnnnnnnnnnnnnnnnnnnnnnnnnnnnnnnnnnnnnnnncggccgcctatcctttacctcttcttaatacgtcaccacctcgaattatacacactcgacatcatttatgaatgggagggagactctgtgaaagaatctatgccgtagatgggctcagaacagagaaattcgctcatttctgggttagaatacgaattatgcatagcgcagattctcggatccgtatgggtggagagaggtggctttaacagcgcggctagatctacgttttgagctctaccagagaatgtgccagtgttcagctc

SEQ ID NO: 129598 - DNA, 258 bp, Arabidopsis thaliana columbia
  unsure (1)..(258): unsure at all n locations
cacacctgacaaaaaaaaagcaggaaaaaccacacttttccagctttgaaaaaagaacggggccggtcactcccatacacacatgcaggcggggagggaacaagaccgcaaacgacanaagacacaacgacccgtacccgagaaacagacagccgcagccagaggagaacacagaaaggggaacagaagaacacacaaccgaacgcggagacagagcgcataagcccaaaccaggaaccaggcgagagcagcaaagca

SEQ ID NO: 129599 - DNA, 265 bp, Arabidopsis thaliana columbia
ccgaaaggacgaaaacggcacaaaggggagggggagcaacaaaggcggaaagacacaccaaccgaacacaggaaaaagaaaaaacagctcgaaagcgcaggcaaagaccgagagcacaataagcaaccaaacgaaagagcggaacacaccagaaaggggaagagaaacaaacaaggagccaaagacgggccaaaggacagcgcagacacaaacaagacaagaagaaggcgacaccgacccagcgcaagggagcagagccagggga

SEQ ID NO: 129600 - DNA, 371 bp, Arabidopsis thaliana columbia
  unsure (1)..(371): unsure at all n locations
nnnnnnnnnnnnnnnnnnnnnnnnnnnnnnnnnnnnnnnnnnnnnnnnnnnnnnnnnnnnnnnnnnnccacgcgtccgcttcattttacaaagcaacatcgatgatccattctctattgacgtctgacatccattcaaggaactaccatcattatcactttctatagacaactcctggatcttcaacgcacgtatggactggaaagagactctctgatgcccacttgttgaaagctgccttgcctgcattgacaaatgaggaggttccagctctaattgaggaggataaggctatgaccatcattgaagcgagacccgtggagaaagatgattcgaattacacattgcaccgtgtgtatagatccagaggc

SEQ ID NO: 129601 - DNA, 357 bp, Arabidopsis thaliana columbia
aagggtaacataagctggagctccaccgcggaggcggccgctctagaactagtggatcccccgggctgtttgattttgcggccgcttcccgaggctcgaaaaaaccctaaatctattctccgctcactcatccaaccgaagatgcgtgagatccttcacatccagggtggtcaatgcggtaaccagagcggcgccaagttctgggaagaggtttgcgccgagcacggcatccatccaaccggaaggtacaccggagactcagatctgcaacttgagcgcatcaacgtttactacaatgaagcgagttgcggtagattcgttcctcgcgcaccgctcatggatttggagcctggcact

SEQ ID NO: 129602 - DNA, 378 bp, Arabidopsis thaliana columbia
taaattagctgaagcgccctgctaccggcggcggacgcctataactaccggctccccttttctgtataattcgcggccgcccaaactccactaggggtggggctgcgaaacacacgcggacacctaactgctaagcacttttgcatcataacatcctctaccagaactacaagaatcccgacacttctcaatacatgactgggtgtcacagatgtacgtggctctcggatcagaacattctatgaggtacgacccgtatgccctaggcctccaaccgcaaggctgcacgctgtgtgtaacccacttgagcgcgattcccgactaatctaacccagtctgggcagcgctacctctcctctatttttactcttgcgatgc

SEQ ID NO: 129603 - DNA, 367 bp, Arabidopsis thaliana columbia
  unsure (1)..(367): unsure at all n locations
nnnnnnnnnnnnnnnnnnnnnnnnnnnnnnnnnnnnnnnnnnnnnnnnnnnnnnnnnnnnnnnnnnnccacgcgtccgttttgtttttcaataggcgccctgcatggatcccctcttcgagagtaaccgctttagacgccgtctatcaactctcacttgtgcctgctgtcaccgctcttcttaacaaaatgcaaccgcgtctttccggtgtcgaggtggcatccggttgactatctcacttgtaatcttgaaacttgggatgtatctattgcatggatgatgcacttgggtctctcacgagcatgagctcgaaactcgcagtcgtgagaatcaggagagatacgatatctggagggaccgctgttca

SEQ ID NO: 129604 - DNA, 365 bp, Arabidopsis thaliana columbia
tgaacccagggtagaggaaacctgagcctggagctggaacgcggtggcggaacgacgtagacaaccggagcccgttttctttatgaatacgccgccgcatcgagccgaatggggtgggcgtacactctccaatacccccgagcagagactccagcagacctgaacggaggagcgtcagaacggaatcctccgccggcggctcggcaaacaaacaaagggcggaagctcgagaaaagaccagagcccaggacacaaaagagcgcaagcatgcagccgaaaggctgcaccaacctaagcaaagccccaggaagagccagagtcccgcggaagggacgtcacccgctgatcctcgcacggacctcctt

SEQ ID NO: 129605 - DNA, 352 bp, Arabidopsis thaliana columbia
gaacaaaagctggagctccaccgtggtggcggccgctctagaactagtggatcccccgggctgtttgattttcggccgcccgacttctaaaagagaaacaggtggaaccttaagagccacgtcaggtcctctacagttccttctcaagaaattataaccgaaattaactgctaatctcttcatcaccgatgatccttgtttcgctttcacatgtgaatgtcccaatataaacgcagttcctgctttttgcgctgccagcaaatccctcagctcgcttctcagttccgcatctgcttctgctgacgatgttgatccttcgtcctcgtaactgctttcctcaaccgcaaacctc

SEQ ID NO: 129606 - DNA, 368 bp, Arabidopsis thaliana columbia
  unsure (1)..(368): unsure at all n locations
tnnnnnnnnnnnnnnnnnnnnnnnnnnnnnnnnnnnnnnnnnnnnnnnnnnnnnnnnnnnnnnnnnnnnnnnnnnnnnnnnnnnnnnncggccgccaaaagcaaaaagcaaaatgttttttttcttcttcggttgtatgatttacgaatcgatgtacagtaaaaacaaaaattcacctgtatattgtatatatgtatgtaccggtattaataataagtaaaccgatcgagactggtcaagaatccaacgcgaacggcgtttgaagaagatcatacggagcccaaagcgcgtctaaaggacaaggccgaccagcatcaagcctagcccatggcttacctttcccactccaatgcaacagactcaccgga

SEQ ID NO: 129607 - DNA, 263 bp, Arabidopsis thaliana columbia
ggacgcggggcgccgactaaacacggcgccccttttgtagacgcgggcggacaagcacgggtcggcagagcaagaacgagcgaccacccaaagccccacggaccaagctccgcggaaaacaccagcgacgaacagaacgcccaccaaaagatcgaggaatcgcaggaagaacgctgccaccgacgccaaaaaggggaagactacagccggccgcaacaaggcgagcccgaaccggaccactgcacgaagacagaaaagacaac

SEQ ID NO: 129608 - DNA, 460 bp, Arabidopsis thaliana columbia
taacccatgtgttaaatgaaacaggaagctgcgacctcggacgcgcggctggctggtacgaatctagtaacatagccggagtccctccttttttagttttgagattcagcggcacgtcttttcttgagtaaaggtggcacgtattttagacaattataacaactatcccaccacgctccaaaaatcttacatgggcaatagcaaacacaccaacaatactcaaagtctgctttcatgcgctcgacccatgatctcagaaaccactccgtcatattgcttacaggtttaacaaacttatcattctctacgtacatcagtaaagacaatatcatggagcaccctctatactggtggagaaaggatgaagaaagatatttctgggatttacatattcaaatgaacacccacacgatggttggctgtgaccctatactatgcaccaaatgctccaggtatgagt

SEQ ID NO: 129609 - DNA, 364 bp, Arabidopsis thaliana columbia
  unsure (1)..(364): unsure at all n locations
nnnnnnnnnnnnnnnnnnnnnnnnnnnnnnnnnnnnnnnnnnnnnnnnnnnnnnnnnnnnnnnnnnnnnnnnnnnnnnnnnnnnnnncggccgcaatcgtctttgtcgtcgttacctccacctccagaattccgaaatttctgggaatatcgattttgatttctatttcttcacgctctaatttactcgtctgctcggctgtttctctgtattggctgattcgaaatccggggtcaaaccgggtctgagctatctccaggttcggaatttacagattttatctggtctgatgggatcagagcctcggttcgagccgaggccggaactgattgacttgcctgttcttcagaaattcaagctctac

SEQ ID NO: 129610 - DNA, 362 bp, Arabidopsis thaliana columbia
ctgaccccgtgtaaaggaagcagagctgacctcgagcgcggtcgctgtcgatctagagcaccggcggcctgttttgtttgagttcgcggccgccaaaaccctttggtaataggcgggaatcggaagactaacgatgtgtacatacaaaggaccagcatgccgcatttcggtatattactaacgggcctgggacgaagcaaaccaaaagatatgcgagaccggaacgatttatccccacatccaaatcaattggtgaacttgaaaattgttctgtgctgagcgactgagagacttacttatctcctccaacaagactacgcctgtactaagaggaaaccacgatcaaatgggtaagcttgact

SEQ ID NO: 129611 - DNA, 367 bp, Arabidopsis thaliana columbia
ccctacctcagtgtaacattagcaggagctgcaccgcggagggggtcgctgccgatctagaactccggctgccttttgttgtttgaggtcgccaccgcaaaacactcagtgtgggagtgctcgtcgccacaatctacacgcagccgacacaaataaggatgaaagaacgcctagacacattgacatatctaccaaacctagaaatggcctcgatcttttccagtgccaccgacaggggacatctaatagaaccaaggtcttgtttgttatgccagccccgcgctctttgtaccgatctgcgactctatacgagccgcctcaacgccacctgttatatccgttaacgggatctccaatcaagccggag

SEQ ID NO: 129612 - DNA, 354 bp, Arabidopsis thaliana columbia
tacagagctgaagctgaaccgcgggggcggcggcggtcgatctagagctagcggatgcccctttttgtttgaattcgcggccgcgtcactatacaccagtcttagatccgggaagctaatttgtcttctcctgatcggtgaatgcagctacattgacctgggatctaaccaagctcttctggtttccagctctctggaattcaaaaaaatggaggagaaatccaagtcaagaggcaggagcggctggttcatggccattattgtgctagcttgtgcaatcctcgccgacgttgacactgtcaaatagagaacgaagagatccggggactatgacagtggcggtcccatgcctgc

SEQ ID NO: 129613 - DNA, 469 bp, Arabidopsis thaliana columbia
cggccaagtttttaaacttttccggacccgcccaaagggaaaggggctccctgggagggccccgggagggacccaataggcaacaacgaggcgcgctccacaaaggggcgggggacacaaaggaagccacaccagaggggggaggccacaaaaactccgaagagcgacttcataggcgaaaatacaccccaaaaaacgcaaaaaccaccacaaacagaacatgaaaaacctccgcgcgcccctccgggggtctacaacaagacgaacacacctagggaggaggcccaagaaagagggggcgcaccggcagaagcacaccgaacaccggggaaggacaacacatcccaaccacccccaccacagaggggggtggggaacacccaaaaaaaaagccaacgcgcaaggaggcagcgctacagagcaccacaaccaagaagataccgcggcgacgaccaaaaagccaccacac

SEQ ID NO: 129614 - DNA, 377 bp, Arabidopsis thaliana columbia
  unsure (1)..(377): unsure at all n locations
gtaacaggaaggcacggtttttttaagatattttttgcccgagctcgctatagaggtcagctgaggaanaacttggggagttgtggttttcagacaactacgatacggcccgtctaacgcgtatggggtgccaagctcttgtaattcggacgaagagaaactatgtgtttttatataggatatagtccgagataagggcactaaaacgatgggatggagtaatcagagggatttgtgagcacagcaggtgattttgtgtccgcctaacttgctgcggtgccattgctgtgtagttcattgacatgcaggtatcgtctggtactcgcggccggaagagtgtgaaatgaggagcttgatggaggacctggtggtaaccc

SEQ ID NO: 129615 - DNA, 362 bp, Arabidopsis thaliana columbia
taccctattaaagttgagcagaagctggacctccaccgcggtggcggccgctctataactacggatcccgttttttttttgaattcgcggccgcaaacaacggagtttgagttgctttaccgatcccggcgacggggtctttcccccacccatgctagttatctgagttagctaacacgtgtttgtaggactttcttagtcagacgtccgatgcatgactatgtgactcttctatggcaagagctcttcgttcacttcccttctctagcgcacaagctgatgaagaaacctgtagcgttgcagcagatgattgatactctagataaccagactcagcacctccttctgtcctcgaagcgaac

SEQ ID NO: 129616 - DNA, 309 bp, Arabidopsis thaliana columbia
  unsure (1)..(309): unsure at all n locations
caaacaacccattaaggaagctgaagctgctgctgcacccgggccaatcgctctataacatacagcccccttcttttgaattcgggccgctagactnatcgtttatggagaataatctgccctacaacaccgacccagggatgtacaatggcggaactggctaacgtgacgagcttattacccaagctatacaaagaggggggaacacccagatgaccagacaaggaaaccatacctcacttaccaacaaggcggggtgacacccaaggcgaagccaaccaatgacttcctcatggaaaagatcccgac

SEQ ID NO: 129617 - DNA, 472 bp, Arabidopsis thaliana columbia
  unsure (1)..(472): unsure at all n locations
aacccctaatataagaggttaacaagaagccaggcagcctcccacccgcggctggtcggctcgcctactagaacctagtaggactccccacttttcttgttttttaatttcagcggcgcggccgaaagaccactaattgtattgtgtgtgagtcacatagatcaggtgttctcttaaaccaacaacaagctgggngtaaatacaacatgagcctctttagcgcacgactacactacatcaccacatacaaaaaacaaactatccgaatgagtctgtgcactgcgcgggcacatacacgaatggtatcactccgtccaatgcgcacaaagcctctacagtcggaacgaagactaaaaggccacctatcacagaaccctaaacccaaagttacaatatgactgtgtacaagaagctttcactgaacactagagagacacacaactccaaaacaagactgtcaagcactaacacc

SEQ ID NO: 129618 - DNA, 373 bp, Arabidopsis thaliana columbia
  unsure (1)..(373): unsure at all n locations
cnnnnnnnnnnnnnnnnnnnnnnnnnnnnnnnnnnnnnnnnnnnnnnnnnnnnnnnnnnnnnnnnnnnnnnnnnnnnnnnnnnnnnnnnnnnnncggccgccgtcaataatattttgatgatagtaaacggagctggagactctagttttatgtccttgaccttcttttccactgagtgcaccagttcgagtccatgcttccgcacccatcacgcacaagtttctcagatccagagtagcaacactttgctttaacgttttaagatgtttgataatacgttgtggttgcatctgctgtctgagggtaataagactgatgcactgcattccaatctcctgttgcagaatatgcctggtttgcagcattacaatc

SEQ ID NO: 129619 - DNA, 321 bp, Arabidopsis thaliana columbia
cccattgggaaaaaaaccccaaggtaacaatatgcgggaaaccgggacccgtggaagggcggaccgcttgaagaaacgaaaaggaagccccggggcaggttagaaattgaaggacgaaaacgccacaagacaaaaagatgggggacgaaacgaacgaggaaggaaaacaaacggatggaagcaaagcaggagaaaaaaccaacgaagaggaggtggggagaaagaacacaagtggggaaaagacggcaaaggagggtgaaatgagattgggaaaagaagagagaggagagaccaaaaacagggaacaaggacgaggaagca

SEQ ID NO: 129620 - DNA, 370 bp, Arabidopsis thaliana columbia
  unsure (1)..(370): unsure at all n locations
nnnnnnnnnnnnnnnnnnnnnnnnnnnnnnnnnnnnnnnnnnnnnnnnnnnnnnnnnnnnnnnnnnnnnnnnnnnnnnnnnnnnnnnnncggccgcagcttttggagtcccaaattatggcttctgctctggattgttgttgtttgaactggactgtgagtgtaatcttcaggtctgattgttgttgttgcagaagccgaagaacttcagttttaacgatacgttcacctcaagtcctctctctttgaacaacagggcggtgtggctttggagcgttgggattgccttgctcatagaaacatttgaaaagagagacagcttcttctgccattattcctcctctgcacttgtattccttttcctctttgag

SEQ ID NO: 129621 - DNA, 356 bp, Arabidopsis thaliana columbia
gggtacaagtagccggagctccaccgtggtggcggccgctctacatctagagaatcccccggcctgcttgaatttgaggccgcggcccattaaaactcttcttttcaacttttttaggagtatatagaggaatctagaaatacttttatagatggaaaccaattgaatagacagagatatcactacaccaatctttccaagaggtcctcacgaattacccacattccaggaaaccctaatcgaagttcagttcatttctttctttctgtgttcgtgatcctcccgggaaatatttttgggcatatgcctctctgtctttgtcttcctttttcataggagccatgcctttctggttg

SEQ ID NO: 129622 - DNA, 371 bp, Arabidopsis thaliana columbia
aatggacctaaccctattaagggaacaaagctggagctccaccgcggtggcggtcgctctagaactagaggatccccctttctgtttgaattcgcggccgcctggcatagactatgctcattcatacgtgccacaagaaagtactgctccttgctcaaccctctaaggcagaggatgtgctcacgccaacaacaccttcataaacatagctagcgccattggtcgctccaaaaaagtagcaagacttacgaagctcccaggcttatgcttcaagacgaaacacctggaactccctgcccttgtctgatccgacctcttacaatctcacacttggcaccatgacccacgctggtgtgacgttccgcaacctc

SEQ ID NO: 129623 - DNA, 365 bp, Arabidopsis thaliana columbia
  unsure (1)..(365): unsure at all n locations
annnnnnnnnnnnnnnnnnnnnnnnnnnnnnnnnnnnnnnnnnnnnnnnnnnnnnnnnnnnnnnnnnnnnnnnnnnnnnnnnnnnnnnnncggccgcaggaaagaaaataacactacaaccaccaccaaacgaacccaccagcaagatcacattttttccagattcatgaaaaatatttaatgaacccaaactaggatgttggtgatgatgatgatgatgactcaaaccggtatggcatcaacattggatgagtcttcacatctcaatactattccttcaagacttgttgggaatgtgcatctcctccattgccaaccagctgctagtggctctgatgatggaactatcatcaacacattatcgt

SEQ ID NO: 129624 - DNA, 402 bp, Arabidopsis thaliana columbia
  unsure (1)..(402): unsure at all n locations
tgaccccagtgtaacattaagcatgaagactgcaccctggctacgcgggtgcgcggaacgctcttagtaacataccagcgcgccncccttttctatttttgatgttcgccggcccgcactcatcgcgctatgcgggctggcctgcttaaatgctatacggaccagccttcgacccatgaacatgcgctgcgtcttaaacgaacaagaccgcctgctctattctaaccccctatgcgcgattgctggacttgaaatcaagaccttactctgcatgaggatcggggatgctgcgttgccccttgcttgactgacaaccgactcttcttctgatgcttacttacccccgcggtcccaagcactctcacctgatcacttgcacaaccgctggccgagtcccaccta

SEQ ID NO: 129625 - DNA, 476 bp, Arabidopsis thaliana columbia
aagttaagcattgaagctgccaagctacgatccgcgggtcgcgagatcgcctggtataaataccaggctcaccgcggcactttttttattttcttaggctcgcctacaacacattcgactccaatcgtagagagggtaaatcacattacgacacacgacaagacagctccacttctaccaaactcgtacgcactgctactcctctcagtacatacatgggaacactcaacccgtgttagattgcatctctcccctcgtggacatgcagaactcagaacgtgctacgctacgataacgggccataatcatcctgacgcggctacctacgctgccctcaacagactccatctcaatctcagagcaaagactcgacgcagctcttacacgaatcctgttaacccatactcaccttcactttgcactacttaacgcgactcgattccaagaccttttttcatcccgactctcggtcgaca

SEQ ID NO: 129626 - DNA, 363 bp, Arabidopsis thaliana columbia
ctaactcctggtaaagggagcagaagctggagcgtgacggcggtggctgtcgatctagaggtatcccacgcctgttgttttcgaggccgcttccgggtgcttagtatcgggtcagatctacatgcggatccggagaccctgagaatgaaacacttcataactgagcgagtgcgtgcgactccgaagctcttcacctacgttctagcaggtttcatcgctctactcggcttgacttgcctctactacggctctttgttggctcccggatccagaaagtccgatgagttcgctggatctaatataccgcgttcgtaccggaatttgatccttgcggtatcgatgatattgcgctcgcagagcgcc

SEQ ID NO: 129627 - DNA, 375 bp, Arabidopsis thaliana columbia
taaccccaagggtaacagtataacagaaagcctcgcacgcgcgcgcgcgcggcgcgctgctcagaactagtaacaagcgggcggcccttttttgtttggaagacgcggccgcaccacgcgcagaggatatgggtccttctctgcacaacctacaaggaagaagagcggctaaagccgcagggatcaccaggtccgccaaagtggagagtgacgaatcttatatgctggaacaggcataacaatggcaatcatctacccgggatcaggactgactggcccataccaaggaaaaagcccactcataaagaaggcggcttgcgtctagaggaggacaacacgagcggcaacggatcacggattatgcaacggagcgat

SEQ ID NO: 129628 - DNA, 360 bp, Arabidopsis thaliana columbia
gcaccgtcgactgcgcggtcgcgcggctagcttctaggaatctagtggcatcgccctcgttttttttttgacattacgccgccggtaggaacagaaaagtgagactacacatcactaacgcaaacagacacccaccatccagatcacattttttaccgattcatgaaacatacttaatgaacccaaactctgatgctggtgatgatgatgatgatgactcaaaccggtatggcatcaacattggatgagtcttcccatttcaatacttttccttcaagacttgttgggaatgcgcatcttcttcattgccaaccagctgctaggggctctgatgatggaactatcatgaacacattattc

SEQ ID NO: 129629 - DNA, 364 bp, Arabidopsis thaliana columbia
taaccctgagtaacaggagcagaagctggagctccaccgcggtggcggccgctctagaactagcggatcccccgtgctgtatgaattcgcggccgcgatcaattataatccatacatcgaattcaatcgaccgcagcttcagatcagtactgtgaatcccaatccagctcaatctcgattttcccgccctcgatccctccgtgttctctcactctccgccgatccatcggcaaatcggaatcctaaatcagccgttgacgcacacgcgccgccactggtggttgtgggatctgcgaacgccgatatctatgtggagatcgagagattacccaaggaaggggaaacgatttcggccaagacagga

SEQ ID NO: 129630 - DNA, 604 bp, Arabidopsis thaliana columbia
gtgagagtattgacgaggtatgcacgcgtacgtaagcttggatcctctagagcggccggcctggtcttcttttttttttttaagaactttccgggctttggatgcaaatttttagaagctaaaccggatatgagattaccggttcttacaaaggcaattacacgccaagaaggttcttgcaagacattaaccttagccacatttttaacaaagggaatgaaggagaagaaagttcagatgtggttacacaggtagatatatgatatttcttataatggctgtacaaactcttgtccaaagtttgacgcaacaaacactgttactgggccaatcccagtcagtcaaacccgggttttttgggataccttgactttaccaagacagggtatttagggttcttaacttcataggcatatgaaaacaattttaggacagcctcccaggcttctctgcacatgtagacaaactcgggaacaccatccctggaccctggtcgcttttgaagtcttttcattttgaaacgggttcacttaattattttgggggagccaaaattttcttatttttcacccttcttttgggggggacgatgttatataacccc

SEQ ID NO: 129631 - DNA, 452 bp, Arabidopsis thaliana columbia
ctatgtacgtgccgaatgccacagcgccacgttaagacttggcatactctagagcggccgcccttttttttttttcctttttttaccagaacgcaatgtaaaaaaagggagaaaaagcgacaccctaacactgaaagcagagagaataaaaatgcgcacgcagacaaggaattgctcggcgtaattaaacgagagccaaattggcaaaagggaagcgtaacactaaaagagaggacacatggatacgtaacgcaatagccgactgagtggcatagctcatgcacgctaccggggccatcatatcggcgactcgtagaagagcgcaggaggacgggcttacgtggagaacagatggagccaacgcatcagacaggccttagctccatttcggaggcagtagctaaaggaaccacaaaggaccacaaagcggtcgcgctaattgcatagtctgc

SEQ ID NO: 129632 - DNA, 662 bp, Arabidopsis thaliana columbia
tgacactccatatgagctatgacgtcgcatgcacgcgtacgtaagcttggatcctctagagcggccgcccttttttttttttttttttttaatcgttgttcaaaataataaatgtgcacataacagtacctttgtaattttacagttaaagtacgattgttcataggacaagttttacatcttggaagtggaccacttaaaactgggtttattggcccgaaataaaataggagctcttacttattgaacgaaaagaacactcgcgtgaatgaaacttaatatagaccctaacttgaattagcgcatttctatgataccttaaaagctttcatatgacgcaggattttttcgatccggcgtgggtaatacctggagcttgtttttctatgccgcgagtaatccttatttgttatgttataccggctgcccatgtatcaaacgcctctgatgcatctcaccgtattctcctgtgcaaatattcaaaaaacagcgtcgctttctggggaggttttaactatatccggtaaacaaggaaatacgggtggaaattagccagctcttatgaaggaacctttttcttggagaactctctctatgggggcacaaataagtggagccactctataaatcgctgtttacctttattgaggcttttgctcctc

SEQ ID NO: 129633 - DNA, 660 bp, Arabidopsis thaliana columbia
  unsure (1)..(660): unsure at all n locations
nnnnnnnnnnnnnnnnnnnnnnnnnnnnnnnnnnnnnnnnnnnnnnnnnnnnnnnnnnnnnnnnnnnctttttttttttttttttttttagcaatacccactgtaacacaagaccgaaaaatagtgcctttgaaattatagagaaacacaacacatgcacgctcgctagagttttacatttcgttattaatcgtgataaaattggggaaacggaccctaacaatacgagtaccccctacgttacgaaccacaaaaacccctagcggtggatatttacatttcagggcataaaccgcatttgggaaagcctatgaccacctaaagtaattttgaccaaccctgagtttttccatggagaggcagaactactgaatggtcgcatactttcgagagctattccttggggtttaggatggggcccacttgcaaaaagccatgcatgcgctccaggttccgcggatattttaatagttatcttaagcgctcccacttgaacagaaagcgtgacgcctttgacgcttccgcactatttgaaaaggagactatcgggacttttctcactgggaatttgctcagaactattggattgattcctgacgtcatgaccgtgggagacctcccaagcctttggtttagtagccgatgccagggttcgcaata

SEQ ID NO: 129634 - DNA, 729 bp, Arabidopsis thaliana columbia
gccccacggttgagattatgtgacactcctatagagctatgacgtcgcatgcacgcgtacgtaagcttggatcctctagagcggccgcccttttttttttttttttttgtagtcatacacaacaataggatcggttctaatacaactacatcagcaatgttagagtacaaattcacatggacttaggcacgagctaacattctttctaatggtctgattacaaatggggcaactgacccctttcaggagacgaacattgacgtcgatggcccaaacattcttggtgagtgggtcagccaaatggacaccataacccgccaaagggcatttttcggtgaccaaagacttgtacgaagaatgcatgcgttgttgacatggccagcctaatgatcgagagttgatttactttaactgctaataaagcctggtttggtaacgggaggccctatgagaggcaacgcgcccctggcgatagccggtgatttgaaaatcgtaacggacgggctccatttaaacagaaggtttcaacagtttgcaaggggagaacttgtggaaaccgaaagtatagtaagtctttttcgggggcccatgttttttgattgacaggaaagtatcatttgctcctgactttcagagaggttggagaatcccaaactttgtaaggaaaatagggtttcctaaaaagacctttaattttcggcttctttagcccaaataaatttagggggg

SEQ ID NO: 129635 - DNA, 683 bp, Arabidopsis thaliana columbia
  unsure (1)..(683): unsure at all n locations
nnnnnnnnnnnnnnnnnnnnnnnnnnnnnnnnnnnnnnnnnnnnnnnnnnnnnnnnnnnnnnnnnnnnnncttttttttttttttttttgaaatgactaacaaggagctgttatcatagttttagcacatacctgcaacgtaagatatcaaattcacacaaagtttggcgccaacaaccaatccttgggtgtaccagttaaaataggaagccgcgttcattttacggctacggaaaaaccgtcctatgaccgcccaatcgtggacactgggtcccctttaagttgggggtggtcccgcaagggcccatggagagtgactatggattgctcacaccgacctttcctggagggcctgggcgctcctttgggtggagacccgataacgctcaacgctggggacggcatgcatttgaaagctaggcccagggctgggcaggtttcacccatactgtccaagggtttggcttctgcacaaggggaaggtgcgaccaacctaaattttgaaagagatggcgtgcagggaaccagtgtaaccgccaagtgtgccaatgtgtatgcgggggccactgttgcatttatccacacctgtaaaactaggcatgtgaagatccttaaaaccgaacgtcgatcgggatcgatcttcttattcgggagttcgccacattaacgagagttttggggac

SEQ ID NO: 129636 - DNA, 588 bp, Arabidopsis thaliana columbia
gggacactctattagagctatgacgtcgcatgcacgcgtacgtaagcttggatcctctagagcggccgcccttttttttttttttttttttaagaattacccggtgtttgaaaacaaaaatttagcggctcacttgaatatgacaataccggtatgtacacagacgcattacactcaatagatggagttagctagacgttccaatttgtgaaaccggtgcataacgatggacggacagcaatgtactacagagacgcttcacaggcgagcgcttgatttttactattatgggagtttataccaatgttgaaaggtagacaccgctttcagtgttcttgacccaaccccaagctatccctcgcgagtttagatggcatatatggcccattgccaagactggctattgacgcggtgttaactatgctgcatcactgacaaaaactttgatcatgggtctcgagtgcttctctcaagcacgttaaacagtattggcgatacatgcatcccttggaaacatttaaggggtctgccttattttttgacgtggcttctcttcatcattttgggcttaagcagggaggtccaaaa

SEQ ID NO: 129637 - DNA, 367 bp, Arabidopsis thaliana columbia
ggacaagacgtgcaagcacccgcacgtacagccgcgaaagcacggaaccactagagcggacgccacaacgacatagtgagaaacttatagacgcgacgaaagcacgaaacagacacgtcagacgagaaactcagaaacgcaccggcaaaaggccccaacagccaccaccgacacagggaagccacagcatcaggaaggacacaccacagacgagagggacactggacatcgaagcatcgcgaaaacagcgcctgacaggaacctatcgtgaaaacaccacagcgagtagacggacgcagggacaaacgacaccgccatccacataaaccagggaggaaacgcccctgccggacgagcaaacacgcgg

SEQ ID NO: 129638 - DNA, 693 bp, Arabidopsis thaliana columbia
cgccctgaaaaaccgttcacacttaaccgagcttgatgtagcatgcacgcgtacgtaagcttggatcctctagagcggccgccctttattttttttttttattgaaagggtatacatttttccattgcaccacacatatcatatgtgacttaaaacaacaaaaattgcgtaatagtctgtcggaatttaattattagctagatatatatatagttcgtaaaacatgattagatcagactactacatggtgcagttggacgatgggccagttgatgaacaacttttcatacaggcctcaacggttttgtacagggccttagctttgttcccatcaaacaactcacaagcatgaaacccatctttatcaaacctcgtctccacgtgaactccatgtccctttaacatctccgccacgtgtctctgacgatccactaaaggatccccaccgtaaccgttgataagagccgacggaaaacgtcccatcttatctttttcctgaggcccactgctcttaattggattactgcacacgtggtcacgatctacaccgttcggtaaacaaagggaccacaacatgggattagttgtcaaccgacagaaccttatcgtcttttaagcccgtgaattcaaaaatcccccggggttaaacgcccacccgtaagaaaggtctgggcttcatttattacaagcccc

SEQ ID NO: 129639 - DNA, 720 bp, Arabidopsis thaliana columbia
  unsure (1)..(720): unsure at all n locations
gtgcnnnnnnnnnnnnnnnnnnnnnnnnnnnnnnnnnnnnnnnnnnnnnnnnnnnnnnnnnnnnnnnnnnnctttttttttttttttttcctcagattgaaacttttataaatccttataacaatcttcgaaaacttggccaaaagaaacgcaacaacattatgtctcaaatgaaaaaactcttggtaacatgaaacttaaaaggttctaaagcaaacacacttaaaagagaaaggaacagtcgatccaatagtatacatgctacaatgcctgcaagccgtggccatgagccatcaaagttaaggagactcacttcctctaggggaagtgcggtttggttcgtaatcatcatcaacagggctccggtccctttttgaactgttaccaccggtttctacaaccggactgataacagagtttctgtcatagtcttcgggggctaccaccgtaacggcaagaatccacttacttttgaagctttggcgatgggggtgggatccccgcctatgaaccttggggcctggccttcatttataaaaggaacccgaccttccccatttttctgggcttttttgggcctattagaaacagctccatcccaatccccgcctttttgggaccttggcggtggaattacttttttctctgtccaaaaaactttcccacgcaacgcttacttctcctttttctacaaccccgggggagttattccgggtggaa

SEQ ID NO: 129640 - DNA, 369 bp, Arabidopsis thaliana columbia
tcattatacccttccgtgcatatcactaatactgatgccacttatgaatacgtatactgactcgcggtcccacctacgaattccgaatctcgagtcctaacgttcggcttcgattccgctatctcaaagagcactctctcgaataagccgaatgatattaattttcaagcaagtgtcacgttgattgttcttcgatactttcgtaacatactcatccattcaccggcaggcatcacgtcatctacggtaaggcgcggtctcatggttacaaagatgtctctcatgttaacttatcagccggggcagtctctactacccattgtggatcataatctagaagagaaacaacctcgggtctttcctggtcaa

SEQ ID NO: 129641 - DNA, 679 bp, Arabidopsis thaliana columbia
  unsure (1)..(679): unsure at all n locations
nnnnnnnnnnnnnnnnnnnnnnnnnnnnnnnnnnnnnnnnnnnnnnnnnnnnnnnnnnnnnnnnnnnnctttttttttttttttttttttgtggatatcagggcttaaacggaatatatttgtaccggaaatgtaacacaacacccacatatacaaagatcattgcttgtgttatagaacggtcgtatcgatggatacaaaaagggtacaacagcacggatttatatcatacacggcccgttgttgcaactggttttctgctacgacggattctacttcgacagctaaaaaccctggaacgggaggagcagtgattaccaccacggtcaatttgcttgcattgggaaatgacagttagactacactgtcaggatgattcacttacattgaaggcgatgagacagaccattgttgtatgcctcaattggttgagcctttgacagcacggccagcttcctgtggatctgattggtctacaatgcctgaaccttagaagcaggatctttccacttcgaagttgcctggtcattgggataccaaacaatagtttcaggtatcaaagagacttttctttgaaacacaaaactgattcttgctcttactgaaggcagagaggaaataaattgctgaatctgtgtaccgaaagcctagcttgcaagtttcaatcaaaaggtttccc

SEQ ID NO: 129642 - DNA, 594 bp, Arabidopsis thaliana columbia
  unsure (1)..(594): unsure at all n locations
nnnnnnnnnnnnnnnnnnnnnnnnnnnnnnnnnnnnnnnnnnnnnnnnnnnnnnnnnnnnnnnnnnnctttcttttttttttttttttttttccgacggaaagagaattaacagcttggttttcaccatagaagcaacaaagagaggttggccatttttctatgtacacacgacttactacaacgtatgttgcgagggttactacagaaccctaactcctacacaggcaaaccgcaaggagagatgatcttatggattttggtgagagcacaggcactctacacggcgaaagagcgctcatttaaatgctcgagtggaagcggttaaaccttgtcggcctatcccacgttatctttgcgaaaattagaccgtaacctacctctttaccctcgcccactacgtttatctaaccaggaccgtcattggggaagccatagaaatggcgactgactacttccagctggccgacggcctcacccaccagcacagcaggcatcttggaagagtccgggaaccgggacaattacccccagaaacaaaaaccataccctccaatacgtgctctccactgctccacaaaaaacgagtgcggaa

SEQ ID NO: 129643 - DNA, 687 bp, Arabidopsis thaliana columbia
acactccgtaagactatgacgaggtatgcacgcgtacgtaagcttggatcctctagagcggccgacctttttttttttttttttttttgtgaatatcatcgttaaaacatgacctaaaattactgcatttgcaattttagagatacattacacatgtacgtaagtcaagttttacatgtggcaaatatacattataaaaatggggctaattacccagaaaatttaagacacaattccatagttgaaaaaaaaaattccttgtcagcggataatcatttatcagaccataaactgggtttgggaatttttgtgatagaaaaaaaataatccatagtttgcatgattaatttgatggggcagttcaatatgggaaacttgactttttttgagtgagaatactttagttttgggatcgggcatctttatgtaaagcaacgatgctctaccgattccctcgaattttaaaaacgtctcttgagggctcaattcaaacacaaggttgaaagactttgggactattggactacttgaatacgaaaccaacgtaactagacttacaggggctacttttttattcaatggaattttttttcgccccttaattgacacaagggggaaagcctaacaaaagccgtaattggatctaagagtcgcccgaaaatggccaataaatctacgggccatgtt

SEQ ID NO: 129644 - DNA, 607 bp, Arabidopsis thaliana columbia
gcttgacgtcgcatgcacgcgtacgtaagcttggatcctttagagcggacgccctttattttttttttttttttttttttttatcgaaaaggtaatcaatttgtaaaacacaacagaaagcaaaccaaatatcttgttttaacaaaggacttatacaaacaccatgataataaatttaaaaaaaaaaaaaaaaaaccaccgcccttaatttttgatcatttagcagggacgcggaaaagtatccaatagtttgattaggagccataccacatcaacacaatgcaccacagattattgtgatattatagcctaacaatccaactgagaagattttaatgggcctcgttgttttttggctcttgggctaatgttcatatagaataagagtaatgtgttggtttttatagttaacttctcctccttcggatactttcttctgaaattctctttctgcggggtagataaccaattcttttaatgaagggacaaatctttagaccatcgtggaattttcctttattgggcattaaaagaattccaattatcgacagagttattgaacgcccgttgggaatttaagaacacccttttgttttactaaaattat

SEQ ID NO: 129645 - DNA, 656 bp, Arabidopsis thaliana columbia
gcacaatagccgagctatgacgtcgcatgcacgcgtacgtaagcttggatcctctagagcggccgccctttttttttttttttttttttttttttttccgaataaacttaaatttgtaagtctagcaaacatctgtttattttccagggacactctttggaaaccaaagattctctcatgaatcttttatttttgggttgggccttttttatacaggctcaagcctctcaagctgggtttttttaagggatgacgggggtgatggggtcaggttgaagagctttcttcacaagatcagtctgctccttaacatgaagctggtaaaatcctgtggctgtagcagctgagggaagacgaccaacgtatttgatgtcgttgaagtttcctctttgcagtgctttcatcgcggggcaaagccttagggctatgtattggtatcctcccatgttcatcggctcttcttgacaccacacgacctctgcattgggatatcgctttagctctctttggatgagaccatatggaaaggggcaaagctgctctactttgcaaatggctacatcctttgtttcagacttctttcgctcttcgtcaagcctatagtagaccttcccagagcagaggactagacctctgataccttctttaagaacaga

SEQ ID NO: 129646 - DNA, 669 bp, Arabidopsis thaliana columbia
agctatgacgtcgcatgcacgcgtacgtaagcttggatcctctagagcggccgcccttttttttttttttttttttaatcatttagaaaaagaggataggttcgtatactaagacacctgcaaggatagagctcaaatttacatggacttaggcacaaagcttacattttttttatgctcttatatacataaggggcagcctgcccctttaaggagacgaaattgccgttgatggcccaagcgttgttggtgagtggatcagccaattggacaccatagacttacaaaggtcctttttatgtgacgaaggcttgtacaaagaatgcaagcattgtttacatggccaagcctaacgatcgagagctgctttaccttcaactgatgataaagttctggttgtgggacgacgaggccctatgggacgcaacgtgtgatccggcgaaacgcgggaatatgataatcgcaacgggcgagctccatgcaaactgaaagctgtaagagttcgcgaggagtgaactagtggaaaccgaaacgattggaagttttttgcgtggggcaaatcttagattgtacagagaaattcaatcgccctttctttcgacaaagtttgggaatccgaaacttgtaaccgaaaaacggtttgcaacaaaactttaaattctcggctta

SEQ ID NO: 129647 - DNA, 691 bp, Arabidopsis thaliana columbia
  unsure (1)..(691): unsure at all n locations
cnnnnnnnnnnnnnnnnnnnnnnnnnnnnnnnnnnnnnnnnnnnnnnnnnnnnnnnnnnnnnnnnnnnnnncttttttttttttttttttttttttttgttggactgcgaaaaaagcattacaatttatactagaatttagaattcaactatagtcaaaaaaaagtatccctatggaaactcttaaaattggttccaacatcacgaatgtgcaatatttgctattcggataagcaagaatggccaatcgacatcactaagacagattacttaacgaagacgtttagttaccttatttttgttcgtcgccgtttcacacactaacactacaactagtggtgaacgtatacttaacgggggtgactacgacaataacaccgttagctttgttaccgaagtttatatatgctggacccttcacatgaagatgatacttcccggagataaaagtgccaaccttccacctcactttagcatcagcacgagtgatcaacaaaacgacaccgttatctttatcggcgtcaagactaacgccgttaaaaggaggcgatgggaacggggggtccgtaaacaaaacggtgacccggaaggtccccactctgtggggccccctgaaaaccggggggagcggaaactgatgtttggggaaaagggaatcttgtttgggcctcccggttaaaggggcgggaacc

SEQ ID NO: 129648 - DNA, 649 bp, Arabidopsis thaliana columbia
ctatgtacgtacgatatgacacgacgttacagataagtctaaggcagtcctactagagacggggcagccctatttatttttctttcttttttattcttttttactgttacccccgaaaaaagaatcacaacttataatagaatttagaatacagctataaaaaaaaaaaagtatacatattgaaattcttaaaaatcgctacaacatcacgaatctggaatatttgttattcgaataagcaaaacgtacaattaacatcactaagacagattacttaacgaaaacgtttagttaccttatttttattcgtcggcgttttaaaaactaacactacaactaggggtaaacgtatacttaacggggtttgctccgacgataactccgttagttttggtaacgaagtttatataagctggacacttcacacgaagatgatacttcccggagataaaagttcgaatctttcaccttactttaccataagcacggatgaataacaaaacgacaccgttatttttatcggggttaagattaacgcggttaaaaggagggatgggaacggaggttccgaaaacaaacgcggaccagaagtcgaaatttttgggtccctgaaaccggggagggattgatgctggaaaagtgatttggt

SEQ ID NO: 129649 - DNA, 671 bp, Arabidopsis thaliana columbia
  unsure (1)..(671): unsure at all n locations
ttnnnnnnnnnnnnnnnnnnnnnnnnnnnnnnnnnnnnnnnnnnnnnnnnnnnnnnnnnnnnnnnnnnnctttttttttttttttggtttatactactattactaaaaaacaggatattccaaaacacccaaggacaaagttacaggttacaacaaaggagagagctacaaaacccaaaattatgggcacaatacaaatccaagtttcaggtttcaaagtttgaaaccagagagagaaccattcataggtctcttgacttattaagaatccaatagctttggaatcaatcttaattctcttctctttctttaggcacagcaccaaattttttgatcaaaatttaagccaccaagggaaccaactccgggacacgaacacttttcttatagatctttccgatatgcgagtaacttcctattcgtcccccgacgtacacgtaagaaccctcgattggttttccttcctcgcctcgggttaagcatcccatgaatccgatatctgctatttggacttgcccgcaagtgttgggacatcctgtccaaggcatccttatgggccttggcacagatacaagcttttttactttttttgccacttttaaagctctaagtttagtctcgatatatcgttgtccccaaaactggttaccgttccaagcaattaagccttc

SEQ ID NO: 129650 - DNA, 671 bp, Arabidopsis thaliana columbia
  unsure (1)..(671): unsure at all n locations
taaatccnnnnnnnnnnnnnnnnnnnnnnnnnnnnnnnnnnnnnnnnnnnnnnnnnnnnnnnnnnnnnnnnnnnnnnctttttttttttttttttttttagacaaacccactgtattaaaaaagaaaaaaagagtgtctctgaaatcaaagcgtaagcgaacgcatccaaccgcgcacaagtaatagcttaggttatttatctgcaccacaatggcacaatggaccttaatattgcgcacacgcccttgtatacgaacgcctaaccgacgagcgctggattttcacacttctgggaatattttccactcgtgagagccagagaacgcttatcggtatacttgaccaccacaaagtttacccttgggagtgaagtcttctgtggggcccatgactttgctaactataacttggagttcaacatgctccccaatctaagaaacccgctcatggtgcctccaggttctggcaagccgttaaacgttatggagaacatggccctggacgctaaggctctagcattaggcgggtcctcacctttggaagcagattctaatggccctttttccaagtggaacttggacagaacttctggcttggatactgaacggcttatcagaggggggaattacaagtcgcaaaaaccgtggagatccaaaccaggggtcgccac

SEQ ID NO: 129651 - DNA, 678 bp, Arabidopsis thaliana columbia
  unsure (1)..(678): unsure at all n locations
nnnnnnnnnnnnnnnnnnnnnnnnnnnnnnnnnnnnnnnnnnnnnnnnnnnnnnnnnnnnnnnnnnnnncttttttttttttttttttttttttttttttgggaaaaagccagaagggctttttaatcctttttaaaaaccaaaattatccacccttggcaggtgggaaaacatggaaccctaacggtgtaaaattaccccacggaacctaatatttggctgggaaccattaccttttaaccctaatcctaaccggcctttttggccttttaaaaaaaactttttaaaaaaaaaccaaccccttttttttttggctccaaaactggggaatggtttccttaattatggttggccaaagtttttgataccaaagggaggattccctccagggtaaaggaaggccaatccccccttggggtcaaaggggccgggccagggaaaaaattttccgtggccggatggaccggaaacatttgggccgggtcttatttttgaaaaatcgttgggaaaaggatcggggaaccgtccgcaaccatccaatccaaaagttttggggttttcccgggcttaaaggcaacagggaagatttcccatttcccaccaagtggttttggggaaccttctaaaaccctttgggaaaacccggttttaccccctgtgacaaggggcccttgggat

SEQ ID NO: 129652 - DNA, 689 bp, Arabidopsis thaliana columbia
  unsure (1)..(689): unsure at all n locations
actccnnnnnnnnnnnnnnnnnnnnnnnnnnnnnnnnnnnnnnnnnnnnnnnnnnnnnnnnnnnnnnnnnnnnnncttttttttttttttttttttcggacaaacccactgtattaaaaaagaaaaaaagcgtgcctctgaaataaaaccataagccaacgaatcgcacccgcccacgagtaatagctcaggttatttatctgccccacattggcacaatggaccttaacactacgcacacgcccttgtttacgaacccctagccgacgagcgcgggcttctcacacttcagggaatttactccactgtggaaagccagagaacgccttttgagatattgaccaccacgaagcctaccatcgagaggcaagactcctgaatggcccatgactctgctaactatagcttggcgctcgcacgctccccaacagcaaaaacccgcgcatgggctccaggctccgccaagtcgtaaaacgttctgcacacctgggccccgaaagcatagcgctttcgcattagacggtacctcatcattgggagacgagactatcgccactgtcacaaactcgaacctggacagaaccaccggattgatactcgaccacttagcagctgggaggaaataccaaagcccctagtccgggggagaccccaatccggcgggctccgccccatatgcattgcctttg

SEQ ID NO: 129653 - DNA, 592 bp, Arabidopsis thaliana columbia
  unsure (1)..(592): unsure at all n locations
cgtgcacactatagcagcgactatgcacgttcgcatggcacgncgttnacgtaagncttggcatccttctagaagtcggcccgccctttattttcttttatttttttttatgttttaatatttattctttaaaaaaaaagtgaataatataattgaccatgccaaaagattatgtttaaagacattaaaccctaaccaaattttaagattagttttacctttaaatggattcaaatttattaaactttcagccctcgaaggcacaaggatcgaccttaacaatttcctttttatttcacatagatatctgccaattattgctggtttataatgaagtggtaatttacaaacatttcttaatagctaccccatgttttaatctgacatgaaggctatatttgaacgatgaaggtatctacattaaatccctttaagctttcaatggtgctttcctacaaggaacctctcaaaagactcccatttttggaacccgtttttaagaggtggtatagcttccccattaaagcccactcctccacggcgattggttaaccccatcgatttccacaccgcataacctttggcggtcttc

SEQ ID NO: 129654 - DNA, 707 bp, Arabidopsis thaliana columbia
  unsure (1)..(707): unsure at all n locations
aactccataagagctatgacgtcgcatgcacgcgtacgtaagcttggatcctctagagcggccgccctttnttttttttttttttttttttttttttttttttttaaaaaacagagggatttgattattggcccatggtagatgtttaaagtaaaaagacagaacaaacataaaatcaagtttaagcttgaggtttgccccacttgaggggcttaaccacctcccaggtgaagtcagggtcgttttttccgaaatgtccataccctgccgttttttgaaacctttcatttcctcctcttttcaagcccaagttgattggcatcattcctggtctgaaatcgaatgtctttttcacgatcttcaggatctccttgtctggaaccaacccttttccgttagtgtaaaccaacacagacaatggctagggttctccaatggcgtatgaaacctggacaagagccctgtgagccatgccattagccaccacactttttgctgtttgcctcacgatgtaagctccactttttgccactttggttgggcctttgcctgagaaagcaccccccttcatgagcctccccattctccgttttgggttaaatgaaggaattttaccctcccacgttaaacccaccctattacccggtgggggggccccccccgatacaccaaaaccccggaccctgtaatggggtttataggggtgg

SEQ ID NO: 129655 - DNA, 567 bp, Arabidopsis thaliana columbia
  unsure (1)..(567): unsure at all n locations
nnnnnnnnnnnnnnnnnnnnnnnnnnnnnnnnnnnnnnnnnnnnnnnnnnnnnnnnnnnnnnnnnnnnctttttttttttttttataaaaatctcgttcatccatttataaaggcctaaagttacacaccaatcactaagcccagctcatatgtcatatatcataaagcaagtaataactaatggagagagataactaaaaagcgaagccttctttctatttaagccaatctcatactttgattgggcgaaatcacacaggtgtagcgtttccgagctgaagagctttttctcgcccgtaaaacttttcgacaatggcaagtgaaaaccccattgccgcccctggaactatgcttgctacgacatttccatataccacaactctttgctcaatgagactctagtccgagagtttggcactcaccactgggtgagtagtgaccttcttaccctatacaaaatattgtctcttatattctcgccttaatgaccttaaaagaagggtaacaaggaaattgccaatttctagggacttgtttttgatttacagcaaccctttgcggtatca

SEQ ID NO: 129656 - DNA, 678 bp, Arabidopsis thaliana columbia
  unsure (1)..(678): unsure at all n locations
nnnnnnnnnnnnnnnnnnnnnnnnnnnnnnnnnnnnnnnnnnnnnnnnnnnnnnnnnnnnnnnnnnnnctttttttttttttttttttttgtggaaatcatcgattaaactgaatatattcttactgcatttgtaacaaaacagatacatatactaagatcataactcgagttctaatcggtagtattgatggttataaaaagggtacaactgtcccgtttcatcttatacacaatcccattgctgaaacaggatattctgctacaacggtttctcctttgacagacaaaaaccccggtaaaggaatatctgtgtcgaccaaacttctccatttgcttccatcgggaattgaagggaacactacactctcaggatgatcactttctttgaatgcgatgaacagatcattggtctttggctcatttggctaagccaatgacgcacattcctttccctttgactttaaaacgatctccaatgcccaaaacttaaaagcaagatcttaccactttggagttgttttggtcatttgcataccaaacaatattttcaggtttcaaaacggttctcctttgaaaaacagcaaattttttttgctctttactgcccaatgaaagataccaattgcgtggtctgtgttccgaaagcccaatttcccatttcccataaaaagggtcc

SEQ ID NO: 129657 - DNA, 669 bp, Arabidopsis thaliana columbia
  unsure (1)..(669): unsure at all n locations
nnnnnnnnnnnnnnnnnnnnnnnnnnnnnnnnnnnnnnnnnnnnnnnnnnnnnnnnnnnnnnnnnnnnncttttttttttttttttttttttttttttttttttttttttttttttttttttttttaaacaaagaaatttcctgggtattgataaaaaaaattcccaagtatatgttatttagctttttttaaaaggaaaaaattggtcccctaaatacataataattcacccggttcggaatttggatttactgatgagcggcccgaccagggggggcaccgagctttccttgcatccagttttgaagcatttgcaaggctgcctttgggtgatccatcggaaccatgtgtccagaattatggaccttaaggaaagtgggggaaccgcacttcttcattaaacccgcttttttgttgtctaccgggaatggaactgttggggttgttaaaaactttttttggcctgaccattccattttgggaacccactttgagttccccggcccattgccaacaagatcctttttctccggcaataaacaaagggaccttaatttcccacctttaaaaaaaaaaagctgggtaatttccccgcctccttcaaaaaaaattccccgcaaattccaaaggtcccttattttggcacattttggctgttctctcaataa

SEQ ID NO: 129658 - DNA, 677 bp, Arabidopsis thaliana columbia
  unsure (1)..(677): unsure at all n locations
nnnnnnnnnnnnnnnnnnnnnnnnnnnnnnnnnnnnnnnnnnnnnnnnnnnnnnnnnnnnnnnnnnnnnncttttttttttttttttttttttttgaaagaaactccgaagaaatcattacaatttgttataacatgtaggattcaactataataaaaaagaggtatacatatggaaattcttaaaatttggatacaacaacacgattttggactatttgctagtacaataagcaaaacgtcctattcacatttctaggacagattacgtaacgaagacgtttaattaccttatttttcttcggtgtcgttctagaccctgacactgcaactaggggtaaacgcatactataacggtggtgtgtgcgaccataaactgcttgagctctggtaccgaaggttatatatcgctggacacttcatgaagaagatgagaactccccggggagaaaagtgccaaccttccaggtcactctagaataagcaggaatgatcaacaaaacgacctggttatctttatgggcggtaagaataatgccgataaaaggcgcgatggccacggggggccccgagactaacggcgccccagggttgccagatgcgtggccctgacacgggaaagggatcgaggttcgggaaggggttccccgtttcccttagggggcggaaatagaaccc

SEQ ID NO: 129659 - DNA, 201 bp, Arabidopsis thaliana columbia
tgacgtcgcaagcacgcgtacgtaagcttggatcctctagagcggccgccctttttttttttttttttttagggaggtttctttccagagaaattcaaagaagaatctggaaacattatacacagcttacaatagaaagaacaagacgtgcttttagtgtagcctcaccgagacaaatcatcaaaccccattccaacccaa

SEQ ID NO: 129660 - DNA, 195 bp, Arabidopsis thaliana columbia
ttgagctcgcatgcacgcgtacgtaagcttgtatactgtacagcggccgccctttttttttttttttaactaaaaaactgtctttactaaagagaccctaattctccacaggaaagattcagatcagcggagtttactcctgtggtgtgctcaaaaacggttgtccatgttctcgactatgctttgcagccctga

SEQ ID NO: 129661 - DNA, 200 bp, Arabidopsis thaliana columbia
tgacgtcgcatgcacgcgtacgtaagcttggatcctctagagcggccgccctttttttttttttttgaggatatctaccagataattagaaggttacaattacaaaggtttctgtattacaacgaagttgaatcagagcgtgttctttgtccaaagcccatcattgagttacccaaatcaaagtccaatataaagccttc

SEQ ID NO: 129662 - DNA, 202 bp, Arabidopsis thaliana columbia
gagctatgacgtcgcatgcacgcgtacgtaagcttggatcctctagagcggccgccctttttttttttttttttgttaagagaaaggaccactgtaatgattgggagactattagcgacttactcttaaagctagagcaaaggacattggggattttcaagatgcgaccacccactaaatacttgttctcaactgctcagct

SEQ ID NO: 129663 - DNA, 204 bp, Arabidopsis thaliana columbia
gctatgacgctcgcatgcacgcgtccggaatcctgtataccggacacccgttccccttttacatatttttcatttttttccgcccaaaaggaggccatctcatgcgtatgggagcacctggctctggggcgtaagcacaccctcaaaatgactggagctgagcccctcccctttggacaaagaatacgcatgtccagccgaatc

SEQ ID NO: 129664 - DNA, 198 bp, Arabidopsis thaliana columbia
tgacgtcgcatgcacgcgtacgtaagcttggatcctctagagcggccgccctttttttttttttttatatttgagtgttaaaggaaagattatccaaccccaaatttttgggaagacattccagggggttaatcgaagaggatgaacaacggatattcgtgttcgccaactaagaaaaaactattacccatttttaat

SEQ ID NO: 129665 - DNA, 203 bp, Arabidopsis thaliana columbia
gagctatgacgctcgcatgcacgcgtccgtaagcttggatcctctagagcggccgcccttttttttttttttttttttcataatggggttccacgtaattcatcgttaaagggagacaaggcgtacaaacaccaaggaactctacaacctgtgtaaggaggacacacgatccctcccctctatggggaacaagttctttcctt

SEQ ID NO: 129666 - DNA, 202 bp, Arabidopsis thaliana columbia
gagctatgacgtcgcatgcacgcgtacgtaagcttggatcctctagagcggccgccctttttttttttttttttataatcagaaaattccaagttaaaaacaaaaggatataagtattacaacaatttaagctgtccatttccttttgtctcaacatgaagagaaggtcacacactctctactaaatttaagtacatgataa

SEQ ID NO: 129667 - DNA, 203 bp, Arabidopsis thaliana columbia
aaaagctatgacctcgcatgcacgcgtacgtaagcttggatcctctagagcggccgcccttttttttttttttttttttcataaagaggttccactttattcaacttcttaattagaaaaatcttatagagacgatcgaaccctcttatataatttaaaggttctagtgttaggcactagtttgcttaaggagatactcatct

SEQ ID NO: 129668 - DNA, 239 bp, Arabidopsis thaliana columbia
  unsure (1)..(239): unsure at all n locations
gcccccccggtgaggttccattacgannnnnnnnnnnnnnnnnnnnnnnnnnnnnnnnnnnnnnnnnnnnnnnnnnnnnnnnnnnnnnnnnnnnnctttttttttttttttttttttttttaattaatccttgaatatgcatacttcgataaactttgaaaatcactacaacgaaactagtacacgtggacaatggtgattgataggtatatcaagaagggtacaaagtcaaaatagtc

SEQ ID NO: 129669 - DNA, 200 bp, Arabidopsis thaliana columbia
gagctatgacgtcgcatgcacgcgtacgtaagcttggatcctctagagcggccgcccttttttttttttttttttttttttgaaggaaacggaatactttctgagaaaagagtactaacgaattctgctctttaggaattcaactccatgtgtgagggaaacataggtttatactcaaaagttggaatcagccaaagcca

SEQ ID NO: 129670 - DNA, 200 bp, Arabidopsis thaliana columbia
agaagcttatgcacgcttccgtcagctgggatcctgtagagcggccgccctttttttttttttttagttgaaagagattaataaccaaacccatttgttctgagttagttactttaacaatgatgaaactgaatgaaacttagggagaggttttatatgtacagaaaacctcagcagcagaatcagcaatttttaaatct

SEQ ID NO: 129671 - DNA, 199 bp, Arabidopsis thaliana columbia
gtagcatgcacgcgtacgtaagctgggatcctgtagagcggccgcccttcgtttttttttttgtggaataaaaacaaaggacgtttattatacaattgccaaatatgattgttgcgtccatatgaaaaattggagaattgtaacttacactttttaattaaagagatggatcttcattagctatagctgaaacatcgtg

SEQ ID NO: 129672 - DNA, 201 bp, Arabidopsis thaliana columbia
atgacgtcgcatgcacccttcgaagcctgggatcttttaaaccgcccgcccgcccgccctttattttactttttactttttaaaagactgcttttatcactctgctgggattacacaatactcttttgaataaaagttctaaatacctgaaatatgagcgacatacatatcccatttgcatggaccattacggatattaca

SEQ ID NO: 129673 - DNA, 201 bp, Arabidopsis thaliana columbia
tgacgtcgcatgcacgcgtacgtaagcttggatcctctagagcggccgccctttttttttttttttcttcttcatacaattttataataagacccataaaccgaaaccgatttcaagtaacatcacatcacaagacaaaatatctttgacaagccagagtaaggagtttttaaagacacagagacgcactactagagaaat

SEQ ID NO: 129674 - DNA, 203 bp, Arabidopsis thaliana columbia
gacgtcgcatgcacgcgtacgtaagctaggatcctctagagcggccgcccttttttttttttttttggcacgatcacttgtgacatatattaaatttgagttgcaagagactaaatgacatgctaggcgacagctacgttattggtaaaaactctagatgtaaaaaaccaagttcaaaataaaacgccgtgcttaaaagatcg

SEQ ID NO: 129675 - DNA, 201 bp, Arabidopsis thaliana columbia
tgacgtaggatgcacgcggacggcagccgggatcctgtataccggacgcccttcgtcctttttttttttctataaaaattccacaatagttttttttctctggtgcagaaaatccacattacgtgacaaatgatgagagcaagatcaaagtagactcttggcaacaaaccagattacaatttttcatggaacaaacacagg

SEQ ID NO: 129676 - DNA, 201 bp, Arabidopsis thaliana columbia
tggacgtcgcaggcccccgtccgtaacctgggatcctttaaagcggccgccctttttttttttttttttgcacaaacacatttcacatatattaaattggagttggaagaaacaaaatgacattaaaggcgacaacaacaatatttttaacaactctatatgtaaaaaacaaaattcaaaatacaacgccatgtataatag

SEQ ID NO: 129677 - DNA, 196 bp, Arabidopsis thaliana columbia
tgaggtcgcatgcacgcgtacgtaagcttggatcctgtagagcggccgcccttttttttttttttttctttttttcaagggtaaaccaaatcagacacattgaaaaaaacgatatcctggtttagaaacagaccagggacaatactcatcaaagagaccaaagaggttataaaacagtgtttggagatctttcaat

SEQ ID NO: 129678 - DNA, 204 bp, Arabidopsis thaliana columbia
tgacgtcgcatgcaccccgtccgtaagctgggatcctttaaagcggccgccctttttttttttttttggggatcaaaacaagacctttaaaaccttttgggaaaaagaccaaattaacggctactttaaacggaaaggcacaggagatgtgctgtttatttgacgccctcaaacaaagaaaagctactcacacaaaccacatgg

SEQ ID NO: 129679 - DNA, 202 bp, Arabidopsis thaliana columbia
aagagctatgacgtcgcatgcacgcgtacgtaagcttggatcctctagagcggccgcccttttttttttttttttttttttttgggaagaaaaacactatagaagctcattaacaatcataacagctaggcctatgaacattcatgataggcctgccctagttacaacccgaaaaggctcggcccattaacaaattaaagct

SEQ ID NO: 129680 - DNA, 204 bp, Arabidopsis thaliana columbia
aagagctatgacgtcgcatgcacgcgtacgtaagcttggatcctctagagcggccgccctttttttttttttttttgctacaacaaatgcgaaagtgatttttttctttggtgcagccaaaccacaatacgggacgaagggggatacctagagcatagtacactatttgaaacaatacaaattccgaacacaaagcgcacataa

SEQ ID NO: 129681 - DNA, 200 bp, Arabidopsis thaliana columbia
aagttgaagcacgcatgcacgcgtccgtaagcttggaacctgtacagcggccgccctttttttttctttttaatttttccacaaacctaactcgcataaatcacactaacgaccaaccatgagcaaacactttttcatcaatttcgtggcaaatatatagttggtttaaccttgaaccggttttacaagcatgaagagtc

SEQ ID NO: 129682 - DNA, 200 bp, Arabidopsis thaliana columbia
tgacgtcgcatgcacgcgtacgtaagcttggatcctctagagcggccgcccttttttttttttttttttttttttttttttacacacaacacaaattgctgaaattaagatgagaatcccaaactaatttacatacgactccacgatttaacacaataatattaagtgagtagtacgaagaagaatctcgtctcgtatcc

SEQ ID NO: 129683 - DNA, 208 bp, Arabidopsis thaliana columbia
aacagctatcacgtcgcatgcacgcgtacgtaagcttggatcctctagagcggccgcccttttttttttttttttttttttatctgaagaagctcctcttacaaacttaaagtaagttacaatctcaaaaatccttaaaacacttgagcaaagaaaaaagaaagtgtttgtaactccaaatagatcctaaacgcatctgtaagaacct

SEQ ID NO: 129684 - DNA, 203 bp, Arabidopsis thaliana columbia
aagagctatgacgtcgcatgcacgcgtacgtaagcttggatcctctagagcggccgccctttttttttttttttttttttgggtagagaactattcatattcattaatcacattacaatcatgaaccaaaccaaaaacacgatcgtatcgacatgggacaagaagaacaaccattgatccatacctaaagttacataattcca

SEQ ID NO: 129685 - DNA, 853 bp, Arabidopsis thaliana columbia
  unsure (1)..(853): unsure at all n locations
aaaggggcggagaaggacgcagccagggaaactggggacggaggcgaagccggcagacagggaagcgcggggccgaaaaccccgaggaaggacacggggccagcagaaaagggcatgggggacgcgacaaaccgaacaggacacggaaacgcgggagggggacacgccgaaagcgcaagagcgaagaagggaaacagggaatcgggagaaagggggaagcggcccagggaaccaagaggggggcaaagagaacaaagggaagggggcaagcgcggaaacaggaaatcgcgcgaagggagaaacgccagggaaaaaggcgacaaaaggcgaagaagctgaggagagacgggacggggagaaagacccgaggggaaacgttcggggaggagaactgcgtgcggcaactcgggagcacgacgaaggggtaggaaaggagcggcggggaacccaacgacgggcgcggggaacaacgggcagganatacggggtactccgcagaagaggagagcgccatacatggcggaatagagggggaaaacattacgtgaaaacaccgtggaaaagggccccaaggaacggcgcggaaaaagcgaaacccgggggattcgcggggaaatcatcccccaggaagccttagggggggggtccaggggtcacaaccaaaaccgaggggggcggccaagaaaaacgcggggggggggcttaggggtttccacggaacggggcccaccgggaaacgtccccacaacctaaattgggcccgggccccggagaaacaagggagaaagggcattcccggggggaaaacgacggaacacccctaaaagggcccaaaatgggggggggatttttg

SEQ ID NO: 129686 - DNA, 423 bp, Arabidopsis thaliana columbia
gagccacacacccgcgggacggtcgccgccgcattcaagtaaaataagtcgggaaccccacagttgtacggatatttatcaaaacccgggaccgacggcaatacaacgacagcgggtatgcacagatgagtgggacccaaccacacacgaccaatagctcacaaacaaccgctaccccccacgcaagagaggcgaacaaaacgacagctacacaggagcacatgccacgtcacactcgcgcgcatggtgcggaaaaaccgcccgagaacacagagagcgacaatcacagaacacgaggctgcaacaccgcacgagaaaaggaggacgacacacaaggaaaaaatgagtgctaaccaaacatgcgagccaataaaggactaaataccaccgccccaatgaggaaacggagaaataatcaatcga

SEQ ID NO: 129687 - DNA, 742 bp, Arabidopsis thaliana columbia
  unsure (1)..(742): unsure at all n locations
nnnnnnnnnnnnnnnnnnnnnnnnnnnnnnnnnnnnnnnnnnnnnnnnnnnnnnnnnnnnnnnnnnnnnnnnnnnnnnnnnnnnnnnnnnnnnnncggccgcgctccggtgggttcccttaaccaagccactgccnnnnnnnnnnnnnnnnnnnnnnnnnnnnnnnnnnnnnnnnnnnnnnnnnnnnnnnnnnnnnnnnnnnnnnnnnnnnnnnnnnnnnnnnnnnnnnnnnnnnnnnnnnnnnnnnnnnnnnnnnnnnnnnnnnnnnnnnnnnnnnnnnnnnnnnnnnnnnnnnnnnnnnnnnnnnnnnnnnnnnnnnnnnnnnnnnnnnnnnnnnnnnnnnnnnnatgctactcgggtcagagcataagctagtgatgctttcggctactggactctcgccatctagggtgcggcactccaccgcttcgcctagcagcacgacgctttttttgctctcccacaaccccgttttcacggtttaggctgcttccatttcgctcgccgctactacgggaatcgcttttgctttctttttctttggctactaagatggttcaggtcggcaggttgcttttgcctgcccatggttcagcagcagttcaaagggtaacccttttgggaaatttccgaactacccttattttcaacttcccgaaacatttttgttgcgccgggcccgggaatttcgaaattcaaggcttaatggatccccggccgaacctttgaggggggggggccc

SEQ ID NO: 129688 - DNA, 941 bp, Arabidopsis thaliana columbia
  unsure (1)..(941): unsure at all n locations
nnnnnnnnnnnnnnnnnnnnnnnnnnnnnnnnnnnnnnnnnnnnnnnnnnnnnnnnnnnnnnnnnnnnnnnnnnnnnnnnnnnnnnnnnnnnncggccgccttcctcctcctcctcctaacagatatcccaacgttcaagcatccacagttgtagacgcaatggtggactcctcaaacgcttacagttccaccactggtgctccaccagcaaagcccacctccacgttatctgatcccaacagcaacaacactcagaatccaaatggtcctggcttcaagccaccacaacaacaacaacaacaatcttttcaggagaagaacacgcagtctcaatatgttggtgggcccagccaccaccatcataaccagcaacaatcaaaaccggagaaccgggcttcccatgggcagaaacccaacctcatgggcctgaagagaggaggcttttcctaaattaccccattatggtccaatgccaaatcctattgtgggtctaaatcgacatctgggttaaacaaagctggggtcccctctgggattttcgctttatctttacgccaccccacccaactttttccccccctttcaaaatttgcgattggaatatattttccacaccaaatatcaacgttgtctcccgtgtttaaaaaatattatattaaacccttacattcacctcaaaatataaatcccccaaaaccccacagcctcttttgtggtctttaaaattaaacagaaaagaaacttgtggggacactaattcttttttcaccttgtccaaaatttttttgcgccctattattatttaaaagtctgtgacccctatccctcttgtatttattggtgacatttattagtaaccccttcgttgtaaaaataaaagaataatggactatgtgatgttccttcttttatacattacgggacaccggggggaatatac

SEQ ID NO: 129689 - DNA, 949 bp, Arabidopsis thaliana columbia
  unsure (1)..(949): unsure at all n locations
nnnnnnnnnnnnnnnnnnnnnnnnnnnnnnnnnnnnnnnnnnnnnnnnnnnnnnnnnnnnnnnnnnnnnnnnnnnnnntttaattcgcggccgcttaaaccccaatctcagaacacaaaacgaaaacaaaaataactctaaagaagaaacaacacatttttcgaatttttaaaacttgcttaccataaaattctggattttatttatccagtctaaaatctacaggctgatcatagtagcctgcttagggatttgatgagtagtttaaggttttttcttgtggcttcatctcctgtgaatcccagaatatctgagcttatactctcgacgttcttcaaagtataaaccagagtgtagattgacttctgtatgagttctgtattctcaagagtcattattgacgaaaataacctttctcaaaatcgtaaaaagcttgggtaagggtttgaggtaaaaacttaactttcttgagcaagccggttttacgaaacttaaaagaggcaaagggttgaggcatttttcaggccatgggctttggaaatcttttttggaagcaaagggggcccttgggttttcttcaaaattaacccgggaaagtaaggtttcttttttaaagcaagaggcggaaataaccggctaattgggggacaacccacccaaaatgggggccctctaaaaactttttggcgggtgtccacaaataaccctagggtggagaaaatttttcccacaccttaaaagtttcaatctctaaaaaacttaaactttcccttgtgccactctcctttttaatttgtgggggggcctctttgaccaaaacgggtaacaggacccttttccttttaccacaatttttaggaaatcccggcccccgaaattttcaatattcaaggcttttattgatacccgcgcgaacccctcaaggggggggggccccgggaccccaaag

SEQ ID NO: 129690 - DNA, 567 bp, Arabidopsis thaliana columbia
aaaaccccatcgaagtttagcgcccagccccccgcgacgcgcacgccccaccgccaccgggaagccctttccctttttaggcgcagcccaacggcgccctggcgcgcgaaaacgagccaacgccaataacagccccaaaggcagcgatccacacacgccccagagagcacccccaccagcccccgcaaacggcacgccaccgaccacacacccggcacgacccccaccctcacccacccaccctgagccagcccagcgcggctgcccgaaccgcacggccagaacagggaagcagtccccccgagaaccaccaccacgacccgccaacgcacgggttcaccactacgaccacgtgagggcgtgcacacggcggcggccacgcgccggcacgagctggtgtcaagccccgcatggcagacagagaaggagcgggcgagacgaggcatgccggggcagaccacagctcgcaaacgcggtagccactgccaacgggggagcagaggaggcagcgaccctcgcaaaccaacgcctggagcgccgaaacgtcaatgcagagaagacaagatc

SEQ ID NO: 129691 - DNA, 988 bp, Arabidopsis thaliana columbia
cggcccttaaaagaggatttggggacaaaaagacggcgcgagagcacgggagaaaagggggcgaaaaaaggggaggaaccgggatatttaggggattttgcagaaagggaggaaaagggcaagactggggagggggggaaggggaaaggaagagggaaaccggaagggaaggaggaatccacaggagacggcaaggggcgggaggccaagacaaggaacgaaacggaggggaaggaaaggaaacgacgaaggaagggggagggaaaagggacagggaagcggcgaaagggaaaaggaaggaagcacaaaaggaagaaaggggagagcaagaggagaggcggtcaaaaaggggaaaacagcgagcagaagggggagaagacaagggtaggacggggagaaacagaggaaagaaaggaagaagaggaaggaggaaaacatagtggacggaaagcggacacgacatcagggattcaagagcgggaaaaagcgggtcgagatacctggcgggaacctcggcgaagagtatgtgcgcgagaacaggagaggatcaggcgggagaagacaacgggcggactagggatggcgaccgaaacggaccggatgagggggaaacgacgggggcggggaaacggccgcagagagacgagagggcaagaaaatggagaaaaaaccgcgggtaagaaagggatggaagaaacatagagggagtacatgcgcacgaatagagagagaaagaagagcggataggcaagggagaatggcgtaggccggaaccaggaggaacaaggggggaaagaagaggggaaatgacaaagggaggaagaagacgagggcggtaaaccggagaaaaagagggcagcgacaggaagcgaagcagaggatgaagacgattgcgggaaagaggagaaagcggacaaaaagaggacagaggggcgacgcggaaaggaagggaagggggaacgacaggaggagagaagttgataacgga

SEQ ID NO: 129692 - DNA, 638 bp, Arabidopsis thaliana columbia
aacccctttctaaatgttacaaaagctggagctccaccgcggtggcggccgctctagaactagtggatcccccttttctgcttttattcgcggccgctccatattctgttttgccttcacctccattgtcctggaaacttttgttgcgatgggtaagatccgacccggaccggatccaaaagcggcattggtctcagatattttagcgctatcgagatcaccaatctcttgcattcacatcaatcgcatctcatccggctcatgtttcatcgactggtatctcattctcggcattcaggaagatgcagaggtgaccgtcatacgtaaacgatatcacacattacctttgaagggtcatcccgataaaaacaatcacccaaaagcagatattgcttttaagctcatccacgaggcttatttatgtctttccgacgaaacaaagtgaagaagctttaacatagaccgacgaaataacctttgtcttaaatgcagcccgtgtctcacacaaactccaattaaaaccgtcatggatttctaaaccccgaccccggtttctggtcaaaaaccccttcaagggaccaatttaagggtaaccaaggttttcaattaggaaaagtgagttaacccattggggttgt

SEQ ID NO: 129693 - DNA, 267 bp, Arabidopsis thaliana columbia
aaaaaacctcaacaaaagtttggagcaaaatacgggcgcggcggaccgaaaggggaactaggggaaaccaccgggcagaagtatatccgtgtgacagggaggacacccaccgacggggggcacacggacgcgcaaaaaaaaaccaaaccaggcacatcggagccagcaagcaggagaagggcgcagcaaaggaacaaacaccagcgaaaaaacccgaagaaaagtacacccccgaacaggaccagcacaaaagaacccctcacacag

SEQ ID NO: 129694 - DNA, 1095 bp, Arabidopsis thaliana columbia
aaaaaacacctcttaagtaagaatttttgggggaaaaaaaatgtgggggcatatcaatgtgtgaaagggtgaatactatattgtgggagaaatagatgagaagaaacatttttaaaatggtttttataagggggggacaagaggggattttgaaagtatatagttttggggttaagtaaaattgggaaatggattaaaaggggggaaatgagatatggggtaataagtaggattgaagattgaggtttgaaaataaggaggatgttataatggtgataggtatttgggaaaggggaaatcgggtataaagggatagggaaaagtggaaagtaggcgtatggtgaatgatggagaaattgtaatgttgagattaggggtaattggggaattttggataaaagggaaaattgagagaatggtggaaaatttggggaatagggggaggataggagtaatagggagaaaaataatgggaaatatgtggatatgtagggtagtatagaagaaatgagggtaatattgtaagaagtggtgaatataggtggaaaacgtatgataatttttggaatatttgatgagataaggagtgaatttgggaggatatgtgtagaaaagtgtaggaaaaacggggtgaatatgtgttaagagggaagtttgtgggggtgaagagggggaaagatgtgcataatatgggggtttatgggaaattagtggggaaaaggggggaatatttgtgtaaagggggaaatatggtgagatattggcaggagataaggggtttatggggaatataatggggaaatagggtgaaattggatgggtaaaagagggggaattgtgggataaattggggaatataggagggggattatacgggaatagtaagggtggtatttgtagaaaataaaggatggaaatgtgggataaaatgtggtgtggatattagtggataattttgtggtgaaaaagggatgaaaagtagttggtaacatttggggagattaaggtggggatattgagggtgagatgatgcgaaatataatggagtgaatattctttgaagaatatgggagaaaaaatatattaagaatgtga

SEQ ID NO: 129695 - DNA, 1070 bp, Arabidopsis thaliana columbia
  unsure (1)..(1070): unsure at all n locations
tccttaactgtgtgtatcagatgtgtatacatacnctactactccaccacgtctgccagcaatctcgacgtgaggcctctctagagtcctcttggcaagaagatatgttaatacgagccttctgtcaatctaacaccccggctggactaacaaagtaagaaaactcgccacccgtctaatatatgttcgccagaccttactgtcgctacagtatgtacacacaaccggtagagttgtttgccacaatatccagtgactgctgaggatcggtagtacaatggccaaacctctggtgcattcttggaaccaacatgctctcgtttgtaaacagcaatgtgacaataaaccacccggcattgtggcgggataattttctatgtctacacaacctatcttcggctatgtacgtggccctacccaccacctcattttcatcacactctgggatcttcgtgaaaaaataccgaagtattcactagcggaatctccacaccgcgcagatctttatctgtaaccggactagccacaagtaggcgccatgttatatcgtgatataactcatttccgcgactatataattcttccaattggaggtgagcgtacactttgggggcaatttatgacaaacatatacacccccaccctcttagacctcctgtggaatatcctctgaaaaaacttactgattaaaaaattgctgtcctcatctcgcgctcggttagatgcaaagcgaaataatgagggtctaatctacctctactcaattgtgggattattacaactgtctcatgtgacgatcaatgaacgtcttcctattaacacctcggcgagaaatgctaaagtgacatcatcctctctcggcgatacgacaaagacaggcgaggttgataatttagacttatttctctggccaatctgaaacaaccccatatatcggtggtctctcaagtcacgtatttagattagtcctttcgagcaagatactactccgggtcttgcatctatgacagtacttctcgaaaacttacaaatggacgtttgtaaggttaattcacatatcgcttctctat

SEQ ID NO: 129696 - DNA, 329 bp, Arabidopsis thaliana columbia
caaccgcggaagtgagactttctacaccaaacgcgccattttttttttttttacacggcgacgaccctcacacagtggggccactcctgtccccccatcgcagacgcaataaaatcccccccacgaacagataatcacacaaacaaagacgcgtataacaacccttagaacccaaatatacgcatacaatttgtcaaaaatcgcctcacccacgtagaccgatgccacaaacaaacaatactgtacaaaggcacaaccctaacgtgtactcaacgccactcacatcactagcatatcgtaataaattcactccagatacacatccaatc

SEQ ID NO: 129697 - DNA, 1056 bp, Arabidopsis thaliana columbia
ggtaataaagtttgggagtccccaccgcgggggcggggcgctttaagaacaaggggatcccccggggcgggtgggtaatttttggcccgtttgaaccctttaaatttttaaggaaggtaatttaccaaaatttttttttttaaaaagaaggtgcccttaaaacctaaaaataaatattcattattaaaaaacaactccaggttttaaataaaaatttttatttttaaatattaattccaccaacttgggaattcctttttttaaacaaaataaaagggggtttacccccattttttttgttttggaggtgaaatttccaaaattgggttccggaatagggggttaaatgggtgcaaagccaccgggacctgtgggggggaaaccgaacccccaaaaggcttattgttggctttatttaaattttaaaaatttgggtgggaccggaatccattaaaggttggggaaaaaatttcacaaatttccttttcaagtccattggggccaaaacaaaatttgggtgggaaccaattacttcaaaccaaaaattttcccccccaaaattattcccaaattttcccaaaaatcaaaatacctgggaaatttaaaagccaattcggttttttttttggaaaaaattaaggttctcccaaatttttcccaaatttaaaccaaccaggggcaaaaatttttatttggggaaccattcctttcggaaaccaccaataaccttttaacaaaaggcaaatggccttttttatttaaaaaatttcccaaaaaagggggtatttccaacccggcgggaaaacacgttctcccgatgggttttttaaaatttctttcataaggggatttatggaaaatgggttacccggggtaaaacgcaattttgtgggggggaaaaaggggaaaatatagaaaaaccctttggcccaaatttaaccttggcaagctttggaaggggttggtggacccttaatttattgaaaccccgcggcccggaaaattccgggcccggcccaaacccaaaaaatttcaagggcttttttttttttaggg

SEQ ID NO: 129698 - DNA, 490 bp, Arabidopsis thaliana columbia
gaaaatttccgcgggccccggccaaaaaaatggaacttgccttcggtggccaaagttgggcaaaggccattgggcaagaaaactggggagcttatgcccacctgaaaaaggcgatggagaaatatattgagaattggaactcagctttacccaacttggttagacggtggcgtgaaagccggaagtcggggtggggatgatgcagcctccaactcaagaggaaccatgggaccagtttttagctctttggtttatgatgaagagtccgaaaatgagttgaaagattgatgccatacacggatttgctagaaaagggagaaagtcgagaatttaactggaaaaggcatttgaaaggcggggcattttccctggtaaaaatggcaaagggggaacaaggtggaaagggtcggaaccacccaatttggcaacttggggggctttataagaacccgttggggcccaaacctttaaaaacaatttggggtccaaa

SEQ ID NO: 129699 - DNA, 1046 bp, Arabidopsis thaliana columbia
ggaacgggaggcacaagagagacgcagaaaaagaacaccaagacggggaaagcgcagtttaatgcgaggaagaataagcagacaaagagacaaaataaaagcgcaaaaaggggggggaaaaggggggagagaaacagacagagagaggaaccggcgagagaagaggaaagagaaaaaaagaaacaaagcaaaggagagaacaaaggaagaaaaagccgcggacaaaagaaacccaaagagcacccgaaggaaacgaacaggaggccccacgcaagaaggagaacccaccaggcgggaacgagaaacaaccgcaggaagaaaggagacaccaagagagaggaaccgccaaggggagagcaaaagggaaaacaaccccgccggaggacaaaaacagacaagagaaggaggggacggagcgccgacaaacaagaacgcggagagagaaacacgggcagaagaagagagagagaaacgggcgggacaagagagggagaggacagctggcgggcgaaaggaagacgcgggcacagtacgcagagagacggcgcgcgacacgagggcgagagaacgacaaagagggagagaccgagaggagagagcggtgacatagcgaaatacaggtgagaggaacgacagtgagcggagaaggaagacgtgacagaaacaaaaacacacgcgaggagacaagcgcacgagagaaagaacaaagccgcagaaaggaacggaggaggggaacgacgcaggacagaaaggcagggaccggagacgagcggagaaacaaaacgacgagaaaaaaggaggaacaaaacgggagaaaaaaagggggagaagaatgaggaaaaacaaagggacgcaaaccaacgggaggagcccgggaaagaagacggcgaaaaacgaggagaaaaagcggggagaacgggggaagaaaaggaggaaaaaagcaggaaaaaggggagaacagcaggacaaaaagtggaaagacagcggggcagagggagggaagacggagagacgagagagaaaagcggggggcgaggggaaaggaa

SEQ ID NO: 129700 - DNA, 876 bp, Arabidopsis thaliana columbia
  unsure (1)..(876): unsure at all n locations
nnnnnnnnnnnnnnnnnnnnnnnnnnnnnnnnnnnnnnnnnnnnnnnnnnnnnnnnnnnnnnnnnnnnnnnnnnnttctgcttgtaattcgcggccgcttaaacttcaagtctgaaattcaaagaacgttgtttgcgaacatagtacagacgatcacataatagaaacgccacgataaaaaaagacaggaaattgaaaagagtacagccattcgaacatctttatttaatattatctcatcgattatataatattcgaaacatccgctagtagcttcatttgaccgtcgctcatcacctcacggtgttgcagttggtgctggcgctgattttgtaaggaatattgactttgcatgcgctaggaagtccagctgcacgggcagtgttgagaccgggaccaacggctttagcggcagattgaaggcaacggcaagcttgctgacggtctggggttgaactggccatgtttttagggtagtaacgccgttgcagcacccttgggtaagtggagcacctcgggtcaaagaggcaatgcaccctgacagggtgccgttgaccgtggcccaacttataagcgcgttcgctgtgaatgggaccggcccgcgggcggcgaatttcgatttccaaggtttattcgatacccggcggacccttggaagggggggggccccgggtaaccccaaatttcggcccttaatagtgggaggtcggtatttaccaaatttcaacttgggccgggtcggttatttaacaaacggtcgcgggaacctgggggaaanaaacccctgtgggcggtttacccccaaaccttttaaattcggccccttgtggcaagccaaccatattcccccctttttttcccccaggcttgtggggg

SEQ ID NO: 129701 - DNA, 1207 bp, Arabidopsis thaliana columbia
ccggcacccaaccaccaacgcgacgcgagatggtgcactcgaaaacacaacataaagacgcaacactcagggacaaatacgggaaaaccctccacaatggcacgatctcgaaaagcggggccgcgcgcacagggggagcaagagggaaaatgtgggcactcggcgaaagacgggagacacagccgcaagagtccgacgtcgaccgcgaacaatcaggaacagaaaccccgccgaacacgccgcacaatcacccagccgccacacattagtcacggaggaaaatatgcgccgcaagtatctagtgacggagatacaagtagtcggagcgagtacgtacggaggctaaatagaccaccacagcgtgagagtagatgcgtgatctatgcagaaaaacgccgacgcgcgatgactactacgtggcgtgtaaagatcagagcgtgcgcgcatcagcagacatatgtgacgaataagcatgcacggtacagccgaaacctctcacctgcgcacaatctgtatggcggagaataaactgactgacaatacctgtgcgcgaaaatggggggggacgaaaacaggggaaaaggggcggaccaaacgggcagaacatctgtcgaacacagccggggaaaaaatgcagacgacgaggaaaagagccgggacaagtagcacgaacaggagaaagttcccacgccatcaggcgaaaaagcggggacaactgcggagcacaggcgacaaagaagcggggagacaggcggggaaatatgcagacatataggcgcgcgtcaaaccgacggaaaccatgccggaaggaagcggcggcgagacacgcggcgtgaacacggcggcgcaaaacggggggtaaaaactgacgacataatacgtggtaaaaagagggaactacaaacgcgggcacacccggggcaaaaatggcgggccaattacgggggaaactcgcgcagcacatagcggaggaatgcagggctaacatgggggaacaaccgggcgcagacggcaggaaaagggcgcagtaccgccaagatgccgcggaatccgaggagaactgtggcggcaatgacggagcactgagggataaagtggctaatcccgcggagaaatccgacgtcagcagcgagaacacagggaacagacggggacacataggggcaaaaccgcgcaatcgcgcacataacgcggcaatcgggatgaa

SEQ ID NO: 129702 - DNA, 846 bp, Arabidopsis thaliana columbia
tttctaaaaaattctcttaaattatcaaaaaaaacccaaaaaaaggaaaccattcccttagagatggggatcttttcgttgggacaaaacccccgaggtttcgtctttcacgggcaactttagtcaaactccgatccaataaaccaaagggttttattctcgacatgcatatttctttagaaaagatttagctttctgatcatagggaaagtctaaagcaggagcgtcgggatcccttcatgattctgaggctcttacagaaggagaagaacctggtcccaggggaacattcaccccacccaaccattcccggcaccccaacttttattttttcgtaagggtggggtaccaaaaattccaaggaaacccccttttggggaatgaccccattctgtctttctttcaaacaaaaatatttttcccacccccaaatttccaatggggaaccttttttgggaaaacccaaaaaaaatttccttctctataaaccgcccttctttgtgagggaaaaagacctcccgcgggggggaagagattttttttgggtgattggtggcctttggggggaataccgctaatctttttgccgaaaaagggggttaaggggggacctctcccggtccccattacctctcacctttttccaccggtaaggctttaaaaaaccgggggggggggggtcctttaccggggaaaggaaacttacctgggtgggcccaacccaaccgattttgggttttgggaaggggggggaaaatttttttttttacaaggttttcccaaaaaccccctggtgggtcttttaaacccagaaaaaccttggggttttttggacttcctggtttt

SEQ ID NO: 129703 - DNA, 996 bp, Arabidopsis thaliana columbia
tttttcctggacatttttatcaaaacacagggcgcgaaaaaaaagcggagagatgaggtgtggaaaaagtaggcgaagaacatagacagaaaaaccaacaaacgaagagccaacaaaacccgaacaagcgagcgaagataaaccacgaccacagagacaaacgactgaacaccaaacatgaagaaaacaagcagaacgaacaacaccgacgcaccgcagaaaggagcccaaacacagcaaaccaaagagaggacaacacaataacaaagacacaaacccggcaacagacgaccgccgcaaaaacgcaccgaatatcaacataggaccaactcacgcccgacacagaaacgacaccgcaacaagacacaaagtgcaagagacgaaagtcaaaagacggccgggaagaatgacagacacaggcggatatggcgaagcagcacaaggcgcgaacccccgacgagcagataccgacaggatagcgagaacacgccgaacaagatccacacacgacagaagaaccaccacggacgaacacgcacaaaacacaaagtaaaaagaaacagcataaagcacagagaacggttgaggaaaaaaagtgacgcgacactacacaaggaaggaacgcggactaacgaaaaccgaaaataaacgaaaacggctaaggagagccgcgagggtagaaacgggaaagacacaaagtaagaacggaaacgaaccgacgagaggacccgggatcgaccaccccacacacaaacagccgaccaaagcaagctacaatccgcacaaaaaatagacacacacaggcaaagcaaagaaggcagcgacacggacacacccccaccggaaggagcggagagaaagaaaccaccaagttcgcaaaacgacaaacaaaaccagaggaaacgaaggagaacaacgcagaccgcacacaacacggacagacgcaccaccaaaacagcacgcaccacaacgcggtaaagacaaaactacaacaac

SEQ ID NO: 129704 - DNA, 958 bp, Arabidopsis thaliana columbia
  unsure (1)..(958): unsure at all n locations
acnnnnnnnnnnnnnnnnnnnnnnnnnnnnnnnnnnnnnnnnnnnnnnnnnnnnnnnnnnnnnnnnnnnnnnnnnnnnnnnnnnnnnncggccgcaaagcattaaagcttacaacgatatgtgcagaaagaaaagttaggcccaacatagcccataagattaacatctacggcataaagatgttttgacatttggactctatccaatacacgtgtccacgtgatattacaactgcaacacaagatgaagagtcatcggaagtgtaccgacatcaaccttcgccgccgatgaacaccgaatccggtgaggaatgcatcgtcgaaacatcgcacaatgaatccttgtaaccaccggaaaaaaaatgaacggtgctccatttaaaagacacagcaaaaagggaattataaataaagcattgggaaataattctttcaattctttttaaaccccggaaagaaccataaatccggctttggaataaggaatttttcttggcaaaaaattcggaaaagggtttttcttataaagggaccccccaaatggaaacccggaaaaatattttaaatacccttttaagagttaaacctttaggccaacccctttaaaaaactttaaatttaaccccaattcttttaaaaattctgtggttgaagaattttaattgggaaaaaaaacaaaaactttaaaaatttttcaaaagccaattcagcgcttaaaaattggatttggatttccgagcccaaggggttcccaagccggccaaaaacccttttttattaaagcccggattttggccgtccggggaaccggccatttttccctttaaagaggttttgaaaaaacccggggaaaaagcccccaaattttttgggaaaggctttttattcgggaaaaatttttggtgggggggggagaaaaaaaagtttttccctttttttgaagggttttttggaaaacc

SEQ ID NO: 129705 - DNA, 1295 bp, Arabidopsis thaliana columbia
gaaaacaagcggcgaaaaaaacgaggacacacaaacgagacaaccgcacaccagagagacgagcagaaacacacatttatggaaatgcacaaaacgaacccctaacccaaaccacccaaggggagaagagaagacacaaaccgacgacagagaggcaaaaaacagggagacaacaaagagggaacaagagaggacgaacaacaagaaggacagaaacgagagaggacagcaaacgaagagaaaacagaaccacaacgaacacaaagagagaaaacggagggaagagaaagaaggcaacaaaaacagagagaagaaaaataagaagacgggaaaccagagagagaaaaaagagaagcgaaaaccggaagataaagagggaacgacacaaagagagagagaaacggaggcgacaaaaagaggaacaaggagagggaacgaaacagcggagagaaaaggaagagcggaggaaacaacgagagaaaagacgacgagggaagacaacggcgggaaatgaaacggacaggaaacggagggagaaaaaagagagggaaagaaccacggaaaaacaaagggaaaaaacacgagaagaaaagccagagagaagcaggagaaagaaaggacaaagcaagaggaaaacagagagaaaaagggggcagaaaaaggaggaaaacgggcaaaccagcgaacacaagcgggggacgcgagggaaaagggggaaaaaacggaggaaaaacgaggaaaggagggaaaacgacggcaaaaaaggggaaaaaagggggaaaagggcaacaaaacaaaaaaggaaaaacaagacggaaaagggaagaaggagagaaagcacaaaaaaacaggggaaagacggcaaacgcagggaaaaaaaaagaacaagagaggaaaaaaaaggacaaaggaggaaaaaagaaaaaaaagaagcgaaaacaacgaaaaaaaaaggaaaaaaaagaagaagaaacgcggcgaagagagagggcaaaaagacaacgaggagaacaaaagaacagaaagaaaaacaagaagcgggaaaaaaaacagaggaaagcaacaggaaacaagagaaaaatacaaaaggagagaaaaaggggacacaaagaacgaaagaaaacaccgcaaggagaaaaacagagagcgaaacaaacgcgagcagcaaaaagacagagagacgaaacagaagcgacgaaagaagcaaaacgtgagagacaaagagggcgaaagaagaaaacggagagaagacaagtgccgcagcagagcaatgagcgggaaacagacacgagaga

SEQ ID NO: 129706 - DNA, 1463 bp, Arabidopsis thaliana columbia
  unsure (1)..(1463): unsure at all n locations
ctttttttctcttttttttcaacacncccgtatctcttctcccctcatggtcatttgtgcgctcttcctctcttttctctccactctggtattattcctacactcctcatactctttcctcccctttctactttcccccttcggttccctctcctctttctttttctcctctctcttctctcccttctctctcttactcctaatgtccttctccttacctctcttctcttacttctcctccggatgtgtgttgtccatcctttcggtatattggtgcctgcccttgtctttcatgtgtcaattccttttctcttcttcgtcttatcactcttttttgctctccctcccactcattaatttttttcttcttctcttcgtcttcatcgcccgcaactcatgcttctttctcattgtccctttccacttcttgtctcgcttcggctcttaccatgtctaatctcctatccactcatctgactctctccactctcctgtcttctacttatcgcttcacacttactcgtctttcccacttcttatctactgcttttctcatcttatatacaactatatcctntccatcactcactgttcgattcgaaccgtgtccactagttattgctcatctatatgtatctgacctatctgtcactctctactgtgcttgtgtcactacttgcgcctctgcttcattcgaccttccccgtctgctcccgtactatgtatacgtttcccgtctgctatctaatcagtctacgccttctatcatctacattctgatcttgacactataccacgctcggctctgtcctcctgtccgtaggtttccatcataccgcctccatcttccctatgccgtcctcctttgttgtcctattttcactcatcctccttcttctcatcactctctgtttggcgtccaatcgtcacttttctacaacattgcttggaacacattcttgttgtccctcccgtcttgctattctctgcatctctctcttctcttgatatcgcctcgatcatctcacatctgtatcactcttcctctctctctccatgtttttggtcctctcatctgtcccatcctgacgcatgtcgtactcttgctttccgagctcactcgcgctatcctgtattagcgtgcctacgtctctctcttctcttctgtacatgcttatcaaaatcttcctatcgctctcacacatcttctttgctgtgctccttatagtccgcacttacactacctgtcctgcttctgcgctcgcttgctatgtctacctttcttagcgccgagtcactaagattcgctctctctccttatcaagtcactctacatagctccctctgtccgtctaccttctacatgcaatatgactctatcttgtactcagttctactctctcgttctgcacgctctctctactctattgctacatctctcctcttctccatcctcatctccc

SEQ ID NO: 129707 - DNA, 1121 bp, Arabidopsis thaliana columbia
  unsure (1)..(1121): unsure at all n locations
aaannnnnnnnnnnnnnnnnnnnnnnnnnnnnnnnnnnnnnnnnnnnnnnnnnnnnnnnnnnnnnnnnnnnnnnnnnnnnnnnttttttcggcggccgcgctccatccggggtctttagcagatttcaccaaccaaaccttaaccgctttcttttattcctctggctctccttttcacgcgaagccctcccctgattgggagcttacgggttcatgtattatttcactccccgatgggggttcttttcacccttccctcacggtactacttcgctatcggctacccaggaaaccctgcaccatgatggggggctcttgtttttctactcccctggttccgtggggctcatcacttttcttcctccaaaaaacattaatcccttacgggctcttttactacccgcacccttggcactcttttttccccactccttataggggtggggggggataacattctcctaccgcgttttttcttagctctttatgccgttgtcgttctcggtacggccgtttaataaatattacggggctagttttgcctcgtcacccaaaacatccgctcacgctctcatatcattatatacggcgtgtactatttatattgggacttgtggtgcttttaacccccgtataatttatatgtggcggttttcgtcgccacaccgtgatctttacacttatatcacngatgtgtncaataagacacgtctctttattcgaggaggctattatctatctatgtgtacacctctcttggcgtgtaattctcctacataagaattatgtttcttccaatattgtctgcaccccgggcagtggacattctttctgctccgcccccaattggttatttcaagtcccttacttctcaaaaagtgtgcgcctccctctcttcttttcgacattctggggttgtctctccccgtttagaacgtaactctcttccactcattatctttctctctcctcgctgcatctatctctttcatatcatcgctccgtcaccttcttctatcaccaccttcccgccttattatggagagaaaggcctacctttcctctactaacggggtctttctctcgcgcgcatgtcgaattataattactccttcctcctc

SEQ ID NO: 129708 - DNA, 1132 bp, Arabidopsis thaliana columbia
ccacaaacgcgacgcccagcggcaggcgatgacattgccgagcaacccagatggggagacacgggcaggagaaagcttgttatgaacgtttgtaagcggacaaaacaaagacaccaaaaacagaatgtgggataaagtgaggagacaagataataaacaaatgaagagaacagagaaagagaaaggacgagacgaccatagaaaggaatataaacacggaaaaccgtgaaacgcccacaaagcggcaaaagccagcaggggacccaccaccaacaactaacaaggcaactaaaccggccaaacaagacacaagctgaaacgcaagactagaaacaacagggcggatacacaacgcaaaaatagctagaacaggacaatctacgacgcaccgttcgatcactccgcggaacacagcacgtagacaccaaatactcgtacagaacatcggtcggagacgaacaatgtgcgcagcgctacacacgacagcggaaacatacgaggagagcagaaaacacagacgcgacgaaatgccgaattatgcgataagacagccggcaacaccctgggcacaaattacacagcgaagaacatggcggcgggcacaagttagacagatgaaacagcttcacgcaagaaacacgcgcggcggcgcaaaccatcgggagccatcacaagaagagagatgagcactactacagagcgacgcacaaaacagcgatgcgaaaatgcgagggagagcaatcgaaacagcaaccattgtgcggaagtaaacccaccgtgcgcggaacacagggaacgacaaaccgcactaaaacggccgagaaacaccgcccacgaaacagcaactacaagtacggggagcaacaaacgaggcaacaaaattaagcagggatatacagcgcacaacagctcgagcagaaaaacaggctgccaaaacgcgaagaacactggcggaggaacaacctccgaaaaaacgccgagagaaaacgcaacaaaaccgaacgcacagaggggcgacaacaaacggggaaaatagcccaccaaaacagcgagtacaaaacagcgaacaaattcgagcgcaaacgcgcggaacaatcatcggggcagcaaggggaagacaaggcgcaaatag

SEQ ID NO: 129709 - DNA, 757 bp, Arabidopsis thaliana columbia
  unsure (1)..(757): unsure at all n locations
aannnnnnnnnnnnnnnnnnnnnnnnnnnnnnnnnnnnnnnnnnnnnnnnnnnnnnnnnnnnnnnnnnnnnnnnttttctgctttaattcgcggccgcggatcattcattactcatactaaacaaggaatcccattcttattaaaatgttgcttgcaagttagaaataacagaaatccaggcactcaaaatgaaaacagaaacaattgacttgggaactatgcgatatgggtacaagaaaaatttgatcaccaaatgcaaacagaatctccgtcttctctacaggtactttcttgcaagagcacgtactttggtgccaaaatgtgactacgttatccgagaaccaggaagatacaagggattcagaagaatctttatataaagctcatgcacctcttgaaagaagctcttgatgccgtcctcattccgtgaatcatgaaggagcatcattcgggtatggcctgcggtaacatatactgacacaaccagatcgttaaacctgtccactgacttcaagaacatggcactttgagtccatgctaggtcttggacaacatcaaacgctgcatgaatataaaatggtgcaacctgggcagaatctttttttttagcagccagacccaacttcaagtttcatagcatgggaaatatcaattccggcccccccaattgattaaagcacgcccagtggtttagcccaaaatgaaaaccccctctcggttatcttttaaaatatacaggggaaaactctccctaca

SEQ ID NO: 129710 - DNA, 699 bp, Arabidopsis thaliana columbia
  unsure (1)..(699): unsure at all n locations
taacnnnnnnnnnnnnnnnnnnnnnnnnnnnnnnnnnnnnnnnnnnnnnnnnnnnnnnnnnnnnnnnnnnnnnnnnnnnnnnnnnnnnnncggccgccttttttgcattttcaaaatctcaagaatgtacgtttagtgaatcataagcatatcatctctcatttacactcagcttccttcaagttaaaattgagtctttttgcctatccataaatttcactttgatcttctctttagtttgcaccacatcccatttttggcatgaatcgttgcgccgctcacgagttcaacagattctggcgttccacgcagctccacatcgaatttctgaaacaacatagctagtgcgacggtcgattccattagtgcaaactggtctccaatgcattttcttggtcctccaccaaatggtaagaatgcaaagtctgctattatctcattcggatatagtgccccggggctacgagatggatcaaagccagcccatccttcaattccattgctctcctttgttcttaaaaaacctctcaagctcaaaaatcgggggattatcccaaaagtatggaggatctatggagaattattccaccgaaaatgaaagatattcaggtccccttttttgggaacctttaatggaaccctttctttttttcccccctctttgtgggttcccttcccgggggttaaaaggggttttcc

SEQ ID NO: 129711 - DNA, 785 bp, Arabidopsis thaliana columbia
  unsure (1)..(785): unsure at all n locations
nnnnnnnnnnnnnnnnnnnnnnnnnnnnnnnnnnnnnnnnnnnnnnnnnnnnnnnnnnnnnnnnnnnnnnnnnnnnnnnnnnnnnnnnnncggccgcggttaacaaatggtatttcccccagtacaagccacaagacgaatccatattgcaagaagcaataactggattaagttttgcaacaacgatattattcccccattggaccctaaatctttttgggtcagattatttggcacatttgtagatgtaaaccccacatcacaatatcaatactaaccaacagacaacaacaaacaatggacaaccttttaacttagagacggctacgtgtagccggtttgaaactcgcaatacccgttacttccctccctgttactaaggtgtttatatcataagtcccttcgtatgtataaatgggttcaaggtcacagaaagcctttgctaccaaaaaatctgctagaaattcattcccaccaagtaatttccgaactaacgaagcagtttctctcgtttttgatgaaatccatgccttttcctaaactggcttgacttggagtcatctgaccccgtcttatacaagttggcagagacgcccacccggcggccgtttttaagtcaccaccaagttggaactttgggtttggaatgcttggacccccaccaaaataataatttcggaaaaacactaaagttcttaaatgggggatttctatatgcaatcaatttgggttgtgttaaaaccaaataaatttttgggcggggcccggccaaaatttttcaatat

SEQ ID NO: 129712 - DNA, 580 bp, Arabidopsis thaliana columbia
tggcgccctcacctgcggtggcggacatatatagcaaccagagccaacccctgttattgctttttatttcgcggcacgctattacatgactcatgtttttattggtgcgaacacttcatgaacctcaagatcctgcccggaaatgcattcacgacgaaagcatctaaaaccacagtatgttaacaatgacgcagtcatcacatggcaactgataacataattgcgcaaaaatatatcaacttaggttgaccattataagctttctaactctatgtcatggtcaggtattaattttacatctaccagaactcaataagcacaccccgtgatgcctttcaacaatatattggatggcgcgctgacagattatggcaagctaggcttactatgggatagtcttcacgaccatagatgcacacaatcttaattccaagcgccgcggattccgggtttcctatcaaaaacttttgagccacgcatgagccaccatggtaacctatcctagacggatcaccggctgccccccacattggttgtaatcctggctttcacacctatagtacaccacaaatcccactgt

SEQ ID NO: 129713 - DNA, 551 bp, Arabidopsis thaliana columbia
ggcttgcaaaaccaaagtacaaaagaccgagggggagccgaagagagggaccctgtgaataggggggacaaggaagaagggaagggaggaagaaagaggcaaaaaaagagaaaacaacagggacgaacccaggagcaagagcacgcagagcacacgacccaggacaaacgaggggaccgaaggaaaaaggaaagagccgggaacaaacaaggaaacagcacaagagccggaggacagaaagaacacacatgcaagaaagaggcacaaaggggaaagagagaaaggaccacaggaaaaaggaccaaaaccccaccgggaaccaggggaaagcaaaggagcggagcaagggaaagaacgggaaaaaagagaagacgagacccaggggaacccaagggcaaacgaaaacgcaggaaagagcagggcaaaagaggaaaacgcccacgaaaagaaaaagaaaacgaaggaacgccaaccaccgcagagggcgaacacccaagggaagaagggggacccaaaacaagaagacaagaaagagaacgaggggaaaggag

SEQ ID NO: 129714 - DNA, 768 bp, Arabidopsis thaliana columbia
taacaaaagttggagctccaccgcggtggcggccgctctaaaactagtggatcccccgggctgcattaatttttttccgccaaagttacagatttttgttgtggaagcaaatactaaaaattacaaaggtacagtggtggctaaagatacacagaccgaactgctctgacttctctgactagttaacaacatatctcttcagcgaggctggtggatgtttctcggagcagcagcaaccctctggtttccccatttcgctggcttttccgcatacttagctggttccacaatcgatctcgggctcctgtttccacttgatttcttaaccatctcaccattctttccaaagccaaattcggaaggtgcttggtaatacattcttccatcgaatccttgatcaaacttagcagcattagtgtcaaagaaatcttccatattatcaaaatcaaatgattcttggagaagatcaggtacattgatttgaccttcaccattttcattcttttcgttgcaataaaaccatccgggccttgctggtgctgactgatccagtaattaaggtaccaagttcgaagcttgtcaaccaaatggccaaccatttccgggtgaggaaaatgctttccaactttggtcgttaacaaggcttgcccgcgggtcccggtgaaatttcggaatactctaaagccctttaaattcggattatcccgggccctgaaccttttggaggggggggtgtgtcctccgggttacccccacatatattcggcc

SEQ ID NO: 129715 - DNA, 611 bp, Arabidopsis thaliana columbia
  unsure (1)..(611): unsure at all n locations
ccccgaacgagcgccgacacagaccgcaacacaaaacaaaaagcccccccatttccgcatatttcaccaacagccccggaacaaaaccgaaacacggggaaaaggggggacacacatacacagcccacgccacaccacnaagaagcaccccgccccaaccacgcgcgcgaagaacggacgcgacacaacacgcgcaagacaacgcgggcagacacaacccacaagcaccccgcgcggataaagatcacgcgacaaacagcgcgtggacaaaagcgcgcccccaccacacctaagaaaaagtgaccaccccgccaccccacaaacggcagaaccccgcacaccgggaaaaagatgggacacccccacccacaatacaaaccccccccccccaagagaaaggaaaaagacaccccacaagacagagggaggccaccccgccccggacagaataacggccgcggcgcacccccgccaacagcgcccacgaaaagaagggaaacacagcacacaacacaccgaaaacaacggagaacaacgcggcgcgcagacgaaacgcagcgagaaagcacaccgaccaagctaaaggataataaatcgaagccaaccacaaa

SEQ ID NO: 129716 - DNA, 1090 bp, Arabidopsis thaliana columbia
aaatttttgaataaatttttgtgtataataatgttataaatctttatatttataaaagatctttagttcatattggaattatattttaaattttttgaataaattatatgttcttaattcatgtatttataaatattggtatatggtcttttaagttaaaacctaattgtgataaattttagtttatatattatattttaatggtatacattggaaattactttgataacattgtttaacatttaattagtacacgataataataatatgtaaattagtgaaagtcgcttaaaaaaagaaatacaatttatctaataatggttttgttataattgtgttattgtattcaaaatatgggttaaaaattaaaaatttgtcttaatttatggttaataatttctgcggatttaatctaattgtgtgaaaatcaaaatgctaaagtgttgtggaattattattggtataaataaattaaattttgtgtataaatatctctaatatcagggtgttgtaatcataaatataatgttgtattttgaaataaataaaattctcctaactttttgattataatcttttttattatttgaatataataagtttcttattaaacataattaatcatataacaatttaatctttttggaatataaatgcctttataaatttttaaccatttttatttaccttaaaatgaatttttaaatggtataaattataaaacctatcttttttatggtaatcctttggaatatgaaaatttctcaagaaaaaaaaattgtataaatttgattttattgatatttataaatttttatttatttaaatgttttatttcgtttatatctgcactatattctattaagtgttagggtatccagagttaactcctaaatttttgcccctttaaatatggggtagctgttaatatttaacattatcaaatggggtctcgtcatattttaattaaaacttttatttataattgtgtgaaaaaaaacattgtgtctgtttatctactcaaaatttaatttcgggcttttggcaaataaataataactaacctttttttactacaaactttttcagt

SEQ ID NO: 129717 - DNA, 554 bp, Arabidopsis thaliana columbia
aaaatttggagccaccaccgccctggcggacgttttaaaacttagcgaataccccggactgttttaactttttgccgccaaaaatcaaagatgttctggatatatgatcaaaaaattggacactcgcgacattacaccattaagtgtgcaaaggctgtacacgatcctaccaaattgattcaggtccaatccgactataacgataatgacacgcctcaaaacacacgctttacttatatacatgtgatatatggaaaccccgtccactattcatcgggaagataatgacccctacctcgaatctctagatcattcgctccaactgctcaccgtcttcgtatcctctgcagatgctgaagttgcaccagtagagaataactcctgcatcgttaacctaccgcgatctatctgagaccttcgcagataaatttttttagtaaactaatcacggacacctcgcaatctgggggcccatacgctctaaatgtggaaacacacgaaaaattctcctaattgccatcgaacctactactggcacagcttgttacattcta

SEQ ID NO: 129718 - DNA, 988 bp, Arabidopsis thaliana columbia
ttaacaaaagtttgagagctaccaccggggtggacggacgctctagaactagtggatccccccgggctgcattaatcctttgtacgctattctacattgtaagagttttatgcatacaaaaaggagattccatctgcaccatccacatttctttacaaatagtgcaggtacacttatttctgtttgcggctcttatcttttctctagagttgtatacagtccattgatctcatccacatggaaacttaaagctacttactacaaagagagagagcctcttggcttgtgttgataccttaactcatatatccatatggtgaccacttgagtcgggtggttgacttcccaatgtcatgtactgtgccatgaaccctctaatttccgtcatgcatgcaacacctggatattgggatttgccgaactggcatattcaggaaaggactctggtcaccaactccaccccactatttaattaagggactcccaccaaaataaaaggcttctcaattcttgaactaattttgtggacgggtgcgtacccacaaccctttttggaacctttgtcacacgtccctatatatggccaatatgttggggttaatggcagtgtctctttcaacaccaatccataatggtctataaatgagtgcctacagaacatccgtgctatgtgacatgtgcttaagtcctttgtccatatttctcaattacatccttttgacaccccgaagggcgggtttcttgttcacactttttaaacaacattcgtggggccaaccgggacaccaccccgccttttttttttttgggactcattcccccaatctcccaaaattatctaaaattcaatcccccctgaacccaaagtgggccttttccaatcctttgaaaggttatttttacaaatcggtatattctcctccttgggatctctttccgcaaccccatttgtgctcccacagtgaaagctttctagggctttttcggg

SEQ ID NO: 129719 - DNA, 677 bp, Arabidopsis thaliana columbia
  unsure (1)..(677): unsure at all n locations
nnnnnnnnnnnnnnnnnnnnnnnnnnnnnnnnnnnnnnnnnnnnnnnnnnnnnnnnnnnnnnnnnnnnnnnnnnnnnnnntttccgccaagttttatgatcatcaatcataagaataaattaatcctttttatcatcactccaaggagaacatatcttttccaacccctttccaatagagcatgcgaatccagctctctccttttccggtgagagagaccgagaacgcgaaggtgaaccagaaccgtctttctccttcttcttggaatggatggtgtcgatgacggcttcgatttcttccttggctctctccaaaacattaggagccttcacttcatccaccggtgtgttctcactgatatcatcactccttccatgagtttctttgtgatgatgatgaagatggcgaggaggtttttccttcaggaataaagatttgaggtcttccctcgcctttttcaacatattcgggtttttctttccatcttctgggttatctgatttgaattccattttatcctttggactcttgggttgatgaaaaggcttccgatacacggcataaagctctttctttagcctcggttccgaaccaaggttttggggggctttggacccctttacctctttatataaaataatccacccctttggaaattcttttttttggtccccaaa

SEQ ID NO: 129720 - DNA, 766 bp, Arabidopsis thaliana columbia
  unsure (1)..(766): unsure at all n locations
nnnnnnnnnnnnnnnnnnnnnnnnnnnnnnnnnnnnnnnnnnnnnnnnnnnnnnnnnnnnnnnnnnnnnnntttttttgtttttattcgcggccgccaccgagttggaatcctcctttatccaatgtacttctgcctcattacaccacctaaacccttcctgttcttacacatgaaaaccaatgttgatactctaccacagcagacccttctcggaattccccgaaagtcattaagcatcaatcccttcttcaccaaatggcaccccgcaaaggcccgaccacaagcaaaaccgcctcccttgttcagccttgaagtggcttctcgaaaatatcctcatcgtggagatactgttgccctaaaaatagatcgctatatttctaaagggcctatcccattgctatgtccccctcctcacagtactccggtctccccaactcacgcaccctgacataaaggattttaattcttcttcataacatatctcctaatcacgcattcattctcgtcaaccaccacacacgtttaagagcctctcctcgatacctcaaaacaacacacctcactcaatgataaactatactcctctctcaatttgataaaaatatgacacaccctatgtccccacattctctgtgttaataacatcttccataatttactttcacttttgagtttcttctataccacaaaatgtgaagtgcacatcaccctctgtcacaacatcttttgattatgtttgatatnatatacattaccatacttct

SEQ ID NO: 129721 - DNA, 710 bp, Arabidopsis thaliana columbia
  unsure (1)..(710): unsure at all n locations
nnnnnnnnnnnnnnnnnnnnnnnnnnnnnnnnnnnnnnnnnnnnnnnnnnnnnnnnnnnnnnnnnnnnnnnnnnnnnnnnnnnnnnnnnnnnncggccgcctcaaacacaaactatactaaacaacaaaaagactcataaattccgaaaatatcacatttttttttttccgattgttgaagaaacttaagcaatggagactttagcaccagcttcttcaagagtcttcttagcttcttcagcttcatctttagtgataccttctttaaacttctttggtaatccttcgattagctccttagcttccttcaacgccaagctagtcaaagccctaacagctttaattactgcaatacgagaactactcggaacttcattgataaccacatcgaactctgtttgctcctccactacagccgccgcgccaccgtcggctggagctgcacggccgctgcttgcggggctaaagagagtggggagacaccgaatttgcttggaaatagtcgacaaggatacgagcttcttcgaaggttaagggagagatttcgaatccgattttctcgatttttttccggagctttccaccgcgggaaattagaacggaagggtgaattgccccgggtgccttgaagaaaaaagctggaaaccaaaatggggaaattccaaattggcgtggggtttttggaaaagggaaaattaaataaattggga

SEQ ID NO: 129722 - DNA, 724 bp, Arabidopsis thaliana columbia
ttcaaaaaacccttataaggtaacaaaagcggcacaacaccgcggaggcggaacgctcgagaactagcgggaacccttttgccgcatgaaatacgcggccgcccaagaaagaaggagacccagcacacagagaacaccatcaaccaaaccaccgcatcaaaatgacaaatcaacgaaaaccacaacaacgcgaaccgccaaacccatacaacccatgaaagacactcccaataacaaaaataccaaacccaaaaaccggcaccagaacacccgccccaagcaaaggcaaaaatgcaaccgaaataccaaaaaacccaacggaaaccgaaacacacccacgcccgccagcaagagaaaacagcacaccaggggccaaccaaatcccaaaggccccccaaccgaaaaaagcccaaccaaccacagaaaacaggatacggcagaactcctttggagaggtcaaaatcaaaccaccgcacctgacaaaagtcaacgaccgaacaagttcccggaaaagccgtggaacaaaaaagctgggcagatgaacccggggccgccctaaacggaaagccgatcatcgaaaaggcacataaacgaaaaaccgcacccaagacacataaggagggggaaaacctaaaacgacaagaaaacggaaacaccggtacagcacaacaagccccgaaccgaaacccgaagacaaaagaggaactccaccaaaaccccgaaa

SEQ ID NO: 129723 - DNA, 856 bp, Arabidopsis thaliana columbia
  unsure (1)..(856): unsure at all n locations
nnnnnnnnnnnnnnnnnnnnnnnnnnnnnnnnnnnnnnnnnnnnnnnnnnnnnnnnnnnnnnnnnnnnnnnnnnnnttttctgcttgaattcgcggccgccgactctctcaatcgcaacaacaatccgatcctcttctcctctcacttccgcttccactcatcacttcctttccaaacccaccgcaatcgaattcccatttcgtctcagctcttcttctagccaccgtgcaatcaacctccgtcctatctccgccgtcgaagctccggagaaaatcgagaaaatcggatccgaaatctcctccttaaccctcgaagaagctcgtatcctcgtcgactatctccaagacaaattcggtgtctccccactctccttagcccccgcagcagcggccgttgcagctccagccgacggtggcgcggcggctgtagtggaggagcaaacagagttcgatgtggttatcaatgaagctccgagtagttctccgattgcagtaattaaagctgttagggctttgactagcttggcgttgaaggaagcttaggagctaatcgaaggattaccaaagaaagtttaaagaaggtattactaaaggatgaaagctgaaggaagcttaagaaagactccttgaaagaagcttgttgcctaaaagtcctcccatttggctttaagttttttttaaaccattccggaaaaaaaaaaacaaatgggtgaatacttcttcccgagaaattttatgaaggtcctttcttgggttggtaccaaaacactagccctcggggggtttgggaggtaaatgggactccacacctctttgggaagaaaaaattggttggcacctttttggaggcgggccc

SEQ ID NO: 129724 - DNA, 1099 bp, Arabidopsis thaliana columbia
gaaaagatgtgaaagaaaatcacggaggaaaaaggggcgaaaggaaaaacgattttttccaggtattgtgaaaaatggaggacgaaagtgaggtagaaagggggggaaaagggggtagaatagtaaatactgtgtatatgtggaaaaagaaaaaagaggagataggggataagggaaataggggagaaggagaaaagggtattgagaagtagaagtaaacaaaagggaagaagagagggaagggggggtggaagggagaaatgggaatgggaagggaatgggaaaacgaaaagtgatggggaaaaaaaaatggaatagcaataaagggaataatgtgaaaaaagagaatgggagaaaggaataaggagaagaggaggagaaacaggatgagggaaatggggaaataagggggtagacataaggataagttctgcagatatgaagtaagggaattagagatgaggtgaagagagggacaagagtgtgaaggagaattgagaaaaaaatgggtacgagggggatgaaacgtatggatgaagcggtagatcctacatacaaggttactacaaagatagtggggaaacagatgagaattaggtggggaaagacacggagaaatgaaaaggatggattgagggaggaatagggcaacaaaaaatagagcgagatatctggcgaaaatattaggattaaagagggggcatctagggggaatgtagaggggctagaagacaaggaaaataagaggcgagaatagttgggtaaggatctggtggtgaaaataggtacagaataaggcgggaaaaagaggcgcgaagaattgaggggagagaagataggtggaaaaggtgagaggagatatggagaaataaacatggggaaaaacgaggatagaaggcgggtaaaatattaattgggatatagggggaagtaggataggggaagtcacgggagaaagagtggaaagttgatggggacaaaatagggcaattaaaaatgagtgagtggaaagggcgaatgggactgggacttaaaggataattagggtggacaaggagggggggaaataggggaggcatatgggtggaaagtaagggtg

SEQ ID NO: 129725 - DNA, 546 bp, Arabidopsis thaliana columbia
  unsure (1)..(546): unsure at all n locations
nnnnnnnnnnnnnnnnnnnnnnnnnnnnnnnnnnnnnnnnnnnnnnnnnnnnnnnnnnnnnnnnnnnnnnnnnnnnnnnnnnnnnnnnnnnnncggccgcctcagggccatctcaaatgtgagaacaaatgatcttgagcagactttgctggctctaccattctcagattctttgaagtttctttgctacatgaaagactggagtttaattcccgaaaaggtagagttggttagcagaatcgcaaccattatattacagacacatcacaaccagttggtaacaacaccatctgccagaccaatcttaagcgttctcagggacattctttactcagaaatcaaggcatgcaaagatacaatcggtttcaatttggccgccatggatcatgtcaagcaaatgatggatgcaagatctgatgcttcccttcaaggatgcaaaaggccaagcttattggagataagggtcaccggcaaggcaaaaaacgtaatgggccattcaccgagggagggataccaaaaggatggggaggaaaaaaaagggaggaa

SEQ ID NO: 129726 - DNA, 727 bp, Arabidopsis thaliana columbia
  unsure (1)..(727): unsure at all n locations
nnnnnnnnnnnnnnnnnnnnnnnnnnnnnnnnnnnnnnnnnnnnnnnnnnnnnnnnnnnnnnnnnnnnnnnnnnnnnnnnnnnnnnnnnnnnnnncggccgctgatgatggagactaagcgcaatgtctactcgcttgaagataacaaaattaaacgacacaagtcatctgatctctctttctcttccaaggagaggaaagacaaattagcagaacgtatttcagctcttcaacaactagtttccccttacggaaagaccgacactgcatcagttcttctagagggaatgcaatacattcagtttcttcaagaacaagtcaaggttctaagtgctccttatctgcaagcaaccccttctactacagaggaggaagtggaagagtacagcttaagaagtaaagggctatgtcttgttccattggagtatacatcagaagttgcttacaccaatggtgctgatatttgggcctcctgtgaagactccaacatcttctcatgcttttaaatctctcgtcttctaaattcggccttttaaatggagctgttgctaaaattttttggcttaaagaactaatgaaaaattaagcccaacgcttttggccttgaacaatgtaattggatgggagaggaacccttgaaaattcggtggaaagggctgggatttccgggtaaattttttttaacctgggcttaaataccccccaaaccttctgtgtgggggggggc

SEQ ID NO: 129727 - DNA, 925 bp, Arabidopsis thaliana columbia
  unsure (1)..(925): unsure at all n locations
nnnnnnnnnnnnnnnnnnnnnnnnnnnnnnnnnnnnnnnnnnnnnnnnnnnnnnnnnnnnnnnnnnnnnnnnnnnnnnntttgccgcgtcaactcctacatattattcaaaaatatttattaaaaatgaagctgggaattcaatgggcacaattgctgcaaacaattcggatttgagtaaaattaataaggagggagagagatgtgtttagaggttgaagatggcagcaccacttgaaggcttggaggcaaagaggtaaagctccatatcttctttttttaccactcctttctctactctctttttgtagtacttctccttgactgctggaatgaattgagtaacgttaaattccttgaccaaggccacagcgcaaccgtcccatccagcttcggtcagtcttgctccaagtgctccattctccttgcaaacttgaccaagttcttctagcttggggcaaactgcactcggataggacacttgcgctggaatggcttttattcctgaaaacaccaaggtttctttaacttctttttcgtccatttaaaggtttgaaatttaacctgtgggtccctttgaaaaacccattgaaacaccctctcgggggcttttttgggacaattaaaaaccgttgtggggccaagcatttctttctttggtttgccacaaattttggggaaaatatgcgcgggtgaggtcccgcgataaaatttcccgaaatatttccaaggcctttatttcggaaatcccccggcggaaaccctttcgtagggggggggggccccgggtaaccccaaaattcgccccttaaaaatggagagccgcatttacaaattttcccttggcccggtcgttttacacaaagttcgggaactggggaaaaaaccctgggctttacccccaactttaatacgccttgcaatac

SEQ ID NO: 129728 - DNA, 387 bp, Arabidopsis thaliana columbia
aaattgcaagccccgacacactgaacaggaattatttcacaaggcgggcggcgccaaggccaggggagggagcggacagaagcagagggaacggaagaagggaagcccggagaccagacgaaggacccgacccaggaacaaggaaagaaggaggacgccggggaaccccgaccgggaagagggcgcacgccaaggaaggagcaagagacgcaagaaagaggaagcgcgcagggacgcgaagaagccagacgacggaggaggcgacgaacggacgcaccagggccgggaggaaaaaaaggacgggggcaacaaccgagcaaaccacggacccaggggaggaaggacgaaggaaaccgagaacggagagaccatcccgaaagcaaccac

SEQ ID NO: 129729 - DNA, 843 bp, Arabidopsis thaliana columbia
  unsure (1)..(843): unsure at all n locations
atnnnnnnnnnnnnnnnnnnnnnnnnnnnnnnnnnnnnnnnnnnnnnnnnnnnnnnnnnnnnnnnnnnnnnnnnnnnnnnnnnnnnnttgccgcttattccaaacgtataaatattacataagacatgtaagtttggtttcatccctctttaactgcctactcctaacctaaccacatctactatacatttctccggcggtaagttcgggttttgtctggaaaatctttctgccttaatgagccgcagtgaagttcatacagataggaggtctaaccttagccagagccagcaaagaagaaggcagaatccagagaccatctccacatatcaaacctgatgcaacagctggaaccatcacatctgccttcttacgattcacctttttccaaacgtataccactaaactcccgatacacatatcgaatgcgaacgacccacccaccaagaacggtacagccattgccatcgggagtgggatccacttccctggcttatctggaagaggtctcttgccaagctggcagcaaccgcaaggcaaagaatccgtagcacagctctaggcattgcttgggagagccgaaggacctttaacaccgaatatagccatgtttttgtatatcataccataaggagctttagaattacccattttgggtttccaacataaaaacgccttttaaaaaaaggaaagaaaggtgaagtggtgccaaaccaacgccaggcctaatcggctgtgccccttaataggcttggtgcccaaccaaagcctattttaacccgggggccgccgcgtccgccctaaatatttccattatttcaaaaagcttttaattgggaatta

SEQ ID NO: 129730 - DNA, 450 bp, Arabidopsis thaliana columbia
aaaaacccctgcggccaaaaataggggcccaaaaagagcgccgggagggagagacggccgacagacggagcagacgagagcaagggacgcaatataccacggatgttagcgacccgacgccaacgctagaggaacaagcgggagacagggggaaacgacgcgaacagaggaaagcgcacgaagcacggacgaaacagcgggaaagcgagggggaccgcaacacaccggcgtaacaagggcgcacagcgcgggaaagcggccgaccccggggacccagccgcgcacccgggcggtaaccgaggaaacagcgccgggagagccgacaccaaacgcgagcgaagagaggagacacgcacgacggaaaacaccgcggaacaatcgcagctcgaggcggccgggagaaaacggcgccgaaacgggaacggaacaagagggaggccgccacccaca

SEQ ID NO: 129731 - DNA, 827 bp, Arabidopsis thaliana columbia
  unsure (1)..(827): unsure at all n locations
cgttnnnnnnnnnnnnnnnnnnnnnnnnnnnnnnnnnnnnnnnnnnnnnnnnnnnnnnnnnnnnnnnnnnnnnnnnnnnnnnnnnnnnnnnnnnnnnnnncggccgccttaacaacttctattaagccagcttacaaatctcttgtaaggaaaaaagctatgacccctctaatgaatataatatataatatagcttttgctcatctctataccatttacattactactatatgaataaacccactgaattcaatcagcgaaaaaggccataggggttggaaaattgtataggtcattaagctggcgagaatcatcagtgtaggctcaagtgcattgagtcttgaagcttctgtatatgaaaaggctttttctaagatccagtcacggaatttgcatcggagagctcagatctttgcgcgtttgagctgcgagtgaacaggggagacattctctgattctagctctctcttttgaatactctttgtgaaagacaaatcttcaacccttcattagagaatctcttaatccttttacatccgaaagttttaccggccttcagtaagaaaatttccgccccttctttaagacatctattaataccgagcaaaatgttctcggaggacataattaccaccggtactttttttaaaagctggggatttttgagccttcttcaagagctcaatattcaagtccttacccggggccatttgaggtaactccacgtctttaacttaaaaatttaaacccctttccaaaatacctctcaaaaacccgcactgggaaattttttactttcagaccatttcccaaaacccaaaggggtt

SEQ ID NO: 129732 - DNA, 336 bp, Arabidopsis thaliana columbia
agggttaagaacacagggagaaccagtgcagcagcgggcaaaagcgccggaaacaaaagagaagaacaccgcacataaacccgctttattagcaaaaaggaacggaaaaaggacccaaaagccgggcaaaggggggggaacagcgccgaacacacagggaagagggagaaaatagcaggaacaagcggcggagccgaggaaaaaaaaggaaaaaacacgggaaaaacgcgcataaaacaggaggaaccgggaacgaaggcggagaagagatggaagaacacacgcgagaaaatcgaaacacgcggcggagaaaaagggaacggatacggaggaaaa

SEQ ID NO: 129733 - DNA, 656 bp, Arabidopsis thaliana columbia
ggaaaaaccaaggggcgagacaagagaaggaagaggcattgcggcgaacaagcgaaaggggccaaaaagagggcacacgcaccccagcaaagaaggaaggagggaggaccggagaaaacgaacaagacgaaaacaaagagagaagcgccgggaccggaagagaagcccagagaaaaaaggccaggacaaggcgcgagcaggaagaacacagagggagaacaaaaacagaacagccccgcgaggggggaccgacggcgaaggagggaagcgaagaagaaagggcgaagaccgcacagggaaagagggcacgcgaagcggggccaacccggggaaggagacacgcccaaggggggaccgggccaaagaaagcggccaggcggaaaaggcgaaagggacaaagggaagggggaaaagaaggcacacaaccgcgaaaaagcgaaagggaaaacggaaaacgacaaaacccatggcggaaagggaagggggaaacggcagaaggaggagggcaaagcggccacgccgagaaccgggaagggccgatgcgcccaggggggaaagagagatgcgcaagaagaaacggggaaacaggaaagacggggagacgcccacgaggaccgcaaaacgagaaagcaggagagcaaagaggagagaccaca

SEQ ID NO: 129734 - DNA, 316 bp, Arabidopsis thaliana columbia
agggaatttagggaaatgcttgatatcgaattcgcggccgcctggcttaatagaaggtttaatttagatttttttaagttttgacaccattaaatacacaaaagggttgcctcttgaaaaatgaaatgattgtgaatgcaaaggactgtaagggtgagagccctagatgaggcgctattattagcgaacagagaggtttgtgttttcaatggagagcgagctatccttatgagtggttttggacagagtcaaagtgatgacctggataaaaattatatagcatgatactgaagaaaatgaagatcccccccccccc

SEQ ID NO: 129735 - DNA, 351 bp, Arabidopsis thaliana columbia
  unsure (1)..(351): unsure at all n locations
aaaccagggagaaattgggggcaaaaganaccccaaagaggcgcaaaagaacacgaggggggacgccaaacgagccgggcaatatccacgccattattgggggacacgcccacaaaacgagcaggagggggggaccagaggggggagagcaaagccaaaaacgagaaccacaccgagacccccaagcgaaaaagagagaaggcaggcaagcaaaaaaagaggggcgggccaaaacaaaagggggacgacgcaaagaggacggccagggagaagcaagaaagacggaagcacacacaacggacacggcgaccggagccaacaacacaaagcaggccggagagaggaaaagcc

SEQ ID NO: 129736 - DNA, 244 bp, Arabidopsis thaliana columbia
cacaaacggaaagccaaaccgaaaagcggagaagcccagaagattaggcgaaaaccggaacggggcaccgacggacaaggcagagacaaggccaagacacgagccaacgaaccaccccgcaagaaacgaggaaaaccccagcaaaccaaaaagcaaagcccaacacagaacaaacccagacgagccgcaaagcgacccaccaacggcgaagaaaagggacgcaaagggagaagaacacaaccaa

SEQ ID NO: 129737 - DNA, 314 bp, Arabidopsis thaliana columbia
tgggacccccctgtggtcgactgtatcgataagcttgatatcgaattcgcggccgcaaaaaaccttcaacaactttgaacagactctgtgattataaaaacgaaaactctcattattctcttcacctccataacccctaagttctggtcaagatgttcaaaattttgtatcttggagagtaaaaggctttaacttttaagtaattctctacaccgatgatattaagagttacctctctatatcatcctcaggtttttgattgtttcttttctcttacttcttcaaagctgtggaaataacctcagtgtatttgt

SEQ ID NO: 129738 - DNA, 300 bp, Arabidopsis thaliana columbia
  unsure (1)..(300): unsure at all n locations
cgaaagcgggcaaacgaacccgcggccgcgcggccgcggaccacagacaccaccgacaatgacaaggccaagacccaagacaaggaaggaancccaccggaccagcagcgagggaaaaccgccggaaagcagcacgaagacggacgaacccaagccgaaaacaacaaccagaaggaagcaacgcggcaccacgccccgcgacaccgcggaggggcaaagaagaggaagaagaagacccacaccaagcctaagaagaccaagcacaagcacaagaaggaaaagcgcgccgttttttatttt

SEQ ID NO: 129739 - DNA, 403 bp, Arabidopsis thaliana columbia
ggggaaatatacggccccgagggggcccacaaagcacccgcgggccgcgcaccaaacacaaccgacgcgaacaatttaaggggggagacctccaccaacgacaaggggcacacaaaaaagagagccaggggcgacacaagagcagacaagagacaccgcaccggagcaaaaacggggacccacacaaggaacgcgcgagaacacaagagcccccccaaaaagaaagcggccgaggacccaaacggggaagagagcgaacgaaaagagagagaaacaaaaactagggggcacaagccggcgaacgaggaagaggcaacaacgacgagagcgagcgagcgaagagccaggagcgagacccgaacctcaagcagccgaccaccgccgcagaagcgaggcgagacgc

SEQ ID NO: 129740 - DNA, 283 bp, Arabidopsis thaliana columbia
ttggtggattgtatcgataagcttgatatggaattcgtgggtgtgggagaagaagagggtgttatttaaaggttttttaatatggttgatttggttttgggtgatgatgaagatagagtttgaggaattatggatatagaaaaggttgtaaatgaaggtgtaaaggggttagattgtgaattattaaataaaggtaatagagggattttatatggtgatgaagtaaagattatggatgatgatttagaagatgttttttttgattattgtggatttggttggt

SEQ ID NO: 129741 - DNA, 361 bp, Arabidopsis thaliana columbia
gcccgcagagaaacgagcgcacgccccagaccatgtacgacgggatttcccaacgcaccgcgaggcagcccggcacaagagggcgggcccaagggggggcccaccgcgacaggacagaacccaaacaagcacgcccaccaaccccgccaccgcgaaagcacgagacggaggcaccaaaccagccaagaggcaacaaccaaagggcgcaccaagcaaggcccccaacgcagaccaaggaacgagacccgcaacccaaaagcacagacagaggacccaaggcccacacgagccaggaacccaagcacgagacgaaccaaaaaaaccccgggcagagaaaaacgaacgcaacgcaccagaagcg

SEQ ID NO: 129742 - DNA, 453 bp, Arabidopsis thaliana columbia
aaacccccggagaacaaaatgagggccaaaaaagaccccccaacaagaaaacgcagcgcgcccggaaaaacacccccagagcgggaacgaaaaaaacgagcgaatattacaacacacagaagggaccccacccgacagcgggagaagcacgggggggacccgcccagggcaaggagcaggacccggaacgggaaaaccccagactcaacgcggagacaaaggggcagggaagcaaaaaggcagcccccaagcagagcacagagcggggacgcccaaaataaccacaccacggccgaagccaccaaagagacggcgggtacaggcacagaccacgacgagagaagaggacaaccagcgagaggcggggcaacagaacggccaccccgagcgaacggagacatgacaaacagaagccaacgcgaccccgcgacgcaggcgacatgcacgcacccc

SEQ ID NO: 129743 - DNA, 309 bp, Arabidopsis thaliana columbia
cccccctcgggtcgattgtatcgataagcttgatatcgaattcgcggccgcgggagaagaattgtctgttattgaaaccaaaatcaatatggttgatcttcctttgggtgctactgaagatagagtttgtggaactattgatatcgaaaaggctttaaccgaaggtgttaaggcgtttgagcctggactactagctaaagctaatagagggattctttatgttgatgaagttaatcttttggatgatcatttagttgatgttcttcttgattcagctgcatctggttggaacactgttgaaagagaagg

SEQ ID NO: 129744 - DNA, 315 bp, Arabidopsis thaliana columbia
gaacccccccttgggtcgattgtatcgataagcttgatatcgaattcgcggccgctggcatcttgatggttactttttctgggttgttggaatggatggtggacagtggagtccagatagtaggaacgagtataacctacgcgatgcagtcgctcgctgcaccgttcaggtatacccaagctcatggacggctatattgatagcactcgacaacgtaggaatgtggaatctaagatccgagttctgggcgaggcaatacttaggacaacaattgtatttacgtgtgtacacaccctcaacttctctcagagatgc

SEQ ID NO: 129745 - DNA, 290 bp, Arabidopsis thaliana columbia
gcaaaaagaaaccggcggcacgcccagaaaaaaacgataaccctaaagacctgtgttttgggttaatgaccagccacggaaaaaacccttcaagaaaaaagggggaagcaaacaaacgcctaagggtaataacacgagacgaagcacaacacagatcgatcatagaagaggacagaatgaagcataacaaggaataaaaaagatccataagaaccgaagaaaacggattctctagcgggcaccatagtaaggaggaccagacatgtcggcccgagggggatacgaccgcg

SEQ ID NO: 129746 - DNA, 312 bp, Arabidopsis thaliana columbia
cccccccccgggtcgacggtatcgataagcttgatatcgaattcgcggccgcacgagatttcctcttcatctcaagagaaatggctgaatccaaggtagtggttccagagtctgtgctaaagaagatcaagaggcaagaggaatgggcattggccaagaaagatgaagctgtagctgctaagaagaagagtgttgaggcccgcaagcttatcttcaagagagctgagcagtatgccaaagaatacgctgagaaggataacgagttgatccgattgaagcgggaggctaagttaaaaggaggtttctacgttg

SEQ ID NO: 129747 - DNA, 311 bp, Arabidopsis thaliana columbia
acccccctcgggacgactggagcgcaaagcacgccaaacgaaacgcggccgccacgaaaaaacacacaacaatgtaaggatttagattcattacttttctccaaaaaactttcttcaagatctgttcttttaaataattatggcggaagaacatcgatgcgagacgcctgaaggtcaccgtctctgcgttaacaactgcggtttcttcggaagctcagcgacaatgaatctatgttcaaactgttacggcgatctctgtctcaaacaacaacaacaagcttccatgaaaacaaccgttttttttttttttt

SEQ ID NO: 129748 - DNA, 313 bp, Arabidopsis thaliana columbia
acccccctcgggtcgattgtatcgataagcttgatatcgaattcgcggccgcgaagaagaagaagaagagatttacagtaatttcttgtaaataagttttgagatagagagacagagaattacacagttaacaaaaatataatttaagaaggaagaaccttcttgacaatgtcttcactaagagcagcaatctgagaatccaaagctttaatggtttcttctttctgactctccaagctcgccaaagcttcttttagctcttcctccaccttcttccttccctccgctagcattctcctcgacttcaacctgt

SEQ ID NO: 129749 - DNA, 1066 bp, Arabidopsis thaliana columbia
aaccccggattggggaaagaggaacacaccacccggagggggacaaccaacaaaacaccacaaccagcccccattacaaaggacgacaaacacaaaaaaacaaggggcgggcgaagcaaccaacacagaacaacccacacaacaaaacaaacaagcgaaaccaaacacaccgaagccaaaccgcagaacccagagacgaaacacaaaaaaaccacacaacgcagcgcagacacaccgagcgaaccgcaagccacccaacgacaaccacaacgccaacccacaacgaaagaaacacaggagaaccgaagcacgcacaacaaaacgcgaaccacaaaccaaccgcgcgaggacaaccagcacgagcaaaagccgaacacaacggagcggacacaccaccgaaatcacgccacccacgagaagcacaacccacgcgagcaaacgaaaccaacacccccacatcaagcacccgcctacagcaagacaccaaccacgcaccaagcggaaagaaaagaacaagcgccacggaacagaacagccgcagagcagggaacggagaagacacaacgggcaggacccgaaacgagaaacaatcagcgccagatacaaaagaggaacaagcaccgcaaaagacggccaaaacaccgcaagaagcgacaacagcccacaccaccacccccaacggacagagcaacaaccacccagcaacaacacagacaccaaaggcacagaaacaacacaaaagacacaccgaaggcagagacggaaggaacccacacccacagcgaaagcaaaacaaaacgacaacagacaccacgcacagaaatagaagaacaaagcaacacgaaacagaccaacaacgcaaccgaaggcgccaaagcgcggacaacacgcggcacccacgacaacgagaaccaaaagacgaacaaacgaaaaaacccagcagcccaacccgaccacgaacggaccaaacgccggaaccagaggagcgagcaacaaaaccacaaaagaaaacacccggcgaacacacaaagacacacagagcaccacgcagaccgacacgcaacaa

SEQ ID NO: 129750 - DNA, 449 bp, Arabidopsis thaliana columbia
  unsure (1)..(449): unsure at all n locations
aaaaaaaaaaccttgggganagaaatagggggcccaagaaagagccccacgggggaagaacggaggaaaccaaaggggggacagaagggaaccccaaaagatatataaacggtgtttaccacagcagacggcgagggcagaaagaacagaaagggggggaagggagggggggccacagccggacgagaacagagacaggggaagggaaccgaagaaagccacggaggaagacacagaagaagcaaagaggggaaagaggagggaggaagggggcgaccacagaaggcggagaaacgaaagcacagacggggaaggagggcacagcccggccagaccagaaccaacgggcaagaaagcgaagagcaaggggcggagacagaaaaagggagaacaggcgacaaaacaggcgacgggaggaggcaggaagaacggaagacggaacggggaca

SEQ ID NO: 129751 - DNA, 290 bp, Arabidopsis thaliana columbia
ggaagaatgggccgaaagcacccaaacgaaaacgcggccgcgaccaccacagaccacaaagagtcaccaagtaacccaaaccaacggcaggaaccaaagagcacggacacccagctcccagagccaccaggagagaccacagcgccctccacgagaaaaaccacgacagagagcgcggacaggacgaactcaaagacggcgagcacaagaaggagccatacctcacccgcaacccgaaggggcaggaaccagccacagaagagggagaccacaagcacaaacaatcatta

SEQ ID NO: 129752 - DNA, 512 bp, Arabidopsis thaliana columbia
agggagaaaaccgggggccccccgaccgagggaaggacaggccgccccgcgaaccccaacgggaacccaaccggatttgcaatttaaccgcgggccgcaccgcacagaaccaaggggccgggggaaaacaactacgccagtaaacgcccacaccacaaagcaaccacaagcagcgacgggaacacgcaagcggacggagcggaggagcacgacgaacggaggagcacaagcacgccgggccaaaggaggcccaaacaccaacaagccgcagtcccacaggcacacaaaaggaacaagaagcacccgcaaccaacgagacgcgaaccacggaagccacagaccacaagcggggacagggcaaaaccccacaaccacgaaggggacagcccacacccaagacaccaaccaccaggacaacacaggagaaccaggagacgccacaggggggaagcgggcacgccagaaaacaaagaaaaacgacgcggccacacccagcaccacggcggagccgc

SEQ ID NO: 129753 - DNA, 479 bp, Arabidopsis thaliana columbia
gggggaaatatgggccaaaaaaaacccccaagcgaagaagacggcacgcacagcaacgcacacaaccaaccacgatatatcgcagaatttttcagccagagcccccaaaaaccgagaagagagaggagaagaaagaggggggaacaaagaagcgcaccgcgtgagcgaaacacaagaacaagcaaaagcagagaaagaaacaaagcacccgcaaggcacaaaaccgggggcacaacaacgcaaaacagcggacaacaggagaaacacaggaaaccgcaaggggacaacacagacacagcgagggagagaccacgagcgcaaggacagcagccgaaagacgcaccagagggcgacaggagcaaagcccagccgcgcaggaacagagacacgcagggcgggccacgagaggaccgagacgcggggaggagcgaggacacaaagcgacaccgccgcgcagcggagcaaacagccgccagaag

SEQ ID NO: 129754 - DNA, 312 bp, Arabidopsis thaliana columbia
cccccctcgaggtcgactgtatcgataagcttgatatcgaattcgcggccgccaacaagttccaacattacataagtgtgagtctaacaagctttaaataaaataaatataagaaagaataacaaattctttttgtagactatgtatcatttgggtccacatcttcttccccactggaaaatcattacaatagtgttacgaacaatttcaccttctctggctactcggagaaagctaatcttggacatggaatcaccttaactgcccggttcactggggtttgatgggtttagatgatttggaattcccatt

SEQ ID NO: 129755 - DNA, 1070 bp, Arabidopsis thaliana columbia
  unsure (1)..(1070): unsure at all n locations
agccccatggggataagggcaaacccgggcccccggaccgggagggagggacgacacagcaccccaacgagaacaacacgcactatgcaatttgaacccccaccaccgagcccccgcccaaccacacaagaagcgagggaggagacaataacacacaacacaagcacacacggcaacgnaacgccacccaccacacgcaacgaaaacacgaccggaacacacaccagggacgacgacgaacaacgacaccaccccagcaagcaacccgcgcaaccaaatagcaccaaaacacgcctgcacacaaagaccacaacaacaacgaaaaaggcaccgggaagcagagaccacgcaacacaaacacacacgggaccaaaacggggcggggcaacaagcacaaacgccaagccaacccaccacacaccaagcgaagacgaacgcgcccgaacagaaaacaacacgcacaggcaccacgacgaagccagaggaacccacacacagacacagaaaacgccacacgcacacaacgcaacgagccgccgccacgcagccaccgcagccgcacggacaccactaggaacaccaccaaggaaaccacacaaccggccaccagaacacgcacgccggcaagcaccagaggaccccgcgcggcaggactaacaccacccagaaaacggacgcaccacaaaaccagcaacacacaccaaaagaaacgcccaaaaccaaaacccacgaccccgagaacacaacacccaccgacgcacaacccgccccacacaaccagaaccacccacatgaggaacacacaacagcgacacacacacgcaccgcagataccgacccgaccacacacaacagccacagaacaaccgaaccccccgaggcacatcaaacccaccaaagacaaacaaggacgcccgcgaacaacagaaccaacgacaccaacaaggcacacaccaacacaacaacccgaacacacgacgacaacacgaataccaccaaaaacaccccaggaactaccgaccgcacgacgaacccccgcgccgccacgcgaaccgcgaacccaaccacga

SEQ ID NO: 129756 - DNA, 922 bp, Arabidopsis thaliana columbia
aaggcccccccggggaggtggccgctctagaactagtggatccccctttctgtatttaattccggccgcccgagatgcccccaatggagcgggttctaaggatcaagctaagaaagccccgaacgccaaaaaatactgacctaaaagaaaacaagcctgcaaagaagaacatgacacatgtcactttccacacgccgaacacatcgacccgacctagaaaccctacgccccaagacaccagtctatcctccagctgcccaaacttaatcattacctacacgccctagtctccctacctttcatatgaatcctctccttgaaccatcatcggagcaacacacctcccccaaaaggctctgacatttggtataaatcactaccgaacgcctttatacccattcgactacaatagccctacatacctggcactgactttgggctctctcagcacaagtgctataattccgcctgtacatcctgtgtccctccaatcaccactccgctccactcatgttatccctcacctcaccctctctcacacctctcgaacccatccatgctcatctatctctcctcattatactctgatctgcctatcatctatcttccatatatagcatcctatcctctctatcagagaatcctacacgtacgcatacacactcttctctgccaagcttccactgctcactatacaactccccagcaactacatcccactatagctaacagacactcccattatgcgcctctacaactgatgcgactctattccactcgtgaaataacctcgtccgacctctccttcctcatcccaaactaagtcctttctccgccattcactacactaattcaacaatattcgctcatacaacaccactcactatacttatactccaacacacttcctgtcaaatgatac

SEQ ID NO: 129757 - DNA, 270 bp, Arabidopsis thaliana columbia
gaaacaccttttagaaaccttccgaaaaatttctcggagaatttgccccagcagacccccgggaatcacaacccccaaaaacaagtccgattttaaaagattttaggccgcaaattgaaatggaaaccacctggacaaccacggcagacgggaacaccaccgcacaaaacctgaggacatgggcgaggacgaaacctacaacgttcatctcaggcactcggactggaaacaactgtggtaaaactcctgggcgaaacggcggccagacag

SEQ ID NO: 129758 - DNA, 936 bp, Arabidopsis thaliana columbia
ggggcggacatctagaactacggcacccccattttgtattatccgcggacgcaaacaaaagcaaacacgggggcggacacaacggaaacagaacagacgccacaacacaaagaaagaactgacaaaatgggccaaagaaaaagccgaaaaacaaaaccgtgcaacaggtaacaccgccaaccagaccgcagaccccaagaagcgacacacaaagaaaaagcctactaaacctcgagacctatcaacggaaagacctggccacagcaacggaaaaatgacacagacccacccccaacatcaaattaaaccaccactgcgcaccgcacccaagcaggaatatagtcccaccaccggacacaggcggcaggaagtcaacccaacccacgagaacacaccgaataaaacaccggggcacaaaatggctcaagcaaccaacagaaatctcacgcggccaacacagggaagaaaaaagggaatactccaccccaagccccccaagaatccacccactagcacaacatgcccctgctgacaaacctctaaaaccacccactagtaaggaaaccactccacacaaggaaccctctaaagggccagagaacccctaaagaccgccccacccaacatatacagggaccaacccaaagcacgcaacgcgtctggaactcagcacgaggcgacaatacgccccgaagcccaaattgggcaaccccacggaaaataaaaccccgaggagaacaaaagagagagaaaaaggccctcacagggaacacccccacccaggggggaccgcaacaaccggggaggaacacccccctaacccacgggggcatcccacaaggagcccacgaaaatgccaaaccggcaaaccagagcaccgaggcaacacgggaaacgacacaaacgccgcgcctccgcgggactaccaacccgggc

SEQ ID NO: 129759 - DNA, 765 bp, Arabidopsis thaliana columbia
ttggggtttttgggggaaaaaagcggtgccccagaggtggagaaagtgagaaagagcgatatgatataaagtgagagagaagaagggaatttttagtttttttaaagaggggaaggagtaggtagagtagaaaatggggtgggggggaaatagtaagaggaaggtgaaataaatgtggaagagataagtagaaaaggtgagtgtgtggggtggtgaatgatggtataagtggatgtatttaagggtgggtaaattatagaatataggtggaggtagtagtgatgaaggagtgaagtgtggagaatttatgagaaaattatgagaaagaagttgatagacgttggggggaaatgatggggtagggaggtaggtgaaaacatgaagtgttcgttgtttaagtggtggtaattagtgtaatcgagttagggtaggatgggcatatggtatcgattaagtgtgaaagatatataggatagagagaaggcagtggtttgataaagattaggctaggtagaaggtggtgtttgggagaagaaggatcggaatgttgttggaagtaggtagatgttggtatggtgagattgagagtgagagaggtggggaagtggtggaaagattgagaagtgatgtataaagagaaggtgagggaagagagagaagagaggtgtgtaggattgtatgagaaaggtggattttatttaggaggtatgatgatgatgaatgaagttagtggttagtggagggttgtgtggtttggtagaaatg

SEQ ID NO: 129760 - DNA, 367 bp, Arabidopsis thaliana columbia
gaaaaataggggcccaaaaaaaacccacacggcaagaccagagcgaccgaacgacgcccagcgggcgcacatttagcgcgattcaaagagcgaccggaaacgggaacaagcggggggcagggggggccagggagcccaaaccaccgcgcagagcacaaagaagaggcgacagaaaacaggcgagaagaacagacggcccaggcggagagacaaaccggaagagcgagcgggacgcggaggaagggggacgcggcgaaggggacaagagacccgcggcgaggacggcgagggcggcgaaacggagagaccggcgcgagggggcaaaccgcagggggggcggcaaggcccagggccagacggcccgagc

SEQ ID NO: 129761 - DNA, 657 bp, Arabidopsis thaliana columbia
  unsure (1)..(657): unsure at all n locations
ctacggttnnnnnnnnnnnnnnnnnnnnnnnnnnnnnnnnnnnnnnnnnnnnnnnnnnnnnnnnnnnnnnnnnnnnnntcggccgcaaaaaaaaaaaaaacttattcaattgatatgaatatcgaaactagtcagtagccaaaatataagttaattgatactaattaattactacctagctacaacaataaatttagtgagatcgacccagagtaaactcaagatttggcttgaaagggcttgttcccgagatgcttgatgagctcatctcttctgatgatattctctcataacttgagcactttccatctagttccttctcagaaggtagcataatttctgcaacattatcgattaacttcccatgcaaacgtgcttctccggaagaattggtccatagaccatttgatttctctagaggattcgtcaattcctcgctatctctcgattttctattcatatcgaacatccagtcgtctgagttattatctcctgatgatccattttcatagacatcagattgtcctgacgaagctgctgctttgtcggttgtcttcactgttctgtacatctgtaaatgggacttaacatgagccaaggttagatctttgacatccatgagctcaagaactgatttaggtgttgctctttcatggc

SEQ ID NO: 129762 - DNA, 872 bp, Arabidopsis thaliana columbia
ggagcccccaacgagacggcggagcaccaccagaaaaccaacgggagcgaccacggaaagaaaagtaaaccccaggggacgccaaaaaaacggaacaccaaaagagcaggggggggaaacaacccgcaaaaaaacacacagcgggaacacccccaacgcagaaaaggaacacaaacaaacgggaagaaacaccgaaacaaccgcacaaaggagaacgaaaagaacgaacagacgagaacaagaaggcaaaaacccacaaaagccacaaagagaaaaccggacgcgaggacaaacgagagaggaaacaacacgaacaggaggagaagaagaaaaccaccaagagaaagaggcaacaaggaggaacggacacaggaggggaaaggagaacaacacccaagaaaaggagaaagaaaagcacgaacggaccaagcgagacaaagcgggacaagagacgagcaggggaaacacaagcggaggggaacaaaaaggacaacaaacagaaaaacagaaaggagaaaaacaaagagaccagacacgcaggacagggcccacacgactcacaacgaccgaacgcgaaaacaacgaggaggcgcacgagggaccagaacaccagcaaaaccggaaagggagaacacgaggggaacagaaaaaacgaagcaccacaaacggggaaaaccgggggcaagaaccgaagcaggaaaagcccgaacaaggcggacacgaaaaaccacaagagaacggaagccagagacaagaagcgaacacagaaagcaagaacaagacgaacaaaaaggacaacaaaggaccacaacacgaaaaagcaggaagagaaacagcagcaggagaggggaagcccaaaggacaagaccacc

SEQ ID NO: 129763 - DNA, 497 bp, Arabidopsis thaliana columbia
cggcatgacccgccggcaagcgacccacagaagtattttcgcaacacaatcttgccgccgcgcagccaaacggcgccaagacggacccgagaggcgaacaaggggggggcgcgcgcacgacaacaagcacagaacggcgccgccccaacgaaaacgaaaaacgcccgccagcaaacgacaacgcccaagccacacagaggaaaaaaaaacccccgacaggacccgccatgaagaccgcgccgacggcgccaagagcgacccccacgaacccccaaccgaggacacacggccagagaaagcgcacacccaggacagcaggggtgccgagcccaacaagagcacaagcgcgagcacccgatacgacaccacgcatacacaaagaagacccaccggcggcacgacgaaacacgcaactaaggcgaggaggcgacacgagcaaggaaaagccccgacgaggggaccgccaacaagaaaacacggagcgcggcacagcgagg

SEQ ID NO: 129764 - DNA, 339 bp, Arabidopsis thaliana columbia
ggaaatgggcaaaaaacccccagaaaacaacaccggaccacgcacaattatcccttttcaccaccacaaaacaaccgaacaacggggaacacaggcaagcagaccaccggcaaaaagaaacacaaacaaaccccagcgagcaaaaacccgcagcacgaacaaccggcaaagacacaaccgccgccccagcgacgacccgcgaggccgcaacaagagcgcgggaccccccacaaaacgtgcagggagaaccccagaaaccgcacacacccgcggatgacccacgaccaaagcccaagtacacccgcaaagaacgaaggggacataaaacagagccccgcc

SEQ ID NO: 129765 - DNA, 948 bp, Arabidopsis thaliana columbia
  unsure (1)..(948): unsure at all n locations
ttggggataaaggggaaaccccgacgccccgaggcaggaaccaccaacgagcccgaccagcaaagaacggagaccgaggggcaaataaacgatttaacgccaacgaccatcccgaggaccaggacaacaccgcggggagggggggaccccaaagaaagccagcgtagagacagccagagcaaacacagaggagcaagggccgaagaagggcacggacaacgaggacagagaaacagccacccgcaaaccgagcgcgcacgaacaggaacacagacgacgccgaagcagccaccaacgacggaccaacaacacagcgcgacagacccgcccacgagccaaaacacacgagaccacacggaacggaccgcagacaaccagccgaaccccagcccgacacaagcaacggcggaacaggacagaagaagcccgcaaggccaaaacacgaaacgacgggcggacgcagcgagaccgacggaaaagagaccaggccaccgaagcagcgaaagacaccaagcgaaagcggaacggacacaaagccggcgcgagccacccgcacgccggaaccgagcggcagacgggcagccacaccacgccgacgatgacacagccgtagcagacccgacagcacagcgcatgacacgcaaaccgccaaccgacaacagacggcgacaggccaagaggggagccagaacatacacggcaacgcgagcgcaacccgcaaccgagaacaggcacgcgcaacgcaacagagacgaccaggcgcgaacacagagccacagcgcgcacaagagacgggcacggaaacgaccagacggagacacaagaagccaagcgccaacggcaggcccacaccaagcggacacgcncaccaagccacacacagcaagcaccacgcacgagaacagggagaggcgcaccacaaccgcaaaaggaagcgcacgcgcaaac

SEQ ID NO: 129766 - DNA, 287 bp, Arabidopsis thaliana columbia
  unsure (1)..(287): unsure at all n locations
aaagcaccacaacgaaaacgcggccgccaacaacaccacccacaaaacaaccagcatttaagccncgggacaagacacgagaggagccgacccaaagggncctcaaagcccaacaggacactctagcaagaaccctgaccaagacaccgaaaaggactgagcataaaccggcctcggcacagcaggaaacacttccaacatcataaaagccgcagcgacaccagcctaagctcctgcaaacgcaggcatcaaaggccaaggcgaacacctggctcgttttttttttt

SEQ ID NO: 129767 - DNA, 1132 bp, Arabidopsis thaliana columbia
ctagaggaacccccctttttttttttttttacacagccgccagaaaaagaacaccttttggattttgtttcactaaaatccttaatagacttcgtaaatacacccccccacatctactaaatataatctatctctgatactaatatacattcgacatttaacaccacatacctttgtcctctcatataaaattaaatttacattcaattattacagtgattctacactaataataaataagatctctcaataacctctcctatatattcaaaactcgctacaaccatcttcatgtcaaaagtaatccccttatctatgtgctatacaccacatacgcaacaactaggaccaatatcctatagtattcgtcacctcatatatcctctacttcataccgatgtatctcctctacacaacactctttccaatatattccacctcaataaatcccagacaacacccctcatacaagtatattctcatttacaatccaaccctattccacgaatcaaacctataacaccactatctcctaacataccaacttacgctctaagaatacctatcccaacccacatcgctctacctagcaacacttactacattccgcacctcaattcaaacactctaaattcattactcttctccactacctataacaaatacgcatttcaatcaatgaaacaatcctctcctatctagttacgtagccatctaaactccatctataacatcatcttaataactatcccctgataatatcaatttataatatcacaccccccattctaatccaagcggcccaccctccaattctttatactcacatcttccaccgatcatctatttgacatctacgtcatgtaacacatatcctggccacactcagaaatcgccccatagaatacatgctccggcctatccctctatttcctagtcaaattcaccccttacaatcacttatactcctactacccactcactttctctatttacaccttctaactctcctctatctttaactaactgcatacacccttccatcaaccacataccaacacaggtttaactatatttctcatctattcacacaaacccttacttcgattaaaaacttttacaaccatatccc

SEQ ID NO: 129768 - DNA, 881 bp, Arabidopsis thaliana columbia
  unsure (1)..(881): unsure at all n locations
aacccgaagcccagggggggggnggagaaccaaaagcaccccgagcccgcttttatcttttccgccgcccaacaaaaggcacacagggggggggggacaaaggcaaaaggcaaaaagccccccccaaaccacaacccagacacaaccgaaaagcgcctaccaaaaagaacaggacaaagggcacccagnggcaagccaggaaccagaccggacgacacaggacgagaacccacgcaacaacccaacccacgagaaagagaacgcagccaaacgcaccaactaccactagcatacgcaacccaccacgaacaaccccggtcacaccctaaccccaccccacatccacgcgcaccccaacataccggccaacaagcgcggcgccaaatcaccgggaccaccgaacgacaccatccaaacaaagcccgccacgacacaggaccacggcgccacacctagcgcacccaccggacacacgcacccacacaccacacataggtactcaccccgcgcaaaacgggaaaacaaacccgcaaaaatacacccccacacacgcaaacggcacagagagaacaaacaccccaccagggcaagggccccacacaggaaggccaccaaaaacaccaacggccgaacattggagaaacggaccgaaaccctcccacggccccaaatggaaggccaccacgggaaaggcaggccaacaacaaaagaggcggcccaccacacaccgggcaacggagacccaccagagcccccaacccaataccaagacccaccccccggaacaagacaccaaccacccaaagccaccccacgcaatcgcccgccacaaaaccgcagaccccgccgaaaaagcccaccaagcccgccacccacaaacc

SEQ ID NO: 129769 - DNA, 390 bp, Arabidopsis thaliana columbia
aaaacccccccccccgcggagtgggcgattccggttcttatgtaattcagatgcaactcccaccgcgcgcagctttttatttttttggcccgcgggcagaaattaaccacacaggcaagggtggggggtactgctctaggaacatataagcatccgccagcagctactagcatacgacgtggaagagctacgatggcagcacgataacatgccaacgagattcgcacaacatggtcaaggagctctccacatcgaacaagctaccctaatgacagagagacgaacccctcgccccaccgcacggaaggtgtcaaacgggcccagaggcaaatatactcacggtgacttccactcgccggtaaattccgcggaggatatgagttcgtctac

SEQ ID NO: 129770 - DNA, 611 bp, Arabidopsis thaliana columbia
  unsure (1)..(611): unsure at all n locations
caaccccgatttnggggttaaagagaacaccccgtagacgaaggcggagggaagacggaacagaaagcgcagcaggggaggagggcaggacaccgaaatatattttggagcacgaccggcgaaccacaacacaacgaccgggggggggcggaccacaacgcaaacgaacaccaaacggaaacaggcaggacagggtacgacgacgagcagagggagacaggccgcccgcacgcagacaacgacgggcgaccgcaacgaaacaaacgagcgagaggcagcaggaaaacggggaggggaaaaacggagggacacgaggagagacgggcggcgacggaacgaaccgaagagcgaaagcagaacagacgcaagcaaggagcagccaagaaaaagcggccagggaggaggacaaccgggagcggagaaaaagcgacgggacaggggcgcgacaggggggagggggcgcaagaccaggacgcgaaccgccggaacacagcgacaaaacgaggggagcgacgcgaggaaaagagcagaagaacggcaggaggcggggaggagaacggcgcgacgacagggcagcaaggcagaagagcgcaaccgcgaagagagctggc

SEQ ID NO: 129771 - DNA, 530 bp, Arabidopsis thaliana columbia
  unsure (1)..(530): unsure at all n locations
nnnnnnnnnnnnnnnnnnnnnnnnnnnnnnnnnnnnnnnnnnnnnnnnnnnnnnnnnnnnnnnnnnnctttttttttttttttttttttagaccaacccattgtattaaaaaagaaaaaaagcgtccctcttaaataaaaccataagtcataagaatccaaacgcacaaaactaatagctcaggttatttatctgatccacatttggaaaaaggaccttaacattacgcagacgcccatgtttacgaacgcctagcccacgagcgcttgctttttacacttctgggactattctccactcttgagagcccgagatccgtttttgatatcttgaccacgcacagagcttacccttgagaggcaagacttctctattgcccatgacttttataacttttgcttgactttgaagcacgatgctaaacaatccctaaaaccagtgtttcgggggctttatgatctactgccgctaaaacccttaaaaacggtttatcgttaggaaccctgttttgccccccctggaaaccgggc

SEQ ID NO: 129772 - DNA, 679 bp, Arabidopsis thaliana columbia
  unsure (1)..(679): unsure at all n locations
nnnnnnnnnnnnnnnnnnnnnnnnnnnnnnnnnnnnnnnnnnnnnnnnnnnnnnnnnnnnnnnnnnnnctttttttttttttttttttttagcttaaaacagagtaattaatatggtaaatcgagaaccatttaaattcgacgagtctgtcaaaatttctaacgcacgaatttttccattaagtataaaagttggagtcagaacgttataaagaatggtatcgggaacatgcctccctaggtttcaagcgcataaccgtcgagcaccagctctgtacattgcgggccttaaaaccgactctatgaaagccaaaaaggaggaagagacatgctgtccgccctactggtccgcacttatagccgaggacactctgtggcccatgggtgtaaccggtatggataggagctccagaagcagcccgcagaatgttggcacctgatgggttgaagaggtacttggatccctcattcgtgaggaaaagctgggccgcgtacaaatagagtttgttcttagcaggttcaccagacttggtgatagttttttatgggcgacatgtgacaatggggaaggaggcaagaacctcaggattggtaatggacccactaagcagcggaactaggtacgaaactgccctgccagagcacaagcgaggaggggcagggcccatagggtcacatta

SEQ ID NO: 129773 - DNA, 420 bp, Arabidopsis thaliana columbia
  unsure (1)..(420): unsure at all n locations
nnnnnnnnnnnnnnnnnnnnnnnnnnnnnnnnnnnnnnnnnnnnnnnnnnnnnnnnnnnnnnnnnnnnnncttttttttttttttttttgtaagaacaacccgctgtattaaaggagagaaaaagagtgcctctggaatttgagagttacggtacgcatgcacgtacccaaagttctacatggggttattaagcggcatccaaaatgggactatggacccaaaaaatgcgaggacccctctgtttacgaacgcctaacctcctggcggtggcttttcacacttctggccatacactcaactgttgcatgtctgtgaccagctacagtgtctctgtcccactctgggtctttcccttgggagtgctagactacctagaatggtcccatgtactttgcagagatataggcgttggggtttca

SEQ ID NO: 129774 - DNA, 417 bp, Arabidopsis thaliana columbia
cactctgtagagctatgacgtcgcatgcacgcgtacgtaagcttggatcctctagagcggccgccctttttttttttttttttttctgttattaagaaaaagagcctatcattctatacatagacaccgcactgttatggtgacaaaatcacatataattgaccataacaaccaatttgtttatgctaaacagaacatgccagtcatacattcacttacctatatacctaaattaacgggctgaaggcccagagactctcgggcgttgaccttgtttaacccactaaaaaggcacgtttgagggtctcttcctaaaagagtctcctttgttacgcgtggaacctatatggactatcgacatcgcataggatatgcacacatactatgagttagaatgctatttagtctcgaaaattc

SEQ ID NO: 129775 - DNA, 700 bp, Arabidopsis thaliana columbia
cggttttgaaagcctggaaaaacgttccactatagccgggtatgacggcgcatgctcgcgtacgtaagcttggatcctctagagcggccgcccttaattttttttttttttttttttgggatcgagtgagaaaaaggaataacaatttatagtggaatttaaaattgagctatatgacaaaaaatgggtacatatggaaattttaataattggcgagaagatcacgaaagtgtcatatgtgctattcggtgaagcagaacggaggattggagtctttaagacagagtgcttaacgaagacgtttagttacctaatgtgtcttcggtggcggttgacacactaacagtacaaccaggggagaacgtaatcttaagggggggggtcccgacgataaccccgctaggtttggtcccgaaggctatgatatgctggacaattcacacgaagaagatacttggcggggataaaaggggcaagctttcaactgattataacattagggggaaggagcaacaaaaagtaaccgtgatctgtgtgggggacatgaatagcgcacgataaaaggagcggatggggaacggagggtctggcaaataaaaggggggaccaaaaagtgcgactatcttatggggggccactggataccgggggggaggggaattggtatggttggggaaaagaggaatattgttggggtctg

SEQ ID NO: 129776 - DNA, 667 bp, Arabidopsis thaliana columbia
gagcgcggcgagaatacgacagtcacgaccgacgcagacgactaacggcggagaagacaccaatcaacacaagcgcggagacagacgacaacccaacgaaagaaagaccaaccctacataaacccaagaaagagggccaagagagtggaaacgcctggaaaaacctgtcggacagagacgtgcaatgccgcccaaagcacgcgaccgaaagcaaggaccctcaagcgcggccgaccagccaatttacgccatattagatgaaacgcagggccaaaacacaaacaccgcgcagaccacaaacgagaaccgaaagcgagaccacaaacaaagcaccaacagggaaagcacgaaaagacaacacgaaacgcaaaaaaaccggacggatacgactatacgaagagcaggaacgacgaaccaagcccgccaaaacaagagaaagagaacacgaaaacacatacgaagaaaaaaagcacacacagggaggcggcaccaaaacaaggaagcgctgacaacacatggggggaaaaagcgaaaccaaacacgcgggcgagacagacagcgaacaaaacaaaacgcagacagagaagacgtgcgatgaacggcacacagacgcgaagtacgcgatagtgctcgacggacaaaccatgcggcacgcccagggaacaac

SEQ ID NO: 129777 - DNA, 695 bp, Arabidopsis thaliana columbia
  unsure (1)..(695): unsure at all n locations
atttctnnnnnnnnnnnnnnnnnnnnnnnnnnnnnnnnnnnnnnnnnnnnnnnnnnnnnnnnnnnnnnnnnnnnnncttttttttttttttttttttaagaactttccggtctttggaaacaaattgttataagctattccggctatgagataaccggttcttacaaagacagttacacaccacgatcggtcttgcaagacatgatcatttgagatccccatgtcaaaaagactgaaggagaaaaaagggcaggtgtggttacacacgtagatatatgatatcttttataacggttgtacaaacacaggtcacaagttagacgcaacaaacaatgttcttgcaccaagcccaggcagtcatacccgggttttttgggatacctttagtttaccaagacaggttattctggggtgtcaacttctaagcaaccatgaaaacaagatctagacgatggttccagagcttctgtagaacatgtctcacaacacttggggacattcaatcctcagaacattatggggggggtgtttttggatgctcatcacactgtctaacgaggtcaaagcaccttttcctggtggggcgagatcacccttgtccccaccatcaagcggttgcgcgaaccatggatctctttgcctaagattgtcccatgacctgtgtggatcttatggtcctatttcaacggcatttt

SEQ ID NO: 129778 - DNA, 526 bp, Arabidopsis thaliana columbia
  unsure (1)..(526): unsure at all n locations
gtgcacactatagtacgtatctatgtacgctcgtcatgtctacgcgctaccgtacagactatgagcatcctccttagtagtcgcgcacgcgaccttcttcttctttcttttctttctttcttacagcatctagacatcactctgacattcaataactaagtaaacacaatgtctttccgtctatattcataactacaaatcaccatcaacgcttagtcactacatctcacgaccgtcatcacaagctttacatcacgccgttagctctacacatataatcctcgtatctcaccagatctttctaaagatcgtgacttctttatatacttgagcngctaggagcggatctcagtggctattaccgacactcgctctcatcatccgtatgtatgacgcgtctgcctattatctaccacctcacctggcgacctatatttatctgatctcgtctagaacatgcctatgaacatactgccttgtctatgatgactactctgacgctaccaactaatagtcttctactcca

SEQ ID NO: 129779 - DNA, 718 bp, Arabidopsis thaliana columbia
gattctttgaactctagtagagctatgacgtcgcatgcacgcgtacgtaagcttggatcctctagagcggccgcccttttttttttttttttttgaaatgaatatcttgtttaatacatgtccgaaaaatattacatttgcaattttagagataaattacacatgtacgtaggccaagttttacatcttggaaatatacattataaaaagggggctaattgcccatataaattaaggcgcttttcatagtgaaaaaaaaaaatttttgtttgtgaattatcaaatttcagaccataaactggttttggtcatttttataataaaataaattaatgaaaatcacgcttgatttttttaatggggctgttgaaatatagaaccttgaattttttcgagtgataagcactccgtttttggaacgagcaaccatatataaagcaacgttgcttcaccgtttcccgcgaattttaaaatcgttccttgagtcctcaatttaaacagaaagttttaagcgtttgcaattattgaactatttgaaaaccatactatctttactttactttatgcgggttcttttatgatttatcggaaatttttttccgctttttttttccccaggggttttacgcctcccaaagtccgtattgggctttaagggttgccaaattaggccactgtattttctcggccctttatatacacggtataaattagttgg

SEQ ID NO: 129780 - DNA, 314 bp, Arabidopsis thaliana columbia
  unsure (1)..(314): unsure at all n locations
ggcccccggaggggagggagggaggcgcccgacagggagagtgcggactgacggcgacgatttacaacgagtttttgagngcacaccgcgccgaacggggaggaggggggccgaaggggggcgccaaacaaggacgcgccccaccacacccacgcaaccgagccggtgccaggaacaaaccaacaaccgaccaaccgcggcgaggccaaaagggccggggccacaacaggatcgcgccaacagcaggccgccgggaaagaaagcagaggggcgagacacccaccagccgcgaaaagccaggtgacggaaaaaca

SEQ ID NO: 129781 - DNA, 371 bp, Arabidopsis thaliana columbia
aaaatggaccccaaaagccgcccaaaggacaaaccggaggccggcccacacacaaaaacgccacggcgcatttaaccaggatgatgccccgcccaacaaccaagggaaacaaccggggccggcacagggaaacacaccgggggagggaccaggaccgagaccgagaaccaagaacagagaggccacaccacggaggggcgagaaaaacaagggacggagcggacgcgcagcaaaccacgggcagcacgccaggacgcacacacagccgggcagaggcagcacccacaaaccgggagagaggacgccgagcacgccaaccgcgacaggcgccggaaacacgagggagacagccccacacaacaacaagcaca

SEQ ID NO: 129782 - DNA, 668 bp, Arabidopsis thaliana columbia
acactaccgggagctgattctggagctcgaccgcggtggcggctcgctctataactcaggctcccccgggctgcatgaattcttggccgccaacatgtgtaactttctggtctcgatgcagatctcctggtacaagacgacttgtatcgactatacctcccataactatggatctaccgtgtcgatctaagattctaagctccaatactggcctttacgagccgacgtcctactgggtatagtacaaaatatcgcttgctgatgcatcggttcatttacgattctcattgtactggacaggtcggattcatacgctaagagcataagcttggtgaacccgtacctcttaggacatgtcatgattgtgacaactcttgaagaatctctgaatctggtgccaaacgattcatcatggacctgatcacaacctgcagaagggcaagcttggcttgttatcagtgtatggatcagatcacttgctgcactgagtatgacatacaataaccatcttgcatggcactcaacaacactgacgctctcatcatcacataggctcttagcgcttagctcaggctccggaataggcatttgcgtgctagatgagtcgagcctatatctggtagactatgatataccactggctcgagacagacttagatctgcatggg

SEQ ID NO: 129783 - DNA, 620 bp, Arabidopsis thaliana columbia
gaaaggttaagacccattgactgactgaaaggggacggacagtttttcttttttagaccgagctgattaaacaacctactggggctgtgaaacaagctatggaggtctgggtgaaattgggtaataggtcatgatgggaaaaagaaagctacattataaatcataataccatagctgataactgagaaggaaatattagaaacagaatattttccaatattggatggaaaaatataatgagaaccagaagtcaagaagctgctaaagcctgtaagatataagtgtgtaaaagttatggtgcacagcagcttgttaccgatgcacaaaagacagtgaattataaatatattgtttcatttctatacgagtgtgagtttaattaaagtgtaaggagcttaaggaatgtcacgtataattaaggaatagtataatgagatgtcgcgatcatcgtatcatatggcaataatacgcgatgttgtatatattctgagcatatgaaaaatcgttgatttaccactttataatcgtcgagtaggtccatgtagcggaagatggtagtaagatttaatgcatggatgatatgagcgataaatggattttgataagacggtgtacgtatc

SEQ ID NO: 129784 - DNA, 237 bp, Arabidopsis thaliana columbia
  unsure (1)..(237): unsure at all n locations
ggaaaaaaaacccccgccacaccccgancgacacaagacattgacacactaaaacacccgcattatgattttttaccccccccaccacacaaaaccaaccacaccgaggggggcggggtccacacacaaccaaacacagcgcctccccgccccaccaacaacaaggcgaaacaaccactcaacaccggcgcatacaacccacccgacactacacatgcgcagcccgactactaaacg

SEQ ID NO: 129785 - DNA, 618 bp, Arabidopsis thaliana columbia
  unsure (1)..(618): unsure at all n locations
nnnnnnnnnnnnnnnnnnnnnnnnnnnnnnnnnnnnnnnnnnnnnnnnnnnnnnnnnnnnnnnnnnnnnnnnnnnnnnnnnnnnnnncggccgcatttatttcaatcattttatcccgcacattatacaggttcttatctagtctattatatataaatgaaaacaatttaataaatatataggatgatggtgatggtggttgtgatgatggtggtggctgtgaaaatgccatgtggttagcgaaacggtcctcagaatcaataccgatgaagcgagtgagagtcacactggctcggtcatgaccaggggacacattggaacaccgcaactgacagcgactaatcaacattgcatcacagaactgctcatcaagatcctcgttaaccaagatcttgcatgatcgtgtgcaggcagctctcgcctcgtggctctactttaacctcctttgtctgctgtcattacgatgtaatctaactcactgcacacccatatgtaattataaggatcggagtgtcaaaaacccagtggaagccaagtggtcctcaactaggaccaccaggacctttctcatttaacgtaacaaggggtgttcttaggatatctgggtatcctaaaacg

SEQ ID NO: 129786 - DNA, 914 bp, Arabidopsis thaliana columbia
agcgacgggcccggccgccaccaacaacaacaaaaccacaccaagcgggggaagggggtgggaccacccaccgagggcaaggaaccgcaccagcacggaggacaccgcccacgcaccaatgggccacacaacatacccacaagcggagcggcgagaaagggcccaagcacacgcaccatctggcagacagcggcaggggaacaactggaacccgcaacaccaaagacagaccccacaccggacccgaaaagaaaaacgaaccgacccagaacggacaaaccggaggaaaccaagacaaaaaccaaacgagccagcccagccacggccacaaaacaagacgggcaacccaggcgaccaaagaaaaggccagaaagcatcacacccgaaacacaccaagcagccgccggcaacggaacggcacacccaaaaccaccagcgggaaccaggaccacccggggagcaaacaccagagggacagcacagcggaagaaacggcaccccgaccaagacacgaaaaccccgaaacccgaggaaacaccaaggcggagacaccacagcggaccgacaggggcgacacaacaccccccaccaccaggaggaaagggcaggataccgaggccaccgtgcaggggcaacccagagccaaagcaccacaaaccagggcggaggaaacccaccggcccccgcgcaacaagaaccccacacaaaaaaagaagggggaacaccaccggggagccaccacgaaagcacgcacagacacagcgccggggggaagggccaacacgccgaagacgacaagaccaagcacaacacacaaggacaacaaaaccggcacaggagcacaacagaaccaaacagcacgcagcggggaagaacaaacaggggcgaagcgacaaacaacaaagaggacgacg

SEQ ID NO: 129787 - DNA, 417 bp, Arabidopsis thaliana columbia
acattttttggagccccaccccggtggcggccgctctagaactagtggatcccccggcctgctttttttttctgccgctcctcttgcaacacccactgtgaaggtggcttactgatgacacaatactggacactgttacacctctgcacacatttcatcactgggctacatccctaatggacacccctgctgagacgcttcttatcaaacgcttcagcatccgaaatgcacttccattaaaatgctagctacccacgtcactgatgagatactggccacaggaacctatcggcaatactccgtatcatctatccatgcttccattaactgcgtcgacaatttgggtcctctaactctatagcttctaccctgtgccaatccttgggtcactatgaaaatacctacttttcagtcatc

SEQ ID NO: 129788 - DNA, 738 bp, Arabidopsis thaliana columbia
ttaaagtttaaggaacccacgcccgaccgtgccgcataccactgtagatcccccggcccgctttttatttttttttcgccaccacacatacctcggccaaactggaagggtctggcactaaacccactggcgacacttttcatcttcactgcatctcccagaccacactatgtggaaatgacactctgtcctggaccctgtactaaccacaaaaacataaggaccctttaaacacactcaactacaaaatgcctaacctataagagaccaggagacttgtgttgttcctcacttccgagtttacatacaaaacaaaacatatgctcaaccacccaactgcacatttgctcatcccgggatctacttaccatgagcgtccttcttggagtacaggactcaacatcattcgcacgtgatccatgttagacaaccaccgtcagggagctcttgtctatataacccgtgaagctcctcaagagtgggcccgagtgatactttcaaagaaccaggcctgggtcaaagtccggcttcccacactcttctcacgataggccgggtttggaactaccttaaaagccgtaaaaacaaaacccctaaaacgccatttctgcaaaaacacattttcgtccccccgcccccaatggatcttaccgcaaaccaatatgcccctcccagtggtcttctagggggcataaacgggagaaccccctcaacaatttcaaacagggggtaacacaa

SEQ ID NO: 129789 - DNA, 654 bp, Arabidopsis thaliana columbia
atcctgggtacaagggctgaagctgaacctggtggcggccgctctagaactagaggatcccccgggctgcatgaattcgcggccgcgagtttttaagtttgaaattgtataaagaaagaaaataagaaaactgactgtacatattaattttttttaaaagaaaaaaaaaaggtaggaaatgaaaaaaaagagagaactagacaaatttgttgatcaattctctaacttcttcgatgacaagccatcctttgtgacctccaatcacctcctctttcatctcatcttccttccataactgcattcaccactcatttttctcattattatgttaatttactttttcactattactttattgtcaaatgcgtatcaagaaactcaaaatactgatgttgtattagatgaaagtaagcatacctgaatagtaggcattttctgcataacacacgaatatggaagtaattggttcagatttggcacataccacatcagaaaagaaggacaaaattatgtttaagcattttaccgaaatgtttccacgtttcaccaaggtttgagggaccttgtttacatccacatagtaaaactttgctctgttgtaagaaaaatcatttttgttcacaatataatcaacctttgcaataacatccatga

SEQ ID NO: 129790 - DNA, 479 bp, Arabidopsis thaliana columbia
aaaaaaccccattaaagttaaaaaagccggacccgaggggggaggcggcacaacctataagaaccggagggcccgcagtgtaacttttaaagccgcggaaaaaaacaaaagccaaaacaagggaggggggaagacaaacaggcagccgctcccaccacgagaaagaacaacgccaagaaaaacagaggacaagaggcaagcagcagcgacgaagacaagaaaagagaaaggcctaatcacagcgacaaaacaccaaaaaaaccaaccgccgagaactagctagcaccaagctagggaaaacaacaagggcaactcgaaggaacagcaactctcaaccagggaagccggaagtgaagcaaagaccaaaaactggcggcgaggcaagacgaggaaaagcaggaacaaaacgaccccacgaaaaaggaaagcgctgacaaaacccctgacgaaaagaacgtatcaccaaagcccaagaagac

SEQ ID NO: 129791 - DNA, 657 bp, Arabidopsis thaliana columbia
tacaaattctggaactccaccccggaggcggaggctgtagaactagtggatcccccgggctgttttattatgttgccgcggacaaaagatcaccaccgtgaggtttgctagtttcgggacacctgaagggacttgtggtagttaccgaaaaggaagctgacacgcccatcactcctatgacactatcgacaaacgaaatgttgggcagaactggtgttctgtaactgtagcaccggagatgtttggaggagatccgtgtccaaatgtgatgaacaaactcgcggtggaagccgtttgagcttaaatgaaagcagacgcaacagcaatcaaaagactgtaaaggtggcttcttactcattcttacaggttactgatggggttaggatgtacaatgaacacaaacataacacattgtagctctgtatctccttattttatcacggtggaagttgtacaaagggacgcacaacgccggtcaacaatttgcagagttgtgatttatatgtaaataagcttgggaagggtttgttattgtaacccaagaaagaagatgagaaagataaatactcaccattgtagactgggagaaaacctacagtcccaatgtggtacgaatcctctcttggttacgggaggcaacaaacttggggaattcag

SEQ ID NO: 129792 - DNA, 803 bp, Arabidopsis thaliana columbia
gggcccgccgcggccgccaaaaagaatgacaaccacaagggagggggggggcccacacaagacgaaacaacccacacgaacccccaacgaaaaacaaagggaggacacagaaaaacggggcaaacggagataaaagaaacagacaagcacaagcggacacaaaaacacgagaggcggcaccagaccaagaggcacgggaaacaccaccagactcgaccgagacacaagaaacgcagggaggactccaggaaacaagagaaaacccgaccgcaaggcaccaggagaaggagagacacaaccgagggccacaggcccacaaggaaccgcaagggggggaaccacaaggacagcgggaggaaccgaaccgacgagaaaacggcgcagggacgacggacagagcagaagacgaagcagcccagagcagagagacaacaagaacaaaagaagaggacagggcccgaacaggaagaggcagagacacagacaaacgcagacaacgacgaagaccaacaaccaggggcggaacccacaacgccacgcaacgagaagggagaaggaacacaagcaaaagagagaaacaccgggaacgaacaccgagcggcacgagaacaaagaaaaggaccccaacggaacgaaccggaaacgaccacggacgacaccagcgagcagcagacccccaacagcaaaggaacgcagggaaaccgccaaagataggcagacgggaggaagacccgacctcgagagcgaagagtacggcgcaacagaagcagagcgacacaaggacacgcgaaagccacaacgaa

SEQ ID NO: 129793 - DNA, 681 bp, Arabidopsis thaliana columbia
  unsure (1)..(681): unsure at all n locations
aaaacncanttttaagattaggaaaacaggcgctccaccgtggtggcggtcgatctagaactagtgccggcctccttttttattatttcgctaccaccagagacagcttcttgtatgttggtctggatttgcatttatgacagaccattcaacacatggacattacaacttggaccattgccaccttgcacaggccgaagacttttacgcaagcctaaaactggtaagtacccaaaaatcagagctactccaaggaacaagatggatcactaccaaatccttaagtacccactcaccatcataaagcgtcacaaccacactgattgacaaccatccactcctttgaatttgtcaacatagcactagaaatctaacgacgacatgatgccatttacaaaatcttcattgataatcccctatatacatctcaccaaattgcgtcactgcgtcattcaacctgtacatagtgggttacccggatgataagtaggattcataatgatcttcacagaggagacatcatataagcgaatttatcatcgctgatatgaagactaaggtggctttagcttctggactgctaacctttgctttttaaaacattacgtaattactaatcataggctccgtaatcctttggtttagatcctgtcctccctcggctaaactgggttaaaagct

SEQ ID NO: 129794 - DNA, 354 bp, Arabidopsis thaliana columbia
gcatgcaaagcgtagtttgacaaccgaggcgcaaacaagaccggagttaatttggcagaacaaaaacgggaataaaaccgccaaacggaaacccaagcccagcaaaaagacacggacgaatactacacccacgcggcaaaaagaacacgcacgacaaaaaggcaacgatcagaacacaacacgagacaaaccaacacggccacaacaacaaacataagaaaacaaaaaaagcgcccaacgcacgcatcaccattaccaaggacaccccaactcaaagaacagcaccgaaccaacccacaaacagccaaacagaacaaaatcgcccctcccgaaccgagcgaacccaaagaacac

SEQ ID NO: 129795 - DNA, 856 bp, Arabidopsis thaliana columbia
cgcccccgagggaggcggccgagaaacagaagcagagggacccggattagaatttaagcggggcgccaagacaaaaggggggagggacaaaaaaacagagccacgcaacgagaagaacgaggaaacacgaaggaaccaggaacaagcgccaacaaaacgcgcaaacaacgaaaccaaaagaaagcagcgcacgaaccaacgaccaaaagacgccaacaaaagcaccaccaagagacaaaaaaagcgacgacgcagaagagacaccaaaacagaaccccaccacgacggaaacaacggacagagagaaggcacacgggaaaacaagaaagccaagaccccaaacgaggagcgacagacaacacgacacgcacagaggacacgacgcaccaagagacgacacaacggcacgaggcgacgggcagaaccgaaccacacacagacacacgacaggccacgagggaggacacgaacagagacgaccggggcagaaaaggcggagccgcgcacccggaagaacgaacaaacaacagcaagagagcagaggacagagcacaggacgggcccacacaagaggaaacgcgagaaacaaggacacgaacaaaagaaacaaggaaagcccaccagcacagagcacaaaccacgacgaacgcagcaccgcgcgaccgaagcccacgaacggacaagccgcaagagaccgacaagcgacacaacaccggcgcagacgcgaaccacggactaacacccacccgcagggcgacaacaccacaagcagacgaagacgaaaaccaaaaccagacaacgcaccgcaaggaggcacccagacgggagaacgaccacagccacacacggaaggacg

SEQ ID NO: 129796 - DNA, 1062 bp, Arabidopsis thaliana columbia
cccgttaaggaatagggaaacccggaccccccgcggcggaacgcaacccacaacccgcgaccaacccacggcggccagcactttaccttataagcccgcgcgacaccacaaaaaaacaaccacaaagggccacggggaacaccaaagcgacacaccgggccccccgaaacaccacccaacggcccgaacggccaaaaaggaacacaacccacaaccacgaacccagcgagcacaaacaacaccagcaaacaaaggaccccgacaacacccaacggacaccggaccgccccccgacaaccaacccccacacacaaggaccagcaacggacaccccgcaaaaccgacagaagacgagccaccaaccccacgacaacaacccacccaaaacagcagaaccaccacacacacacgacccgcgccagcactcaacagagaaaccaaaacccccacgaacaaaaaacccaacaccacaacacacagaccggcccaccccaccagcacgcacacacccaccgcaacaccaacgcaaacaccagaacgcacgcgcaacacaccccagccacagcagacacacaacacgcggcaccacgcggcaacacacaagcgcaaccggcacgccccccaaaaacagcaacccccccgaaccatcccgcagaaagggcagacacccgcaacaaacaccacccgaagggaacacaaacggaccaccgggaacgccaacacaggcgcgagagaccagacgccagcaacagagacgcgataaccgcataaaccgcagccgaaccaacacaacagaaccgcgaaagccaaaacacccaccacaaccaaacaagccgaggggcaagcaaacaagcatccacgcgcggaagagaccaacaccaacaagccaagcagaacccagcgcacgcacacacgccaaaccacaacacaaaccagagcacaaccacgggccccccggcgaaaacaaggggccaccgaaaacaaacgacaacgaccgagacccaccacgcgacgcacacccgaggcaaaccaccacagggcgcggagacccaggccacaaca

SEQ ID NO: 129797 - DNA, 648 bp, Arabidopsis thaliana columbia
  unsure (1)..(648): unsure at all n locations
acaatttctgaagccccaccccggcggcggccgctctaaaactagaggatcccccgggctgcttttattttttgncgctacccaccttacacatacaccacatggtcttgagaagtttttaacttaaaatactcattcccacactaacaccatacaaactatatctacatacccaattcatatcaaaacacatacaatccagagaaactgaacaatgcatcatcgtaagaaaaaaaggatcaatcaacaccacccaatgtggtaatcacatatataatcgatgccacttatccttttaataagactccaacctctgctctggcacttctccatcgccctcggagcgagaccaatggaatccgatcctttcatgacacgaacacgcttgcatgtacctacgaacattggccaatgaacgtcccctaccagcatcccactcaccgtctttgacttcataagagggaacacattcccaacatttcaccaaatccatctatatcctctaattcatgaagcctatcatttcttcatctcctccatgtttgcccatggcaaaagagctaaacattttggacaaagcattttaaaagctcatcgcagccttatctacattccccaaaatctatcttccctcacaaacgtgcggct

SEQ ID NO: 129798 - DNA, 583 bp, Arabidopsis thaliana columbia
actcgtgcccgtgcagggtccggaccggaattcccgggtcgacccacgcgtccggaactttcgtggatgtttcgtgcatgcgtctgttggggatcgaggacaaccgccagctggtggccaacctgtacgactattgggggcataacgggcatgagctggacgtggacccggatggcatcaccggcctgcacctggtcggcagccacccctactatgcggtgatcctggactggatgctgccgcgcatggagggaccggaagtgctgcgccggctgcgtgccgagcacgcgtcggaggtgccggtgatcatgttgaccgcgcgcgatgaactgccggacaagatcgccggtttccgcgccggtgccgacgactacctgaccaagccgttcgccctgcccgagctggaggtgcaggtggaaacgctgctgctgcgtgcgcaaggccggaaccccgcgcaagcgccctgcaaggtgggcgaatctgggtgccttgatcttggcgaacgcctggaaggccccacccgtgagggggccaaggggggctgggaacccttggtaaccccggggccctgtgcccggaaaaa

SEQ ID NO: 129799 - DNA, 840 bp, Arabidopsis thaliana columbia
  unsure (1)..(840): unsure at all n locations
tcatgctctatagatcgcctgtacggtctgtacttgcaacggatgagttcggcacgcgtggctataagacctttaatctcaacagatcggttcgatagcatgacggtctcgacagtgactaggcgtaaacctcgatagtgtgtcgcttatcccccgcctcctgtgaaagaaagtcgctnnnnaagctggtacgcctgcaggtaccgggccggaattcccgggtcgacccacgcgtccgcgcagatatgccgtgctgtatagagctaaatctggatcgtccttagcggcttcttcacatgcaagagactgtgaattgggcaagtagaggcatcaatagtggattacgatgagacaaatctggtgcatacggatgtgtgagcgttggattgaattgagattagggtgtataaaacgtagaatggaatgttcttagctgacatgtggcatgagaaagatgaaaacggtggcatcataggtggcctggggtggagtgatgaaagactgatgctcaataaaaaaaagattttgcggggtttggagaggaggtcggcggagttttattttttccgggaactcttattgcactgggtgtgacgtgtgggctctgatctatctgtgtccatggtggttcacatgccagatgaataccagaaggaaaaattcccttaagagccgataatcaatccagcctgtaagcagtatggagagaagggctgaaaacaaaattctttggcccaacagacgtcggagaaggttaaatcgagggaacttcagtaatgccatatttaaaaatggaaaggcctttaaaattaggcgattaagtatagggggaaacagtaa

SEQ ID NO: 129800 - DNA, 788 bp, Arabidopsis thaliana columbia
  unsure (1)..(788): unsure at all n locations
atcgaaccaacaaagagtagctactctttcgaatatgtgtatcctcatctttaatcaaacgcgtaggccgactcagacgaaggataattccggtcgtcaaccagagtgtttatttacccctccctctatttatcccaaatcgctatatnncagctggtacgcctgcagggaccggtccggaattcccgggtcgacccacgcgtccgcttaatcatatctcacaaatcttcaacacttaatcacaaatctcaaagcttcggataccaaatggctcgtaccaagcaaaccgcaaggaaatccaccggaggaaaagccccaaggaaacaactcgcaacaaaggcggcgaggaaatcagctccggcgaccggaggagtaaagaagccacacagattccgtcctggaactgttgccctaagagaaatcaggaagtatcagaagagcactgagcttctgatccgcaagcttccgttccagcgtttggttcgtgagatcgctcaggatttcaaaacagatctgcgtttccagagcagcgccgtcgcagcacttcaggaagcggctgaagcatacctcgttggattgtttgaagacaccaatccttgcgcgattcatgctaagagaggcactatcatgcctaaggatattcaaatggcgaggagaattacaggcgagagggcttaagaaggagaatggagtactttagactgggatcgttatgcttatgtatatctttcggttttccctaatttcgggttttagggtggaatacgtttgcggttatggtgttcgat

SEQ ID NO: 129801 - DNA, 486 bp, Arabidopsis thaliana columbia
caaagctggagctccaccgtggtggcggccgctttataactagtggatcccccgggctgcattaattcgcggccgcaaaaagcgttccggatatgagttgtacagattccatcacatcatagaacataatacattacatagcgtccatttagggaatggtacatgaacgtctaaaactgccttaacccggtgttttgcataccagcagcgatccccttcatggtgaggattacctatatcttctagtcccggggcgtattcactctttggatccagtatcaccagctcagccggtggactagaccccatgtccttccttccagagatgcgtgcccgaccttagactttgaaaattgtggtccctggatctgctttgagacgatataggcctctgtcctcaccggtttaaatggttcttttatctttaatggggctttccacccaagagtcttactcatgcctcctatttgttccctttcaacataa

SEQ ID NO: 129802 - DNA, 616 bp, Arabidopsis thaliana columbia
  unsure (1)..(616): unsure at all n locations
aaaaaccccagctccaccggggtggcggccgctatataactagtggatcccccgggttgttttaattcccggccgcactaaaggtccaacgcttactacatgccataacttagtattgtaggtaaatgagatactagtggagaatgttggagaatcaaagtttagttactatcggaatcgtttcctgagtccacattcatcggctgagggttcttgtaatcactgatctcatccttgtatcgctgcttgtcgacttgagccttggcttcatatggctctttatcatcagcagacatttgacgccacttatcttcaagcacctttcccacctctccaaatgctattcctgggtgttccttctttatgttatctctttccatttgggaaaagaacatgaaaccagaccattgctctttttggtgcgttgggatccttcttcttcttcgggttcttccttttactactgcctttcgctgcggctacagtttttcttttaggaggcaattcttttcgatgacgaagcactctttctttagggttcctttctgtgattagagtttgcatctttttaattgtcttacctacaacaccgncttttcacctttggccattcaag

SEQ ID NO: 129803 - DNA, 550 bp, Arabidopsis thaliana columbia
actggagctccaccgtggtggcggccgtctaaacttggatcccccgtttttttttttcccggccgcaaaaagcgtacgggataggagttggagatatttcatcacatcatagaacatagaacattctatattgatattttatggaatggtacaagaacgttttaaactggcttaaccggtgttttgcataccagcagcgataccctacatggggaggataacggtctcttcaagtcccggtgcgtattcactctttggtatcaacatcgggagctcagccgctggactagactccatgtactccttaaagagatgtggccatattttgacattttaacttggaccccgattacgttttcgtgattgggctttacacactttcaaatgtcctgatgttatggggcaaccaagcttctagccctctgcattaaggtgatggggccccttttttaaaaagggtcttttggggacctttgccaacccttggaaaggtatgaagtggcgggtttcgggttattttatatggggatgattttgaaacatctctgcg

SEQ ID NO: 129804 - DNA, 931 bp, Arabidopsis thaliana columbia
  unsure (1)..(931): unsure at all n locations
ggaggtgagcgagccggctctataaactaagtggatcgccccgggtctttttgtgtaattcccggtccagcattgcttccaatcagatgaatgggtgtcagattattcataatgctctcatttagcttagaggattccatatagacttccttcattctataagccattcgaaaccatacacatgggtgtaaccctgggcaaaggtttggacactctcttacttgggtacaacatctcccacataatggctacaaaaatttgcgtccaacaccgagtagcgaaaagttattaaatgaggtcgactcattgtacaaacttaaccaaacggtatttccgacattttggggaaaaaaaaattcactctggtggagcaaccatgtatggccacagtctactctctgtgtataaccgaaatactacaaacgcttaaccacctaaagaaattaggggagagtggacacataaacagtgcaattatatggcccgcagcattaatctcctgggagtgtctaacactatacagggtgtcacacatactggtgcgctccatgacatatgatagacgcctctacttgatacctattgagacatgtgtgtggctttcctcaatacatatgtgggagttgtttgctacagagagtgacaccgctccntgttggaaatcggacaacaattggaatctccgtatatatcaagcggctattcagtatcctcggcgcttattttccaaaactgttcaaaccggcgggtgcggggtaataacttacgtaatcccatgccacattttggctactctacatggtgatggtgcgtcctttgagcgggaaccctaatcaaagactaagagccttcaatggaaatgggagatccccttgtgacttactcgtacttgcccccccggaactcaggggggaaactcttataaacgacc

SEQ ID NO: 129805 - DNA, 603 bp, Arabidopsis thaliana columbia
acaaaagcggagctccaccgcggaggcggccgctctagaactagtggatcccccgggcttttttaattcgcggccgcctatcatcaccatggatccttgcaagtatcgaccttcaagcgcgtacaacgccccattctacaccacaaacggtggtgctccagtctccaacaacatctattccctcaccatcggataaataggtccggcttttcttgaggattattatccgatcgagaaggacgctaatttccacagagagaggatccctgagaaagtggcttatgctagaggaatcaatgctaacggtttctatgaagtcactccatgacattttcaaaacctcacttgtggctgatttgtctcaaaagcccctgaagttcaaacctcccggttatcgtcccgtttgttccaccgttggtccaacgaccggtaccagtgctcttaaatccccatgactggaatttttccgtggtttatggattgtcaatggttgttcacccctaagtaggggaacacctttcggatctttggttgtggaaagcaaacactctcccggtaggtttctttctattacactggctatggggagattaccaagtgttc

SEQ ID NO: 129806 - DNA, 704 bp, Arabidopsis thaliana columbia
  unsure (1)..(704): unsure at all n locations
nnnnnnnnnnnnnnnnnnnnnnnnnnnnnnnnnnnnnnnnnnnnnnnnnnnnnnnnnnnnnnnnnnnnnnncggccgcattccgtgaatgagaaatgtattacacatcttcaaaataaagatatagaagagaatgtgtctatatcaaattatatgcatataacaaaaaaagggcatacccgagcaagggaaggcactctcacactgggacaaatttcacaacaagctctcaatttggtccaaaccagaaaaaaataaaaatgaatgatgagtgacaagtaaggcaagaacaaacagagaacgaaaaatcgtggaacccgtgttgcctggatgaataatgtaacctgagtacttttatcgactgatattacatatgccagagtagagaaaaagcacaggcgaacgtattcttgattacaccaatgaagtcaagtgcatcatgtttggcttgatcttaaccggatccaccaccataagaatgtagagggttggaaccaccttgaacccattatccgaattggcagttattgccaagccatgttatggggcttaaggtacccatccccctggggttttttgggggggttgcatttcgagaattagcccctttgggcccattgattccttcccccattggtttccaatgggttccattggtttccaatggcccagagggttccccctatttctccccagtatcaccca

SEQ ID NO: 129807 - DNA, 345 bp, Arabidopsis thaliana columbia
gctggtacgcctgcaggtaccggtccggaattcccgggtcgacccacgcgtccgaccattcttatcaggagtctaaaagaacagatctcatggcctagggtaccttacccacgggtcaagtacccagcatttcaccgcccttatggtcgccaacatattatcataaggactccgtcacaatccaaactgatgacttcacaatatacatggtcacagttaggtaatatttcaaaaactttatggacaaggccgcatctcctgctcctagaattggggcgcccgccaacaccttcaaaatagaatttctctagagaggatgggcagggtcgccagcttcaaggacag

SEQ ID NO: 129808 - DNA, 495 bp, Arabidopsis thaliana columbia
ttttttatattctgcgggcctgctctaatcatacacacataggatgtcttaccatgtattcgtccttcaagcgcgtacaacgccccattctacaccacaaacggtggtgctccagtctacaaccacattttttccctcaccatcggagaaagaggtccccgtctttttgaggattatcatttgatcgaaaaggttgctaatttcaccagagagaggatccctgagagagtggttcatgctagaagaaatcactgctaagggtttctttgaagtcacccatgacatttcaaacctcacttggggcgatttttttaaaagcccctgggggttcaaaacttccggttttttgggcccgtttttttcccaaccgttttgttccaaccctaaaccgtttgccctaggttccccttgaataacaccactggcatcgggcgacttatttttccagtggaaggctatcgttctgctatccgctcgctacagaatagtacttgt

SEQ ID NO: 129809 - DNA, 665 bp, Arabidopsis thaliana columbia
  unsure (1)..(665): unsure at all n locations
ccgctctatacgactcctatannaaagctggtacgcctgcaggtaccggtccggaattcccgggtcgacccacgcgtccggtgacaggcgatagatacttgaaaccatccatcattcctgatccggaagtgacggctgtgaagagagtaaaagaagatgattgtctgattttggcgagtgacggggtttgggatgtaatgacggatgaagaagcgtgtgagatggcaaggaagcggattctcttgtggcacaagaaaaacgcggtggctggggatgcatcgttgctcgcggatgagcggagaaaggaagggaaagatcctgcggcgatgtccgcggctgagtatttgtcaaagctggcgatacagagaggaagcaaagacaacataagtgtggtggtggttgatttgaagcctcggaggaaactcaagagcaaacccttgaactgaggcagagagggtcctttttcttaatttttaaaatgaatatgggtctctccaagaaaaagtatttactattattaatttgtgcttatttttttaactaacaagttataaccatatggagataatgaagcttaatgtgttaagctcttttgtcttgactacattctaaaaagccccttgtatttttcttcccgggctaattgtaatatggttacaacatac

SEQ ID NO: 129810 - DNA, 659 bp, Arabidopsis thaliana columbia
gctggtacgcctgcaggtaccggtccggaattcccgggtcgacccacgcgtccgctcccttccctatatatataacaccgcgtctacctaattgcgttctcatccccgctacatgcatggaaccattcaaagtgggatcatcggtggctgtggatcactctctctatatacgactgtcgcacgatgcccgagcaagattgtggctgccctccttcccatctacgcaacagcgtggttatgcgaacagatccagatgctccggatgacatctcgtcagcagacagagcgcccccgttgacctcccaaaatcgggtctagatctgctctggactcacatcatgtgccgagctcggacgctcgaccatctccgatacggatctactggtgacgcacgaacgatgaatccgtcgtttctctctggacctcgcgccatgagatggcgaaccttggcataggagctgctatgccgattcctaagcggggatgggacctcacgtatggaacgcagggacaacgtttggtttgggggaccaagcttcggtggtctggcggagaaagcattttggttggaaaattccctaatcatttaagccccataaaccccggtggccccctttgggcattggggtcaaggaccaacccccaccctttccctttag

SEQ ID NO: 129811 - DNA, 638 bp, Arabidopsis thaliana columbia
gctggtacgcctgcaggtaccggtccggaattcccgggtcgacccacgcgtccggcgagaaggctagctcaagggtcagcagtcaagatacaactttgtgcgcctttaccagtgcaaattgatggagagccttggaatcagcaaccatgtaccttaaccatatcgcaccatggccaggctttcatgctaaagagagccgcggaagagccactgggtcacgcagcagctataatcacagatgttctagagaatgcagaaaccaatcaagtgataaacgcttctcagaaacgaacgctgcttcaagaaatggctctacggctaacttaaaacaggggaaaaaaaaagaaaagacagaagacaaaaccttccctcttcaacaaccaatcaatcatcactggttagttacaaatatttacaaatgcgtgtattttacatatcttgtacctctgcctaatgaagggaatgttaaaaagtcttgaagatcgaaatccgctgattgacaaagcgggttctgtgtggaagtaggaaaaaagaaccaaaaattggaattctgttcctagatttttggctgttctcatagtgaatgaaagcaaaacgtgtttaattatctctggctttctcatattctaatattatgg

SEQ ID NO: 129812 - DNA, 625 bp, Arabidopsis thaliana columbia
tacgcctgcaggtaccggtccggaattcccgggtcgacccacgcgtccgctcctagaccatcgttttgttcttcgaaaagaccgtgctatcttctgcctcccagtctagttcctcctatcattactactcctctagcttcactgactcgctgcgaccactaaatcttggcattcgtgggaagctgggacaatgcgggttccgggcgtgagagccaaaaccatggaagcactcagcgatgatgctgactctaagaaccgtgaaagcatgatcaactttttcctgaccagtctcatgcactgagaactgcctctctaacgaaacgaatgcatgatgttcgccattattcacccgatcacgccaccactgactgagacgatgtccctcttgagcctcatagctggggtccaccagagactgtgacgctatctacgaaccctaggcgatatgacgatacactgggcctagagtggacagagggaaatcgactgcgccatactgtttccacaaacagtttggactcccaaaagctatcgggaagcaaatgaaccacttgtgcttgaaacctagcgggccctctagaaggtacgcatctacgcacgcgtgctgcccccttattgcgttgga

SEQ ID NO: 129813 - DNA, 498 bp, Arabidopsis thaliana columbia
cgcctgccgtgccggtccggaattcccgggtcgacccacgcgtccgcggcgagttaccattaacatgaccttaaaacaatttataacttctttcaagaacttaacacattgtcaaaactgttggtaggaatcataaatgttcctgagtggtacgatgctgggaaagagcagtattttgcatcgtcgtcgacattgttcgtgatcgagttcatattgtttcattacgttgagatcagacggtggcaagacatcaagaacccaggaagtgtgaaccaagaccctatctttaagcaatacagcttacctaagggtgaagttggttaccctggtggaatctttaacccgcttaactttgctcctacgcaagaggccaaggagaaagagctagcaaacgggaggttggcgatgttggcattcttagggtttggggttcaacacaatgtgactggaaaaggaccatttgagaattttgtgcagcacttggttgacccatggcac

SEQ ID NO: 129814 - DNA, 813 bp, Arabidopsis thaliana columbia
gctggtacgcctgcaggtaccggtccggaattcccgggtcgacccacgcgtccgatctttttttttttgaaagtcgcctaactgtggcggaatggtgggggaaccatttcacttgattgagacacacgatagtggaatttctgggtggaggggttgtaatctatagatctccgataggaacgtctattgcgaaggcagctatctgggtccctaccgacgtttgggtgctaaagcatggggagcgaacgggattagattccctggtagtccatgccttattacattactgtttggccttggtatttcacattagggtgtcaattatcttgtgaaacacttttgtctagtggattacggactcaatgacctgaaacctccaagggaaatttgactgttgggcctagtaaaatagacggctgcgagcattgttggcttttatattttctaatatcgaagtcgcttctataataactctttacaccaatctctactttgggatcattcatttggtagccatgacataacaagcccttttttccccttttaaaccaggggaatctgaggtaactttcaactttttatcatttacctaagggttggctttggcttttggggatttgcattactctcaaggtatttcggtggcttctctgatcagatatgcttactggggtacacatttgcactcttttttaatccattgtcttttatatagctcctttatttttatttggttggttagacattcaataaaatatgcttctctctaagggaaaaataagggcttgtgaaaaaaaccggatatctaatttc

SEQ ID NO: 129815 - DNA, 654 bp, Arabidopsis thaliana columbia
  unsure (1)..(654): unsure at all n locations
ctcactatagggannnaagtacgcctgcaggtaccggtccggaattcccgggtcgacccacgcgtccgattgatacaagaggatcagaatgtcaaaagacgaagagagcgttaccagaaacaatcctctcttctttctaaactcacgaggcagcttagcattcacgacaaccgagcagcagctgcttcaagttattcggacaacagtggcactgagagtagcccaagagcaagtggaggttcttcaggggacgactggatgaatgccttcaactccgctgctaatggaccctcagactcattgtcaaagtacggttccggtggtcacagccgccgttacagtgaccctgcgcagaacggagatgcagcatcaccagggtctggtagcaaccgccgcaccacccccaatcggttgccaccagcaccaccgcctacaggttcagcttataggtattagaacctgaagaaaaaaccctggaagcgcattgtgtcccgttttctgggactacgttactcttattttttctagtttaagacagtgattggatgattgtactactgttttttggtctttgtagatagatattatcacacacatgtgttggcagctaaaaaagagtttggtctcatgagtcaaatgtctgtttgaattttt

SEQ ID NO: 129816 - DNA, 539 bp, Arabidopsis thaliana columbia
agctggtacgcctgcaggtaccggtccggaattcccgggtcgacccacgcgtccgattctttgtataaaaggcttctccttttctcaattcttcggcttcctttcgcccaaactcttccctcgaatctttccttctcgtcttaaagctacgaaaccctagatttcggatttcttcgctatccaaagaagaatgactgatcaaggattggaagggagtaatccagttgatcttagcaagcatccttcagggattgttcctactcttcaaaacattgtctccacggtgaacttagactgcaagctagatcttaaagccatagctttgcaggctcggaatgctgaatataatcccaagcgttttgctgcggtgataatgaggatcagagaaccgaagactacagcattaatattcgcctcagggaaaatggtctgtactggagctaagagcgaggacttttcgaagatggctgctagaaagtatgctaggattgtgcagaaattgggattccctggcaaattcaaggagtttcaagatttca

SEQ ID NO: 129817 - DNA, 1029 bp, Arabidopsis thaliana columbia
  unsure (1)..(1029): unsure at all n locations
gccctgcagtacgggtctgtatncctgntcgacctacgcgtctcgaagagtctaagatatnggngcccnctntcgtgcaacgttgtattgctgctttgtacaatgagctgattgttcttgaggaactttgaccttttgcgttatctggcctacggtattaccttcactccttcttttttccttcctcttccttcctttcttattatggtctccttcgggaaggaaatctttctttatctctttgcgtgtctcttggttgtcccacttttgttacgcactctgcgaggccattgttctcgcccctattcccgcctctcgcataatgttcttccccaatatctttgtctctgctcatgtctccccatcgcgactaccttattctgactcctactcattatgtccctcgtagtctgtcanttgtacactctgatcgttggaattgcctaaattactctttgccaccctcctctctatagtccgtctctcttcttctatctcacaatcaaacctctcgtttgttgctcgtggctctggctatatcctttgcatctcgtcacgaccctcctattctccggtgcttcgcccctccccccctgcttatccttgatattcctctcatcatcttgtcgtcctaccctctctctgttgtttctccaccttgcctacgatctgtcttctccgcttgcttactaactatcacattcactgggctctccgaccatcctctttcggccgtttttcctctctatccaccttctatcttcttatgctccttctctcgactctccttccttccttgaactctnctctccctattccgtaggtcctctttatcaccttcactttctacttttgttacgagattttcctccttctcccatttcaatagctcttctctcccatctctcgtataccacatatatctcccctcctccctctgaccttgcactatcactaatcttttttcttgcgttttgtttctatgccgtctaccttcactcgtgtgttctttattatttctcctaggct

SEQ ID NO: 129818 - DNA, 803 bp, Arabidopsis thaliana columbia
  unsure (1)..(803): unsure at all n locations
gctgcttccccggcccgtaccggacctgaattgccgggtcgacccacccgtccgacctttcttaagctgatcgcacaaagggagactgaggagatgcttgggacgatggggctctcctaaatgaagagcacggtcctttgggacgaggatctaacggtatcgtcgcacgaaacctagaatcccagactccacactagtgaagtcgtagatctacatgaacgtgaacctacttcgttgcttgagattccaaacgtgtctcgatccccgtgacatataccaaacatgtacaaatcgattctacatacacagtctttgaacagcaatttgcccctccaagaacaattcggccttcgaattgggccgaaagcttgtaacccaactgggtggcagcttttctttgaagccaaanctgccctttaattggtcttcacagggacccaataaccccaggccgttacccctgcgtaacaccccctttttgagaccatcgtaaagctgggtcgtttaaccccgaactccctcccaaaaacggaacccgttgacccatgaatcactgcggctcccatttggaacagatccaaggccttttgccttgcattcgtctttgggagctacccgggttgttccccccttcaactggaaggggaccccatcccatgcgtcttgacattctattcaaattcggactaaaaaaaaaaccgggaacccctttagtttaatacccctccgcacaaaaacgggtaaaaggtttcccgggttccgccatttccacccactggaatttacttcccacttttaagagt

SEQ ID NO: 129819 - DNA, 472 bp, Arabidopsis thaliana columbia
agctggtacgcctgcaggtaccggtccggaattcccgggtcgacccacgcgtccgaggatactgaacaggtggtcaaaggaacggatcaagtggccaagggttctgaaccggaggccaaggattcggaaccgccaccggaactgaacgcttaaaagaatgctgaggaactaggcacaaccgtcaatagcaattccacaaggaaaatggtagcggcttgaaaggaatgctccaccattccagatatggatgcaactctaactacgaggatgatcgacaaagacggacgaggaagaagggaatgtcacaagagatcacggagaacttgcccaagcatcatgatcagcttgatctagctcaagcgaagcgctggatgtgatccggatatgatgctgttgggctactgtcggtgaacacgctccaaaaacgaacggggagtcattgcaaccaagaagccttgggaaaattggcctt

SEQ ID NO: 129820 - DNA, 540 bp, Arabidopsis thaliana columbia
  unsure (1)..(540): unsure at all n locations
gctggcacgcgtgcacgtaccggaccggaattcccgggtcgacccacgcgtccgcggacgcgtgggcaaccgggttctttgcgctgatgaagaacacactcttgcgtacacggttagtgtctggctatgatccttgtacggagagttatgcatagaagtattttaaccgtcccgatgttcagagagccatgcacgctaatgttactgggatactctattaaaggacagcttgcgaggatgttcagatgaacacctatagagattcggactacaccatgttgtctatatacaaagatctcgcatcgttcggtttgatgatctggattttcagcggtgatacacactcagaggttccagtgaccgcgacacggttttccctcagccatcttaatctcccggtgaaaactcngtctactactgcgatcactgataagctggtgggatgatggacagacgtttacaatggactgacctttgcaacggtaccatgggcatgccacgacgtgtctttatttgaaccaaagcgtgctcttattcttt

SEQ ID NO: 129821 - DNA, 637 bp, Arabidopsis thaliana columbia
  unsure (1)..(637): unsure at all n locations
acccccggnnnnaagtacgcctgcaggtaccggtccggaattcccgggtcgacccacgcgtccgggagactgagtgtctggactggctaaacacgaaagctagaaacagtgttgtgtacgttaacttcgggagtataactgttttgagcgcaaaacagcttgtggagtttgcatggggtttggctgcaacggggaaagagtttttgtgggtgatccggccggatttagtagccggggatgaggcaatggttccaccggagtttttaacggctactgcggaccggaggatgttggcaagttggtgtcctcaagagaaagtcctttctcatccggccattggagggttcttgacgcattgcgggtggaactcgacgttggaaagtctatgcggaggagttccaatggtgtgttggccgttttttgcagagcaacaaactaattgtaagttttctcgtgacgaatgggaggttgggattgagattggtggagatgtgaagagagaagacgttgatgcggtggttatggagtttgtgggtgatcagaaaggaaagtatttgaaggacttggcatgacaaattccgtatttgacttgtgaggcttgcgtactttaaccctgcttttttaaatgtgactgagc

SEQ ID NO: 129822 - DNA, 521 bp, Arabidopsis thaliana columbia
tggtacgcctgcaggtaccggtccggaattcccgggtcgacccacgcgtccgaggatacttaacaggtgggcaacggtacggatcaggtggccaagggttccgaaccggatgccaaggattcggaaccggcaccgggactgaaggctttggaattggcggaggatctaggcaccacggtcaataacaattgcacaaggaaagtggtggaggcttgggaagaatgcttcaccgttccggatctggatccagctctagctcagaggatgatggacaatgagggaggaggaagaagggaataacacaagagatcatggagaacgtgccatgacatcatgatcactctggtcaaactcaaccgatgggcggcatggcatccggatatgatgctggtggctactgtggtgagcaccaccaacagaatagggatgatcgaccataataagggataagctatccgttggtgtccgttagctttcaaccaatcgggttttcattttaaagtaaaaaaattggggggatt

SEQ ID NO: 129823 - DNA, 633 bp, Arabidopsis thaliana columbia
gctggtacgcctgcaggtaccggtccggaattcccgggtcgacccacgcgtccgccacattttgaccggtgacatgctgcgcgcggaaatcgtcgcgggcacggagctgggcaagcaggccaagacggtgatggatgccggcaacctggtgtcggacgacatcctgctgggcatgctggagtcgcgcctgacccaggccgatgtcgccaagggcttcatcctcgatggctacccgcgcaatgtggcccaggccaatgcgatggacggcctgctggacaagatcggacagccgctggatgccgtggtgcagctggacgtggccaccgagctgctggtcgagcgcatcgccggtcgtgccaaggaacagggccgcgccgatgacacgccggaagcggtgcgccagcgcctgcaggtctacaacgaccagaccgccccggtggtcgacttctacgccggccgtggcaccctggcccgcgtcgacggcgtcggtgagctggacgagatcgaagcccgcatcctggcggcgatcaagggttgatccttgcaggccggtgcactgccggtcctttggggcgcaaaaagcacaggcctggtccgcgaggaccaggcctgtgtcgtttgataggcgccagc

SEQ ID NO: 129824 - DNA, 559 bp, Arabidopsis thaliana columbia
  unsure (1)..(559): unsure at all n locations
nnnnnnnnnnnnnnnnnnnnnnnnnnnnnnnnnnnnnnnnnnnnnnnnnnnnnnnnnnnnnnnncggccgcaaagtaaccaaaaccaaataaaacaaaagacaaaaataattcacatttaggtgatctcatcgcgggccggacacttcctgagacgctatgtaagacgcagactgcctagagccgccactattagagctctctcgccggtggaagaccatagtttcactctccccattttgtccttcaaccatggaagactccgcaaacctcagcccataaaacctcaagaagttcaacgactccatcctcgggttccccaacggtatacttccttcgaacatacccactaccgctgccattgttggcctcaatgctggctcctcgtggacgcaacacaaagctatccgaaccaacttctcagcctcttgggctcgttacccgacccctctagccctcggatcaggcgagctccatataacctncctttggtcatgccatatcccaaagcgtacaaatggggaaattacaaccaaaaccaagtacctaagggggtccgg

SEQ ID NO: 129825 - DNA, 625 bp, Arabidopsis thaliana columbia
ctgcgtacgcctgcaggtaccggtccggaattcccgggtcgacccacgcgtccgcttttagtacattgttaagaacggaggtctacgcaaggaagaagattatccttactctatggaagaaggaacttgcgagatgcaaaaggatgaatctgaaacagtaaccattaatggacaccaagacgtacctactaatgatgagaagagtctcttgaaggcattggctcatcagcctctcagtgtcgccattgatgcatctggtagagagttccagttctatagcggcggcgtgtttgatgggcggtgcggggttgatcttgaccacggtgtggctgcggttgggtatggatcaagcaagggtttagattacatcattgtgaagaatttttggggaccaaaatggggagaaaaaggttacatcatgctgaagaggaacactgggaaaccagaggggctctggggaatcaacaagatggcttctttccccaccaaaactaagtgatcatcggatcattctctcttatctgcatttgatcagcatcttacagtgtcttccgtttttctcctttgatttatcaaccggaggtcttggaacatctatgtgcaaaaagacctctataagcccttg

SEQ ID NO: 129826 - DNA, 559 bp, Arabidopsis thaliana columbia
ctggtacgcctgcaggggccgggccagaattggcgggtcgacaccacgcgggcgtcgcaagacttcgattatggactacacgcatgcataggataaagagatggcttaatatgagaccatgtgggtggcccaagaatatgggacgggtgatgaaggtgggtgtggattatgaatagacaggctatctatgctggagaccgactgacagaacatcgaggaggggctactgttgcaggtgatgaggccaccacaggaggagacacctctggttcaaactgctttaacgaagaaggagaagttgagtgtcttcacaaggtttttgactaagcttactcaattcgatattatgcactctgttctcaagacactagtggttgcagaccatatatttcaaaatacaattaccaattgattattatcaaaagcgtttgaaagactgttgtgcaataagaagggattgcagtaatatcgaagggcctgttttccgagctcagggacttccaattctttgttggggagggtgtgcatgatgacagcactttggtctttgcttggggcg

SEQ ID NO: 129827 - DNA, 696 bp, Arabidopsis thaliana columbia
ggaacccctgcaggaccgggccggaatggacggggcggcccccgcgggccgtaataattatttggccgcacgacccgctaacaaacgacctggtgaagctttctgaaccgtttgactaacgtcacccggacaacaaagaatcgcgggcatgggcgaacgtgaagatgactgaagatgaagagcgcttgagaagatgtcacaccgacactcaaaagcgaaagccggaagtctcttttttgggaaaaacaaacaaacaacctggaaccatcgaagccctaacggctctcaaaggggtgaaggatatttatcacgacaacaaagagaccatatgagtaaaatccctggagcctcattgaaggaagatcacccgggtcaaaacaactcgacacctggatggtagcaatacgaaagggatcaaaaccgctggccaggggcgtacagggacgtacatggggggcccaaaacgatgcttgcccccggggatccagtacccctctggcaaaggagagaaaccctaaagggcgggggggtttccaaagacccctattgggtttcgggacccacccaattaaagaaaaaaagggctcccgggtggaaagaactcgaaaaaaggggcggcgattaaaccccgggggatcccgaaaacaacagtgtctcggaaaacctatggggcacctccctacagggggagaaaaa

SEQ ID NO: 129828 - DNA, 618 bp, Arabidopsis thaliana columbia
gctggcagctccaccgcggtggcggacgctctataactagtggatccctcgggctgcaggacttcgaggacgcaactcctgctccacaatcgagaccatgctcctaatacctgccacttgcgtgatactcagatggacacctgctcatcgctccacacgctatctctatgaaacgcatccacccggatctagcaacttatccaacccaagtgattgctctcagggccggtacaagacatataaaatgtcctaaatagcctttaggtgcacctgatcatgcagcccctgctcctatccctaatacaaatggatcgacacctagtctggttggagactcgatcacatacacacctgcgggatgtgaatgagggtgagcttggcagagacactttaagctacgccacaccatggacctctacgagatctctccacaatgcgcacgaaatcagctaccaaagtcagagccggagaaagcatgagacatagcgctggtcgtgtaagtggagctaactcagccaatgaacaatctggggaaatcatttggcctatcgagctacaagcgcttggccataaattatattacatgacttgaatgcttacttaccagatattccggaa

SEQ ID NO: 129829 - DNA, 508 bp, Arabidopsis thaliana columbia
gctggtacgcctgcaggtaccggtccggaattcccgggtcgacccacgcgtccgggaaaaaggaatctctatgattcctcggattaaaccaacttcagacccagcaggacggatagacttatggccgaatcaagaagagaagctcgaagtcattcactctgcggatgcgttcgagatgatacagagtcacttgtcttcagttcttggagacggaccagcagttggtccgttaagctctatagttcagataggcaaaatcaagctaggaaaactctatgctgcttctgctatgtatggatattttctcagaagagtagaccaaagataccaacttgagagaaccatgaacacacttccgaaacgccctgagaaaaccagagaacggttcgaagaaccttcgcctccttaccccgttatgggaccccggattcccttgatcagggattcaacccagaggaattatgatccccgatgaaatacgccgaatccaaaggaacatggaagaatg

SEQ ID NO: 129830 - DNA, 532 bp, Arabidopsis thaliana columbia
gctggtacgcctgcaggtaccggtccggaattcccgggtcgacccacgcgtccgcgcaactggaagtctcaatgatttcaatggtggagacgctatgaattcagatgaattgctcattcatgagtgtgatgttctcattccatgcgctcttggtggtgtcctgaacaaggaaaatgctggagatgtgaaggcaaagtttatagtagaggcagctaaccatccaacagatccagatgctgatgagattctgtcgaagaaaggagtgattatacttccagatatctacgcaaacgcaggaggagtgacagtgagttacttcgagtgggtgcagaacattcaaggattcatgtgggaagaggaaaaagtgaacttggagctgcaaaaatacatgactcgagcctttcacaacatcaagacaatgtgccatactcattcttgcaaccttcgtatgggagccttttcactctttggagttaacccggagtcgctttgaacccccccccaatttgccgttggtttggggaaagccttt

SEQ ID NO: 129831 - DNA, 332 bp, Arabidopsis thaliana columbia
ctggtacgcctgcaggaaccggtccggaattcccgggtcgacccacgcgtccgcgcatttgtgtaatttcacatgacttcaatgcgtgctagacccctatgaattccacatgaattgctcattcatgagcgtgaggatccatgccctgcccccatgatggtgctctgttccatgggaatgcctgagattttaaagaccactatattgatgaggaaggttacctttcgaaagacccaagatggctgctgaaattgctgtccttttaaaagggagtgttttattactttccccggatattctttacccccaaaacccccagggggagggaaggt

SEQ ID NO: 129832 - DNA, 632 bp, Arabidopsis thaliana columbia
ttccggaccggcattccgggtcgacccacccgtccgatctgttcacggaaatttttcccttaactttgctgctggggtattacctgtttttgaaccaaatggcacatcttgttcttgtgggtggattaaatacatctgtcacggatgatcatctgaaaaatgtctgtagctaatagaggcgaaattgtgcatgtgaaaattctcgctggaaagcgctgtggattcgtccagatttccgagaagagctgcactcaggaagctcttatattgctgaatggagcgcaattaagctgaaccaccggcatgctatcatggggccggagccgctcgaacaaacagaccgtggatccgagccagttctactacggagggtctggacaaggacagaagctgtataggtacacgatgccttaagaacctagtgcatattacggaagcttctttggtgtaggatactgcagtaggttccagcaggcacaacatgcaggactgtatttatcacaacagccctcacagcaacaacaaatctggtgtagcttctaacaccgagagtttcgcttgagttaatgtgactaagtttgcagtttgcgaactctgttatgagcttgtgtctgagtgcgctgctatgaata

SEQ ID NO: 129833 - DNA, 655 bp, Arabidopsis thaliana columbia
  unsure (1)..(655): unsure at all n locations
caccggtccggaattccagggtcgacccacgcgtccgcacaacaccaggatgtggagtgaggaaacatgtagagagagcagcaacagatccaaaagctgtagtaacaacatatgaaggaaaacataaccatgaccttcccgctgctaaatcaagcagccatgccgctgcagcggcacaggtaaagccagataatcgacctggcggcttggctaacttaaatcaacagcagcagcaacagcccgttgcgcggctaaagcttaaagaagagcaaacaacttgagagaagaaaactcttgaccgtttttcattacaaaagctgtcaaattccactcacacacttgtctgaaaaatctagcagcttgcaggaaagaaacagcttcaagaggttgtagttcttctatggtctggggtaaaacttacaagctttctagggattgcagatgtctgtggactaatactgtatgagaattcttttggacatgaggaagaaaattacagggggatatttcgtgttgcatctattgtgttattagtgcagtaaaagataggtcttacatttcgtgtatgaaaatgaaagtatttggtgtaatatcaaactntattcttttgttgattagtacactattatagtcaagaaagagaacctttttaaaa

SEQ ID NO: 129834 - DNA, 660 bp, Arabidopsis thaliana columbia
gcagtcccggtccggatttccaggttcaaccaacccgtccgttatctccctctaatctcttctcttggctctatccaatgcctttgttcaagatttctgtgtcgcaaacctgaaacgcgctgaaacccctgcgggttacccttgcattcgtcccattcatgtcaaagctacagactttgtcttctctggcttaagcactcctggaaacactacaaacatcatcaacgccgctgtcacacccgctttcgcagctcagttcccgggtctgaacggtctaggcctctctacagctagacttgacttagctcctaaaggtgtgatcccaatgcacactcaccctggtgcctctgaggttctctttgtccttactggctccattaccgctgggtttgtctcctcggcaaacgctgtctacgtgcagacactcaaaccaggacaggtcatggttttcccacagggcttgcttcatttccagatcaacgcgggaaaatcctctgcttcagccgttgtcactttcaacagcgctaatccgggtctgcagattctcgacttcgcactctttgctaacagtcttcccactgaactcgtcgtgggtactactttccttgacgccactacagtcaagaagctaaagggtgttcttggaggaactggctaaaa

SEQ ID NO: 129835 - DNA, 666 bp, Arabidopsis thaliana columbia
gcttgccgtaccggtccggaattcccgggtcgacccacgcgtccgcttcattcaaacgtttctcttgctcttctccaaacgtgaagtaccagatcgtgctttaaacttcgccggaatcttagtcttctggacttggttcccactcttagtctcatgtctaccaaactggcctgagagattcttcttcgtcttcacaagcttcaccgtcacggcgcttcaacacattcaattcacgcttaaccatttcgctgctgatgtctacgttggtccacccaccggtagcgactggttcgagaagcaagcggcgggaacaatcgatatctcttgtagatcatacatggattggttctttggtggattacagtttcagcttgagcatcatttgttccctcgcttacctcgttgccatctccggaaagtttctccggtggttcaagagctttgcaagaagcataatcttccgtataggagtatgtcgtggtttgaagcaaatgtgttgaccattaacactttgaagacagcagcttatcaagctagagacgtggctaatccggtggttaagaacttggtttgggaagctttgaatactcatggctaaatgattttaatcaaaacaaaatatgcttttgtttgggttaaatttgatgtgttgtttttattctttat

SEQ ID NO: 129836 - DNA, 686 bp, Arabidopsis thaliana columbia
  unsure (1)..(686): unsure at all n locations
cccttgacgttgcgttgcagttctgcaagtaccggtccggaattcccgggtcgacccacgcgtccggtctcggtcaccatccatcctttgatgaacagggtaatcgacatgcaaacgtgctaagtccaacggtagtaacatcgctaaaacaagtgaacgagcggatggtccagataagtctaacgaactccatatactggaacgctcatacatttgcgctcacggaatcggggaagctattcgcgtttggtgcaggcgatcagggtcagcttggaacagagcttggtaagaaccaaaaagaaaggtgtgtaccggaaaaagtggatatcgatctcagctagctagctgacttatgtggtttggttggtaagaaactacgtttgacatcaaggaaacaaaaacgcaagaaaatttgcgtttgctttttatgttcataagacttggaagcttgtacaaaaaggggaataacataaacttgtctttaacatttcattgtatagggtttttagattattctaattgttcattggttaagttttaggttatgttgttaataattatcaaataatttcattaaatcaaaaaaaaaaaaaaaaagnnnnnnnnnnnnnnnnnnnnnnnnnnnnnnnnnnnnnnnnnnnnnnnnnnnnnnnnnnnnnnnnnnnnnnnnnnnnnnnnnnnnnnnn

SEQ ID NO: 129837 - DNA, 660 bp, Arabidopsis thaliana columbia
cgcagtaccggtccggaattcccgggtcgacccacgcgtccgcccaaaacacaaaacaaaaaaaaatggcttccactgctctctcaagcgccatcgtcggaacttcattcatccgtcgttccccagctccaatcagtctccgttcccttccatcagccaacacacaatccctcttcggtctcaaatcaggcaccgctcgtggtggacgtgtcacagccatggctacatacaaggtcaagttcatcacaccagaaggtgagctagaggttgagtgtgacgacgacgtctacgttcttgatgctgctgaggaagctggaatcgatttgccttactcttgccgtgctggttcttgttcgagctgtgctggtaaagttgtgtctggatctgttgatcagtctgaccagagtttccttgatgatgaacagattggtgaagggtttgttctcacttgtgctgcttaccctacctctgatgttaccattgaaacccacaaagaagaagacattgtttaagcctcacctactcaccagcttttgatggtttaaaaatcatgtctttataaatttcacattttgggttgagtttgttgttactaaaaactattggtatctgttgttattgttcctggtttggctcaccatcaatcgatgacattttaac

SEQ ID NO: 129838 - DNA, 658 bp, Arabidopsis thaliana columbia
ggaagcaggcaattccagagtcgacgcatcgcgtccacgcgaaaattacgccataggaagcaagcctttgaccgctgcattgaacgtttactcgagaggttttagaagtctgttgaagtacattaaggacaaatacgcaaatccggaaattatgatcatggaaaacggatatggagaagaactaggggcctcagattctgttgctgttggtaccgctgatcataacaggaaatattatcttcagaggcatcttttgagtatgcaagaagctgtttgcatcgacaaagtgaatgttacaggatactttgtatggtcattgttggataacttcgagtggcaagatggttacaaaaacagatttggactctactacgttgatttcaaaaataacctcacacgttacgagaaagaatccggcaagtattacaaggatttcctcagtcaaagtgttcgtccatccgcgctcaagaaagatgagctttaagctatttctgtttcaatgtgtttttcctatgttttactttgtgagtgaccaagattcatgaggtcttggttctaataaaaagagttttaataataaaaatacaaattaaaattcaagggcggccgctctagaggatccaagcttacgtacgcgtgcatgcgacgtcatagctct

SEQ ID NO: 129839 - DNA, 671 bp, Arabidopsis thaliana columbia
atgtcgttgcagttcagcagcgcaattccgggatcgacccctccttccgcgcggatgaaattagaagcggtttgtccagagaagaaagctggtgatcgctgtcctactgcaatccatgactttgaaggtgaccaatcttacattgagaaaccaggccacacttttgctttaactactaactttgatgacctattttcctcgagttatgatgctctggtctattattaccacttagaccacggacgtctgtgtcttgaacaaccatgagattaacatatttaaagagatcatgaattttgagaaaccagttgcgtctatttgccacggacaacagatcttagctgctgctggtgtcctcaagggaaggaaatgcactgcttatccagccgtgaaactgaacgtggtacttggaggaggaacttggctagaaccagatccaatggacaggtgcttcactgacgggaatctaataactggcgcagcatggcctggacacccggagtttgtttcacaactaatggctttggtgggcattcaagtttcattctaagttccatgttatgtaaacatcgttatcaagcataacccattcaacacacttgtctactatggtatatgttactgccatcttttctatctcgtcttttgactagcttactgtcaagtcaatc

SEQ ID NO: 129840 - DNA, 502 bp, Arabidopsis thaliana columbia
atcccgggtgcgaccagcgggcgagccaggaacaagtcctaggaacagaggggttttcctttcaaagaggggacgacaaagacaggaagctcaaaaaacgacattgcgcccgacgacgacttacggggaaaaccaggagaacaccaaggtaaggaactaggggaacgggtttaggaatgttcttaaatgaaggccttcctggtagcaaaaataaggtacaaaaaaaggtcagggagagacaggtccgagctattaaaaagcgagggaaaattggccaaaatcgtgggaaacagagaacagaaggaaactacagcggaacacgggggggatgccctacaagggggtaaatagaaaactcgagatgtagggggggtttggaaaaagaagtttccccaaaaattaataaaagatcaaatctccggaagcaaacagataagggtgttttaaagaaaaaccggggggtgagggaaaaaaaatttgggactcatgtgaaaaatacgag

SEQ ID NO: 129841 - DNA, 718 bp, Arabidopsis thaliana columbia
  unsure (1)..(718): unsure at all n locations
gttnnnnnnnnnnnnnnnnnnnnnnnnnnnnnnnnnnnnnnnnnnnnnnnnnnnnnnnnnnnnnnnnnnncttttttttttttttttttttttttttttttttttttgaaatggggattcctttttttaataaaaaaggaggaagccctttaaaaaccagcaaaaattttggttccctaaaaccaaaggggccgttccttttactttcacgggaccttacttccggaaaaaagaaaaccccttagggggcggcctttcctttttgattcggggcaataaaaggctcaaaattacaaaacttgggatttttaccggggggaccttttttttttggttaaaccttttcaccccggaaagtaaggaaacggccccggtttcctccttaaacaaaaacaccaatttttcaataagggatcctttgcccaatcccccattacttgggacccggcctgttcgggttctggcctttagaatcctccccgggcttgaaagggggtacttggggcccttccggttttttatttggagcaacgggggaggcatcgtttccttgttttgcaggtggggggggtgaaggagcatggggcccttgggcgatggttacctttagcagggagatcgggtattggagtgagccactcatttatttataaccaattttttttaaaagttctttttaataacccggaaggacccatttcccgaaatcacgggggcc

SEQ ID NO: 129842 - DNA, 702 bp, Arabidopsis thaliana columbia
  unsure (1)..(702): unsure at all n locations
gttnnnnnnnnnnnnnnnnnnnnnnnnnnnnnnnnnnnnnnnnnnnnnnnnnnnnnnnnnnnnnnnnnnncttttttttttttttttttttcctacagaggagtaagaaaatggggatttttagtggtctgaagaagaaaatgaaacacgctatacactgtaaaaaggaaagggtcataactacatattgaaactgggcatcatacgtttaaaaccccccacagctgggcctacggagtctcttaaggccgcgctcctaccaccttaatcccaagaccaaagagtccctttacagggattcctggaactttgaccggggggacgatttctttattggtacattcatgggcgcttgttttacgtgcaacgagaaccctgatactcctgggtgaacctacgattgtctggacccggagtcgcttggtcaatctcacggaaaccctgacgccctttgtcccggttattttttttgtaaactctcgggggctttagaggggtttccgcgcgcttctcctaaaggaacttagtgaaagcgtcgagggagggtaaccgggactgctctgggaataacttcctctacccttccctttttagaagacatttgcgtttactgcgagaacggacttgttcaaacccttaacctttccggcagctggggacagccctggaattaccgaccggcacactttggcataccagctt

SEQ ID NO: 129843 - DNA, 679 bp, Arabidopsis thaliana columbia
  unsure (1)..(679): unsure at all n locations
nnnnnnnnnnnnnnnnnnnnnnnnnnnnnnnnnnnnnnnnnnnnnnnnnnnnnnnnnnnnnnnnnnnctttttttttttttttttttttttncagactcttggagaattatttattcatcgtccgatgaaaagacgcccattacctcaattatttaaaacacgaatgctttaattcaaacataattactctggcgcgtacatgattctaagatcctagtccggaccactcgaaaggtcctgaaaatgagccccttggggattaaaaagaggccgggccaccccccatttggacgaccctgtgactttgaacaggagagggtctgcaataactttcctgtaagacccggcgttaaggagaaagcatgcattgggggaagctccattctgatggcacgaatgtgcaaaccccctttccctggtcctaagtgccggaagaatggacccgggttcttacggttatgctgccccttgttaaaaatgggtagttcatcttggaacctggggcacaccgggtgacgattcttttagtgggacgatgtctcgtgacctacgaactgattacaagggaatgctttattctccaaccctcggtcgttggttttgtcgcacaaaacattataactcttgcagtccgtatccttctcaccagatgttgaaactatttttacgacccaaaga

SEQ ID NO: 129844 - DNA, 746 bp, Arabidopsis thaliana columbia
ctatagaccagctatgacgtcgcatgcacgcgtccgtaagcttggatcctctagagcggccgcccttttttttttttttttttcttaagcagactgtttgataataaagcgtttaacctacgatgaaatgtacaaataactccctactactactcaaacaatatagcatgaatagacagattatgacacttgtcctgatacgttccttaaaacctcttttggcgacaacctcgagaattctacaactataggtccatggtccataatacctgcactggtctccctccttacaaatggccccttaccttctaactggccaacatctgcaaaatgtgtactgtcagcaccggactgaaaggtgaggccaacagggggggaagccacactggatggcaccaatgaatccaccctcgttgcttccataaatattccggctaccatgaccccttctttcacggtaatcaccaacttaatctacgatggcacttgaacccttgacccaggtggctgcccttggatccaaatcccccgattggaccatgtctctgtacccggaacctccgtggaccaagtagaatgtctctttcattgcccacccagcaaccaactgttttttctttttttcaaccccaaaaacaaacttaacccttcccgtggggcgcccccccccacccggattttttccccccccccgtctttttccaaaaaaaggaacctcgttttttggaaattaggagcggggggga

SEQ ID NO: 129845 - DNA, 670 bp, Arabidopsis thaliana columbia
  unsure (1)..(670): unsure at all n locations
nnnnnnnnnnnnnnnnnnnnnnnnnnnnnnnnnnnnnnnnnnnnnnnnnnnnnnnnnnnnnnnnnctttttttttttttttttttttaaacacattggtttattgtaaagagtgtttactacgacagtgatagaaataaggaacgatacatgagcattcgcgatggcaagctttttaatattatgaacatgaaacggcaacgcttcgttataatctttttagacgggatttaacgacctagcagaatagttatccatgacattgtttgccccttacatgaactgaacgtatatggaaatcggcctctatttacttggcctcatgttcacacagcttgcaagcttgtatcccactgatcgatcagccttagacctgtaccattttccgatgccgtggatcttaagggtcacacggtgctaccataaaattcccacccatcttttaaccaaactgtattgtatgactggtgcccatgatttgtagctgtttggagcctgattgaaggtgttctctttattgctgacgcacttaggacaaattcaattatcacgagtttgttaggggtcggagatactttttttatttggccatgctcgaccaggtgaacaaaaacgtttgtttgtgttttttccaaagaaatttgaactacctcccatttcatttatatttt

SEQ ID NO: 129846 - DNA, 704 bp, Arabidopsis thaliana columbia
  unsure (1)..(704): unsure at all n locations
tnnnnnnnnnnnnnnnnnnnnnnnnnnnnnnnnnnnnnnnnnnnnnnnnnnnnnnnnnnnnnnnnnnnctttttttttttttttttttttaaaccaacaccgttatattatcttttgagtacaaatagagtatttaaagtgacatgaataaacattacctacttattattacatatgtacttgttatatgcttctttcttatacaagtctatggggaaaaggctgctcattttgggcatcagaaagtggtgcaggtgaattatgtgttctttactccgaagctactggatttttctttgatgatccaacatttgtgttgaccaagcttatgcgcgagaaatgagacttgaggccaatccaacactggtagttgtagcgatccaacaaaggagacttcagagcccattgaccgactctagggatcaatgctgactctaacttgaaaggcatcgcacctgcgagcttaaaatgagccattgcatctactggatcaatagcctcctaggacgtaggtagtatctggaccatgaagcgccgtccagatatgaagacttgctcagtccgggagaaatccttcagctttcgtctcgtatgcaccgtatatttaacccattcattcactcccgcatgtactatgataccgacgcttggtttgaccctggaatttcagaccggntcctgaaggagttcaagctctcactata

SEQ ID NO: 129847 - DNA, 671 bp, Arabidopsis thaliana columbia
ctatgagttcgcatgcacgcgtacgtaagcttggatcctctagagcggccgccctttttttttttttttttttttaaaccgacaccggtttatttgctcttgagtacaaatagtgtatctaaagtggcatgaaaaaacattacctaattattattacatatgtactcgctatatgctcttttcttatacaagtatatggggaaaagtcagcccagcttggggattgaaagtggtgcacgcgaattaagcgttctttactgagaagccaccgaatttgtctgtgtcgatacaacatttgtgtcggacaagcttatgcgcaagaaatgaaacttgtggccaagccaacactgctagcaatggtgatccaggaaaggagactccagaacccattgaccgactctagggaccaatgctgactcgaacatgaaagccatggtacctgcgaggttagaaggatgcataagcactactcgagcaattgctggcatagacgtgggagtatcaggtccatgaagtgtcgtccagttatgaagaactgcaccgcccgagagaaatccatcaactaccggctctgatgcaccgtgaatttatcccataaatacactgccgcactctcgaagattccgacgcgtgagtctaccccgggatttccggaccgggacctgtaaggc

SEQ ID NO: 129848 - DNA, 591 bp, Arabidopsis thaliana columbia
  unsure (1)..(591): unsure at all n locations
tnnnnnnnnnnnnnnnnnnnnnnnnnnnnnnnnnnnnnnnnnnnnnnnnnnnnnnnnnnnnnnnnnnnctttttttttttttttttttttaaaccgacacgggtctattaccttttgagcacaaagagtggatttaaagagtcatggataaaccctacctactgattattacatatggactagctatctgcccttttcttatacatgactaaggcgaaacggaagctcattgtggacatccgaaagtggcgcaagcgaattatgtgttcttttgtacgtaactaaggcgattgtctatgaaaagtcacctatctggctcgaccaagataatgctcaagatctgagactggacgcctctccaacacctgcggcaggaagagatcctacaaaggtatcttccgttcccgtttacccactctagggatacgatgctgatgcgacttaaagggcgttgtacctgcgggcataagatgaatctttgcatgtatgagagcaattgttgcctaggacgtagtagcatcgggaccaacgaagcgccgccagttactcagcagttgatcgagtcgagaaccaatctctcaactttcctct

SEQ ID NO: 129849 - DNA, 662 bp, Arabidopsis thaliana columbia
  unsure (1)..(662): unsure at all n locations
cactatctacgagctatgacgtcccctgcacgcgtacgtaagcttggatcctctagagcggccgcccttttttttttttttttttttttttcggattagcaacaaaacatgctttggaacggaccttggttcacaaaacttatttatctaaacggcagaaaagtttatggcaaatggaatttgatggttaccaagtgacagtcttatcaaacaacactccgcagcttttagacgccgaccgtcttgagcttaattaactttacttaaacctccggagcttcacacaagttttcaacaggaggtggtccaccaatatcctccacaaaatcccccatgttcttagacaaaaaccccccttatataccccgttgcttggataaccccacccattttttcggggtttccctccactacacggagttttgctccataagggtttccacgcagcgtggtnnnnnnnnnnnnnnnnnnnnnnnnnnnnnnnnnnnnnnnnnnnnnnnnnnnnnnnnnnnnnnnnnnnnnnnnnnnnnnnnnnnnnnnnnnnnnnnnnnnnnnnnnnnnnnnnnnnnnnnnnnnnnnnnnnnnnnnnnnnnnnnnnnnnnnnnnnnnnnnnnnnnnnnnnnnnnnnnnnnnnnnnnnnnnnnnnnnnnnnncgcttggag

SEQ ID NO: 129850 - DNA, 680 bp, Arabidopsis thaliana columbia
  unsure (1)..(680): unsure at all n locations
tnnnnnnnnnnnnnnnnnnnnnnnnnnnnnnnnnnnnnnnnnnnnnnnnnnnnnnnnnnnnnnnnnnncttttttttttttttttttatggtgaaaaacacacagaacatctgcatattccatctttctaagaccacaaaacctttctcttttatggagacagagttacagctattgttcacatttagatccttctcacactattatgcttaagaccattttaagcatttctatttttaccgatgagggaaactttcacaaagtatgactgtttgaaacatctctccccaagaacccgaccagctccagagctatatcgactctgtctcacgaaacagagcaagaaaccctgcttttgaatctttctgtttgatctttatctgtcaattatgttggcttaagaccaccacaacctaaaccgttatcttcagatactttcatgaaccttatcctcttagaagacgaaacatacatctcccaaggaacatcaccagcaagcatccaattaccatgtttgtgttcataatgtaggacaaagtctgagcctttatatccttctctctccaaatattctcccaccgacaatctaaacaagacctcaagcgattttatcaacactggatattgtttattcatcgctagatctatcatccttagatatggagcaacattcatactta

SEQ ID NO: 129851 - DNA, 651 bp, Arabidopsis thaliana columbia
  unsure (1)..(651): unsure at all n locations
aagaagaaaaaagtttgagctgcaannnnnnnnnnnnnnnnnnnnnnnnnnnnnnnnnnnnnnnnnnnnnnnnnnnnnnnnnnnnnnnnnnnnnnnnnnctttttttttttttttttttttgtgcaaatcaggggaaaaagaaccaacgcaacgtcttttggattacaaaagttgaatataacataggcaactgggttacgaaacacaagatcatctaggacacctttctaaggcgaatttgacaaacccttcaaaagaaaatattgttctaccgaaaagagataaaatgcctttttttttactttttgaagggtgagggactaatatcaagggggggggcttaggtccctttactatggtatcccaaaattagcccgaaaaccccgaccacaagaaccttcttgaatgggaaacccccactttggttctttttggtccaaccccttacatgacccaatcttcttagaattctgttatccataggattgtgcaacaggaattattcggcttgcaaggaacagagcgccctcgccctagatgtcgattcttgatgtccagccttgttgtacaccagaaacctcttatactaaaatccaaaaccatgtccctaatctgagacaaaacccgctgggaagagagaaacccttttt

SEQ ID NO: 129852 - DNA, 623 bp, Arabidopsis thaliana columbia
  unsure (1)..(623): unsure at all n locations
gttnnnnnnnnnnnnnnnnnnnnnnnnnnnnnnnnnnnnnnnnnnnnnnnnnnnnnnnnnnnnnnnnnnnctttttttttttttttttttttttaaatttttgtcattacatatgcttttccatctttttttgttgtggaggagcccaccgactttctctgatcaatacaactatcaaacacctccccagcaaaaacaaaagactttcttaaaaaaaaacacccccccttctgtttataacaaaaaccccaggggtaactggggctaaaaaaaccaacaaaaaacccccccgagggtcttttaattcatgaacccccccgggtattccttcccggaaagtgcaagcgcaccagcctctccatatggcgaaaaaaaccctagccccccataaacaaaaacattggggggggcggtgttatatcgttaaaaacacacaatggcgccccccataggggggggcacccctttattgtcccccccgggaaaaatagggaccgcccccccccgcgtgcattgtttttctcccacgggacaaaaaaaaggcggggctccctctcccgccaggggcgtttatgaacccaaaaacaccccgggagaggtgggttgtgtattaaacaacaccc

SEQ ID NO: 129853 - DNA, 620 bp, Arabidopsis thaliana columbia
  unsure (1)..(620): unsure at all n locations
gnnnnnnnnnnnnnnnnnnnnnnnnnnnnnnnnnnnnnnnnnnnnnnnnnnnnnnnnnnnnnnnnncttttttttttttttttttttttttcggactttttcttattctttttttgttacggtctttgtttttttggggccccaaaggttaataccgaaattttatgtttaaaaaaacccttgggcccaaaaaaaaaaaagttttaaaaaaaacccgggggattttacccaacacctgttttttttaaaaaaaaccgctcttttttttgccaaaaaacaaaggggggtggcaaaaaatttttttcccccatgggggttttccccccccaaataaaaaaaaaacccccttcccccaaaaataggaaaccggggggggaccagcttttacccccagggggttccaattaaaacccggggggttggatgcgtataaaaccccaaaaaaaaccttttgggcccacacagggggatgggggacacgttttcaaacccggggccctaaaagggagagggtttattgcgcaaaaatatgcccagcgaaagggtttggtagcccccccctggggcacgcaataaatatttttctggcccccggcggaaatttcacagaaaaatgcccg

SEQ ID NO: 129854 - DNA, 681 bp, Arabidopsis thaliana columbia
  unsure (1)..(681): unsure at all n locations
tnnnnnnnnnnnnnnnnnnnnnnnnnnnnnnnnnnnnnnnnnnnnnnnnnnnnnnnnnnnnnnnnnnnctttttttttttttttgtttcgatttagacaggttttgaagaatcaccaggcacgcgaaacacagaagacctgattcatttaaagtgttaaaaagatgaataaactggtttcaggagttttagccaatgagtagtcctaagtttttttttaaccagttcctccttgaacaccctctatcttgttgaatgtaccggcgtcatggaaagtattacccacgacaattggagcgggaagactgttatctaagagtgccaagtccagaatcttcatacccggattagcgctgttgaaagacgacaacggctgtagcggaggattttcccgtgttgatctggtattgaaacaagccctgtgggaaaaccatcacctgtactggtttgagtgtctgcacgtatacagcgtttgcggatgatacaaacgcatctgttatggagcctatttggacaaagagaacctcttaagcaccagggtgagtgcgcattgggatcacacctttaggagctaaatcagagttatgctgttagaggcctataccgtcagtcccggtaactgtgctgcgtaagcggtgtgacacggcatcatgatgttagttagttctaggagtgactaacc

SEQ ID NO: 129855 - DNA, 635 bp, Arabidopsis thaliana columbia
tacaccatatacgagcttgacgtcgcatgcacgcgtacgtaagcttggatcctctagagcggccgcccttttttttttttttttttttcttaaaaggaccattggacaaaactctatgtcacgtctaaaaaacaaaccgtactcagccaatttcttaatgcccaaatctgcattgcatattccccacggcggtgctccaacaatacacacactcccacactctttcaaattttttgacttcacacaccactggggaaataccttattgatcggtatcttacgttatcatctgccgctccggatattcaatataaccacttacccctagcatttcttctttcctttctcgaggtacatcctgaacccgtaaaatgtgggccgttcttttttaaaccctgaccttctactccgcctgtaaagcttgagaaccccccaataatacgggtggaggttctgaagcctctaccgaaactctgttgtaaaaaactcttaccgcttctggagcttctttttttgacaagggccttacaccatgagctttgtttttccccctttcattgtggttttacataaggtcttgcgcgtagaactccatgggttttccttttgtgcccctcgcgtataaagggttttcc

SEQ ID NO: 129856 - DNA, 654 bp, Arabidopsis thaliana columbia
  unsure (1)..(654): unsure at all n locations
nnnnnnnnnnnnnnnnnnnnnnnnnnnnnnnnnnnnnnnnnnnnnnnnnnnnnnnnnnnnnnnnnnnctttttttttttttttttttttttacatttttgcgataaaaaacccatggctaatccttttggttgtgaaaaggtcacactacatgttcggaagaatacggataacaatctcatgtcgagacgtatctaaagacaatctgacaaagaaacaaaagcatttcttgttataccgaaaagcgcgaaaatgactttgtctttagatcgcgaacaaagaacggctcaagagctcggggggtggaataacccccccggatatgctttcccaaaaagagccagaagacctactcctcaaaaacctacacgtatgggagtcccccactaacaatttttttgctgggaagccttttatgaccctaaccacttaaaattggcctccccatatgagatggaacacattaatttttcagccaggaaagcatagagtgccctctcccccgaagggttttcttttttcccaccgttcggaagaagcgcgtgcccccttactctgacatccggattcatggacaccatccgagccggggggtggggggggacccttcaacaccccggggatattgacgcgaaacacgacttagaaagaaact

SEQ ID NO: 129857 - DNA, 601 bp, Arabidopsis thaliana columbia
  unsure (1)..(601): unsure at all n locations
nnnnnnnnnnnnnnnnnnnnnnnnnnnnnnnnnnnnnnnnnnnnnnnnnnnnnnnnnnnnnnnnnnnctttttttttttttttgtttttgtacggatgagcgataacacattctttgatacattgtttgtttctgcaaagacctgacacttaataccgaaagattctctctaaagaaacccgttctcacgaaaagaaaaaaattttaaacaaaaagctggatatattatctcgcaaccagacacaggtcaaaaaacccttacttttgtttacggaaaaacaaaggagcttgccaaagaaaatctaatcacaatagccgattaaacactccttacatagagaaaaacataatcccgccgaaaagactcgactggttggggaccagatcctgccgattggggctttagaaaaaacatcctggggggtggctacatttgggtccttaaaattaccgctcgaacccacaaatccataagcggaacaatttaaagatgcggtgcccacaaaagaggagcgtttgaaatacaccaatactgtcgagcaggatgcccttgatagggaccttctggagaaagagaaatatgcttccattgatgccgtgg

SEQ ID NO: 129858 - DNA, 695 bp, Arabidopsis thaliana columbia
  unsure (1)..(695): unsure at all n locations
nnnnnnnnnnnnnnnnnnnnnnnnnnnnnnnnnnnnnnnnnnnnnnnnnnnnnnnnnnnnnnnnnnnctttttttttttttttttttttttttttttttttgtttttttttttttttctttttttttttttttttttttttttttggaaaaaaaaaattttttttttccccaaggccaaaaaccttttttttttttggggggtttcaattccgttacccccaaaagcttttcccggaccgtttggggccttttgtttcccctttttccttggaaaatagccccttttttcccccccttgggtttttttaaggggcgtttctttccttctcttgagttgggaggtccgggggggggcccattttttaggttcgggccttgggggctcccttaaactcccccgttttggccaacccggggggggatccccttatttttcccccctttgatttccttttagggggggcttgggggggggattctaatgaaccccatttccgggtttttacaatttcccactgcggggaacttttcccgggtcctcggcccggttcttttccccgggtaaccgccccttctcctttcataatacccaaaaagtggcccgcttactttatgggaccattttttttgccccccttggtggtgtcgggggccccctcggggaaaaccctccctctttttgttttgggccggg

SEQ ID NO: 129859 - DNA, 703 bp, Arabidopsis thaliana columbia
ctttagacgagctacgacgtcgcatgcacgcgtacgtaagcttggatcctctagagcggccgcccttgttttttttttttttttttttcaagagtctccgttcctcacccaaaacgcatctgggggcggtttacacctgcctaatggcggattcactccacaagacgacttacgcacaccttgtttcacgaaccattaaaggattgggattacaacctaattcatccaaagagctctcattctgagttgacagggttgcaccctcatccctatgaaactgaagagatgtttccaccaggattcgtatctgttttgcaacgaatacattgctcgacacgtgaggcatgctcacgctatctggtgagcaactcctgtttttagctgttgtgttcccccacggagaatcttaatttgggatcacgctcacatagagacctacatgatgaagatgcatctgaagacttctttcacatgcgacccgttatgcgtacagagctgtggctctattacgtggccgttgcttgtggacatccttatcacttgcggacagactcgattcagcgaaactgtctattctagttaagtctcctatgcttgagcacggtcatgttctagcgggtattaaacctagcctttaggaagaatcccaacaacgaaaaaggaagtttagacgaaaacgtacgtcggtactatctccctcttg

SEQ ID NO: 129860 - DNA, 695 bp, Arabidopsis thaliana columbia
agaacagctatgacgtcgcatgcacgcgtacgtaagcttggatcctctagagcggccgcccttttttttttttttttatttttttttggtgtgataattttaaatgaaaacacactttttttcctttttttttgggggacaacaggggaaaaccccccccacaaaacttaaacggggtttttttttggaaataaaacaaacttttttaacccctactctaacaagcagaattccagagtaaaatggggggggtttttctttttcaaacgaaaaaaaaccaaaacaaaacccccccttttttacccttagtggggcgggcttttcggagggaaacacttttatttaccgcccccacaattttttaaagagtctgggggggttttatgtttttatcgtggggggggaaatttttttttgggggggaaaaaaagaccaagttatcatggcccttctttggtgagtggggttaccaaaccgtcttaaacccccatattcccctaaaaaaacatagtattttctagccctctttttcaacccttagaaaaaaatgggttttatgcaccggggttttcccaggaattcaaggggaggccccctaggggaccgcaactttccaatagagggggtgtttacagccgggagcgctaccggggcaaaagtgctcccgtggaaaaatactatcccctcccaaatct

SEQ ID NO: 129861 - DNA, 413 bp, Arabidopsis thaliana columbia
cctatagacgagctacgacgtcgcatgcacgcgtacgtaagcttggatcctctagagcggccgcccttttttttttttttttttttttttattgttcccgagttacccttttatccattttccttttccctttaaaaaaaagaacactggcccccctgggggggcaaaagaaaaaaggggacttttccttattcctcggggttggagttttcaatcttctaaaggcccctccaggagacaaaacacgtcccggggggatcatataatacgagggggcgccccatacggttgaatattaaagacgctaatacccgtttatcccccgtggaatggcggttccccctcgatggagggcgaaacctgttggttcttggttcatatgacaaaaaaaagatcccccgggctttaaaata

SEQ ID NO: 129862 - DNA, 601 bp, Arabidopsis thaliana columbia
ctatgacgtcgcatgcacgcgtacgtaagcttggatcctctagagcggccgcccttttttttttttttttttttttttttgacagccgattaaagaataattatatcgcctaagggcattaaatacagttccacgagaaaccaaaaggatccaatatcaccacttaaatgcctgtctttttcaataacgagcttgatacctaaaaacctccaaagaaactcacacaacaatttagtgcgcccggttgcatccttactcccgagaaaaacacccgattgtccgaccactaggatttttaaatagacgggaaatcaccatccgacgaatattcagcaaaacggtgaggctcaattctcataggaccccgtttgtgtctctcgaattgcgccctggtatccgcatcactaccgaaatgatctgaccggagccacactaccatttcccgtaaccgcaggcccagacggacaaaaccatacatgttcatctttttgtccatgctgcagatatccaagacgcaagacctacgtgtgtgttacaatccccggacagatccatgctagacacgcatattcctacagataccccaaatgggcgcccgaat

SEQ ID NO: 129863 - DNA, 674 bp, Arabidopsis thaliana columbia
cttgacgtcggatgcacgctgccgtcagccgggatcctgtatagcggacgcccttcgtccttttttttctttttacgttgtagcctgcgaacatagtacagacaaacccatataacaagaacaccacattagaaaaagacaagaaattaaaaactctaaaaacaaacattcgaacatcttatttaatattaatgtcatccattatataataaggattcgaaacttccggtagtagcatcatctcaccgttgctagctcatcacctaacggttttgcagttggtgctggtgctgattttgtaaggaatattgactccacatgccttaggaattccagctgcacggccagcgttgagaccagagcctaaggctctagcggaaccttgaatgcaattgcaagcttgctgacggtctggggccgtcttggctatgctgttgaggtttttaacgccggagcaacacgctgggggaatgacaccaccttggagcacgtagccaatgcacgctgccaagttgctgttaactgagccacagcttagcgcagcgttcgatgtgattggaccggccacaatcatgcaggccaagagcaagcatgccaacttcatcactccagccatattgatctcttaggtagggttttatgttcgttcagacgcatgggtcgacccgggaatt

SEQ ID NO: 129864 - DNA, 649 bp, Arabidopsis thaliana columbia
  unsure (1)..(649): unsure at all n locations
agactatagacgagcttgacgtcgcatgcacgcgtacgtaagcttggatcctctagagcggccgccctttttttttttttttgtttctttttnggcaggccttgaataattacacggcgctcgaaaccaatagaacagaaatatgaaaacgaggtactccgattaacacactggtttcatgtttcattaaaagacgcgatataaactttttacctaccagagactccacgagagctctggtacttcttggagggaaagctataagggtctgtagagacatgaccgccttatttttcgatactgatagcatgaacttgacatgttgctcttatgcaaaacggtataaaaggtgatcgttgaccccgttgatgacgatcgcgattttcccccattggtattgacaggtagccagctctgaacaagagctttgatctgcatccgtgagtgcacattgccatatacccagcttacaacagaaacgtgctttgcttaacatccctggccaaacgacttagagacacttgctgctcctgttgagtgctcctgtgcaaggcttttactattacaccagctactggcaatgatcatcgcagctcggaatactaataccactctactgcttgtacttgacacctcttgtacatctgat

SEQ ID NO: 129865 - DNA, 693 bp, Arabidopsis thaliana columbia
ctatgacgtcgcatgcacgcgtacgtaagcttggatcctctagagcggccgccctttttttttttttttttttttaattgaaaccattttccttatattaatcacattttcagtgtttgatgcaaaagtttaagaaagaagaagaagaaatggagattacagaaatgggtgaaatcgatgagtgggaggaatggatgggattcgaaggagggataccatcaggtatttcttactagatatatatcatttgctacaatggatagtagtagaatcagagagatggagagtacaatttttgggagcaagacaacagttgcatcttggaggaagcttgtcagcgccggaggaaggacatgtcatgtactctacttgtagactagttctagatcgcgagcggccaccctttttttttttttttgaaattgatttattatcattggatttacataaacagattaattccacctcctttacacaaccatatgaagcccttccaatggtaaattacacgtgtcaacattccattagcttcaaccaagataataattactttccccattccgacacacgaaatcatgataaaaaaaattaacgatcaaatagcgaaatacgaaaataaatcaaattctcacattaacaccaaagatttgaaataatttgagggataaaaaaaaaattatttaaaaaaagttt

SEQ ID NO: 129866 - DNA, 689 bp, Arabidopsis thaliana columbia
ctacgacgtcgcatgcacgcgtacgtaagcttggatcctctagagcggccgcccttttttttttttttttttttttttttttttttttttttttttttttttttttttttttgtttttttttttttttttttttttttatttttttttttttttttttttttcaaaggggggcccgaatttttaaatgaggggttttttttttttttcaacaaaaaaaaaaaaacgcatatttttttttttttcaaaaaaaaaaaaatgttttttttaaaaaaaaaagggggttttgtaaaaaaaaaaaaactggggggccccctattttcaaaaaaaaaaggccaaatattttttttataataaacgggttttttttcgaaaaaaaaaaaaaatttttttttttcctaaaagagactaaattattaacagccttctgaatatctctgggaaatgcaccccgggagaaaacaacaccattttttataaaaggtgtacaaagaagtttttttcattttcaatacaaaaaaagggggggggagaaatttttttggcccccccgaaagggggggggaataaaatttggtctggagaaaaaccatttttgaacgagtaataaaaaacactgtgaaaaaaaaaataaggaggttcccccacagcgtgggtttgaaaaaaaaaccccctcctgttcccctagatt

SEQ ID NO: 129867 - DNA, 701 bp, Arabidopsis thaliana columbia
atagacgagctatgacgtcgcatgcacgcgtacgtaagcttggatcctctagagcggccgcccttttttttttttttttttagttagaaaggagtaagctgataatgcttaactccataagggaatgctccatcatgcaacagtgaatacttttatacaaaccctatacaatgataggttggtgaactattattgtaattcacacccccgaacaatattccaagcgtctttaacaacaaaagaatgcgctatttacccacaaaaaccctatcgtgttgttgaacagagacaatcgccaaccaaaactgatagctcctttatctatctcaaatccatatcctactattacctgactgagcttttgtttgcggaaacaaccatgcacagtcaaatactgtcctttatcgcacgaacaaaactaaaatttgttcctagctcactggatcttcatcggatgagcgtcccagtctcaggaattggagatacctatttgattcatgcagtggggctacttccacagtcactactctacctggtgatattaaccacttggctgttctctacccggggcataaagtgagtgattggtgccgcgactatcgaatgaagaagcacactctcatttgactgctccggtttgtgaggacattacagtgaggactgtcgtgtgtgaagttaacctgatcccggacgcgtgagtt

SEQ ID NO: 129868 - DNA, 700 bp, Arabidopsis thaliana columbia
acactatataacgagctatgatgcacgcttccgtcagcttggatcctgtatagcggccgcccttcctcctttttttttaccgtcgaatgtcaacttatataatgtttaaggcttatttgaaacattggtcagtccacacagattcacaaaaggtattaactagatcacttccactttttgaacttgcctcctacaaacattccatgcttcccatgcttgaacttcccgtgcttcccatgcttgaacttaccatgaccatgaccatagccatagccatgaccatggccaataccgtgaccatatgcagcatgtccgtaaggaccgtgagagctatgagctacgtggtgagctccataggcagctgcagcacctgcaatcatacccccaattcctcctgcgtgtcctgagtgatgagcaggatagccaccacgagggtaaccaccatgaccaggtgcaggaggataacctccataaccaggagctggaggataaccaccataaccaggggcgggaggataaccaccaggagcaggtgggttggcacccggaggataacctgcaggcgggtaagcaccgggtggtggagggtaaccttgttgtgggtatccagcgggtggataagccccagggggtgggtatccagcgggaggatacccatgaaaccctttgtctttgtcattatcattgtcacctcccatgt

SEQ ID NO: 129869 - DNA, 703 bp, Arabidopsis thaliana columbia
agacgagctatgacgtcgcatgcacgcgtacgtaagcttggatcctctagagcggccgccctttttttttttttttttttttttttaagctgttggccaaatacataaaaaatcgagaagggatgttgcccccttggggcgttacacaagaatctggccacaaaacaacatgccatggtcaacttgccctcacaattggagaatgaaagaaaatcgcatgcataatgggggaccattgaatttgctgttttggcatcctaaccctatagagacttctactatagacagtcccctatctattctatttgacccttgccccccacggacagcctgagactattatgtggttgtgagcgtttaagtgcgcgctttggcctatcctaaggaattgctgaccctctcggcttacaagaaacatgctggccccttaatatacagaagagttcctttgcccgcgtcccagactgatgatagggcaatatgactcttttatttccggggtgcgatggtcctacccagttgaatacttgacgcggtgtttttaaacacttagcatatacctttccggaacggaactttttgggttggtcatgctctcacactcggttggagtaacccttgcggatcatttcatactattttccgggcttcccatgagttcacttgcgatatcaatcttggccaaggttttaaccccaaggcc

SEQ ID NO: 129870 - DNA, 703 bp, Arabidopsis thaliana columbia
ttagaacagctatgacgtcgcatgcacgcgtacgtaagcttggatcctctagagcggccgcccttttttttttttttttttttttttaaaacaaaaaaatggggggatcgcattatatatacacagagtttaaccaaccaaaacattacaaaaacattaaagacaaaatactgtaaaataaaaaacaatcttcaaaacataaatatgctcatgcatagacagagggaacctcaaaaaaaaaattatttagcgtagtagccgccgattcacagccggaggtggcggtggctgagcttgaaccggagtagcttgacaaggtgcacctccacctcccccaccattactttcccaaggcttaacagtaaacaccacatttaaaaccacaataatgagcaatagcaaaatggcaaagcaagtccacttccgtgtgttcttctgataaaaccgtgccttaacaagccggtccgcaccagaccgaacaagcgagttagctcgtttgacgttgccttcaatgtcatcaagctgtgcaccctgatgctcaaccaacacagccatatcaagaaacacttggtgcaactcattcaaactcttctcaatatctttcactgcgtcgtgcctctcctgtatctcgttaatagggtccaaaatcctaccacgaccttgttcttgaatcgctttctgcaaaaatgtttcactttcacct

SEQ ID NO: 129871 - DNA, 697 bp, Arabidopsis thaliana columbia
atagaacagctatgacgtcgcatgcacgcgtacgtaagcttggatcctctagagcggccgccctttttttttttttttttttttttttttttttttttttaattatatatattttcttatattttttttgtatcctttactcgggaacctgaatatgaaaatactcgaaaaaacataaattttctttgactaaagctaggcggccaaaaaacaaaccaaaaacattgcggaaaaacaaaaaggggcctttgcgcttcccaatcccggaaaaaaacacacccccggaaagcttccaactatttcaaaaaaaagagattcgaaaaagggattttttatacaaaaaaaacctagcttcacatttaaaaaaaccctcttctaataaactgtggtttcgacccccttctcccttggaaacacagaagaggtgacctcagccgccctaaaatttcccgggcgcgtgggttgaccctttaaggacaaaccggttcttgaaccccaaccagggttaaccaaagggagtgacccctttggttggggaaatcttttttttaccctggtcctgtaaaaaacaaaaatccggggacccccccacactacaggctagccttgagaaaaaattgtaaccccccccatgccttttgaagggccccacttaaattacttgcggcaaacccactgcccgggggctcaccccgaa

SEQ ID NO: 129872 - DNA, 688 bp, Arabidopsis thaliana columbia
  unsure (1)..(688): unsure at all n locations
cctatagaacagctacgacgtcgcatgcacgcgtacgtaagcttggatcctctagagcggccgccctttntttttttttttttttttttttttttttttttttttttttttttttttttttttttttttgggggaaaaaaaaatccttttattccttttcaagaaactttaaaaaaaaaaccttccctcagagaaattttttggggacaaaaagaaaatccccaactttgcgggaaatccaaagggggcttttgcctttctttttttcaacaagaaaaaaaccatttgcctcaaatcttccttcgactaaaaagatttttaaaaaagttttttaacccaattaaacccccccctttttaaaaaaaaaaaacgtttccttgttcaaataaagctttttttcacttggccctggcgaactgggagcggatgaactttaccgcattaaccatttttttgagcgcaggcttgacctcggtgtgcttacgggtcttgggacccccggcggggtttacccaaaggatgttctgcttttggacagcaagcattttgttgaccctgtctgcgatttcctcaaaaaatggttttcttggagagggggtggcgtaaactcctggaccaatttcagcaccattctttactcctttacggaacacggaaagaagctttttattataccggacgcgtgggt

SEQ ID NO: 129873 - DNA, 1076 bp, Arabidopsis thaliana columbia
  unsure (1)..(1076): unsure at all n locations
aacaacggaaaggccggcggccccaaaagaagcatcttaagtttttggaagggagaaacgaagcgaaaactcacagagaaaggggggacgagggagaaaaagagagggggcaccacaaaaacaacaaagcgacaaaaaaagcaaggcccggaaaaaaaaaaagaaaagtcgnaacagcagaaaacacgagaaagaaagaacaaagggaaagacgaacaaacgaaaaggaaggaagagaaggaagagcacacgagacagggcgcgaacagaaaaataagaaaacgaggagaaagcgcgagcgcaaaagcgcaaggaacagagaaaaaaggaagggagaaaagagcaagagagaacggaagcggtgaaaagacagagaagaacacaagaggcgaaccaaacaaaagtagagaacacaccgaagagagccaaatagcgcggtaacgagatgacggtggagatgactgaagagagagaaaaggcagaggagatgacgacgacgagacgatcgtgaagacaacgaaaacgagacagagacgacgcgaagagaaggagatgacaacacacaagcagaagatgaggaggccgaagagcgagaggagaaaagacacaaacaccagaacacggaggggcccacagcgggagaatgaataggaaacgagacacacagaatgccaagcgatcaaaaaaaaagagatcaccaaaatgacaggaaagagagacgtgcaagaaaaaggcagacgagtaaggagagagagacacgaaaaacatgacccgcaagcacgcacacatgagagaggcacgagcgcacaggagagagagaaatgcagaacgaacacccaagacggaaacagagaagaagcacaagagaccgcgggaaagaagacacgagcacaccggaagaaagagagaaagaagaccagaggagaagacgacgaacgacaagcaaagaaaacgggagagcaagaacgcgagacgaaggaaaacgaagaggaaaaaagagagaagagaaaacgagaggagtaaacacacaaaaaagagagaagggacggaaaacgaaaagacaagaacacaaaaga

SEQ ID NO: 129874 - DNA, 698 bp, Arabidopsis thaliana columbia
  unsure (1)..(698): unsure at all n locations
cactatagacagcttgatcgtcgctgcacgcgtccgtgatcctgtataccgtacgccctccgccctttttttttttttttgttttaatnaaaccaattagttgaccaaacgcgggattgcttgcaccgggtattggaaaaaaaaagtcccctcaaaaaagaccaaactgggggttttctcccagttatttaaaaggttccagttccaaaggtttctgttttacaacaaaaccaaatcaaaccttgtcttttgcccaaaccccatctttgatttccccaaatcaaagcccattttaaagccttttaatggtggcccacccattacaatcggtttgactcgatttgacccgccgtaaacaatccccgagctttggactccaccaccaacttccaccattaaatttttcccataaatcctccaccgaaccatttaactttgcaacgcttaatctaccgccggaaaatttccttcactagtgaagcaaagcccaaccggtgcgacaggaggcaccgatgtaccttcactcccagttttggggtaagcttccgcaaacaccttggaaatcgagctctctaaaatcgggtaaggaaccaccgggctcagttccaccggcaacggaccttccacggagagcttttccccgttgactctaattgatttcccgttatttacgtattggccagtcaacccggttaact

SEQ ID NO: 129875 - DNA, 697 bp, Arabidopsis thaliana columbia
actatatacgagctatgacgcacgctgccctcagcttggatcctctagagcggccgcccttctttttttttttttatttttcttttcactcagcgaaactaactttaataaaaactcacggtaaactgcttcaagttttctttacctagaggcaaaaaagaaccaacacaacccacaagcattgcaaatgctctgaatttgacctaaaaggactagatttatcaaggcccacccctttgataatcggctaacaacaatggctccgtgaaaaagaggaaaatttctgctcccctgtgagtttctccacggaattaaaagcagcggacgaccattctttcaaatggtcaagctcagtttttacatgatcgatcttgagtcccatggatcgttgcagagattccgtctccttctaagttgctttcccgagcaaacatcgaaacatttccaaaacctctgccacggtgtctatagcgcactacgcttcttctttcgaccaaaccgcggtcttccaaatcataaacatctcgatgtcttcgcgatctcttgggaacttgatattaaacccgcccactaccttgtttacatatgacggcgaaccgctcctggagccggggctgaatctcctgtgattttccaggaagaataaagagctgtttgggatctggaaaaatagggagctccatgatgatgatgacgt

SEQ ID NO: 129876 - DNA, 549 bp, Arabidopsis thaliana columbia
agcacgatggagccgcccggggcccagggcaaggatagtttgaggcgaacaagaagggggaaggaaaagggccaaaagaggagaggggagaaaagggcacgcaggaggaaaggggaggagaagaagcaacggagagacggagaggacgagaggacgagagagaggcgaacggggagaggggaagggagaaaagcggggggagagaaggaagcaacagggggaggagaaaggaaggggcagacgggaagaaagaagagcagagaacagcaaggaggcgggagacccggagaaaggaaccgggggcgagaaaagcggggaccgagccggccgagcccggggggcacaaggcgccaaggaggccagcagaaaagggaggaagcaggacacgcgacacgggagagaccgccacgcgaggcgagcgagcacagagagagccgaaaggggaggggaggaagcaacaagggcgcgggaaggggcggggagcaaagcgggacgagcaccgggcaagggcaccgaaaggaagcgacgaaccaccgcggaagcgcacca

SEQ ID NO: 129877 - DNA, 693 bp, Arabidopsis thaliana columbia
  unsure (1)..(693): unsure at all n locations
gacatatatacgacgtctgatgcacgcgtacgtaagcttggatcctctagagcggccgccctcnnncttttttttttttttttttttttagaaagacaaaacgatatttttagaggattgggggatttactatcaggataataagatagtgtctcttaagggtgacctaaaaaaaaaataaatgcagaatatctaccaaaacaagatatattcgtgccactaaaagtattaccaatcgaaaattaagaaatatatatctctatttccttgattgggagtttagagagtaagagataagattcaaagtcctccaaagaagttttttcactcttaaccttacttgctgctctcattaaggggaagggagactccttctgctgccaaccaaatgttatccgccttcttctcccgaattccacacacctcttgctgaccaccagctatacgttggtacttcttgtcatggctatggaggtagccactattgtctatgtgttgaagacggactctttggtcctgtttccatgtcttcccacttccttgaattataagcttccaatgatccccaatatcggaatttgtatcatttccaaagcagctaacctttaaattccccggacgcgtgggtcgacccgggaattccggaccggtacctgtaggcgtaccaactttccctttagtgagtggtattaa

SEQ ID NO: 129878 - DNA, 399 bp, Arabidopsis thaliana columbia
tctctaccacatgagggccccacgacaagcgccaattttaaaacaaaaaggaaaaaacccgcaaacccgaacgaacaaacccagaacagaggcaaaacagaacggaagacagggcggaaaggagaaaacgaagccggggaggccacaaacggcaaagaaaaaaaggataaggcaagacacaaacacgaggacagaccagggagcaaccagcaaccaacagacaaaacagaacagcagaaaaaaacgggaaaggcgagacggggcccaacggacccggccgacaaacacacagagagccgaacaacgacagagaagcccaaacgggcaaaggggaacacaaggccaaaggaacccggaaggaaaaaggaacggacggacggaggaaggcgggagagcccc

SEQ ID NO: 129879 - DNA, 751 bp, Arabidopsis thaliana columbia
  unsure (1)..(751): unsure at all n locations
cgttnnnnnnnnnnnnnnnnnnnnnnnnnnnnnnnnnnnnnnnnnnnnnnnnnnnnnnnnnnnnnnnnnnnncttttttttttttttttttaattaattacgtggcgctaattaagttattaataatagtcgacatgggtttccggacaaatgtcatctgacaaaagttctttgcggaaaggcggaggaagaaaaggaggacgagtacacatgagcaatgcccaattcactccttggaaaaatggatgacgtttcacggccgttgcacctagagatgaccctaaccgtcggctaggatccttggcaagtagctgagagatcagatccttggccgcgcttggaatcgttggttctttcgggaattcgagtgctcgagccacgatattggcaagggttagctcgtggtccattcctttgaacggtgttgttccgtataacagctcgaacatgaatatccctaatgtccaccagtccactgcactaccatgtccttctcctgaaacaatctcaggagccaagtactcatgcgtcccaaccaatgacatggaccggacatctacaggtttcagccccaagctcaggaccgttgttacggtgaaccgttttctttttacccctttggattctcgggtggaagcaagaaacagcagggacaatacagttagggatcctgcaagaggatgaagtggtttgacggtgggccatgccctggtttcgttctggtcagaccaaccattaggaagattgttcg

SEQ ID NO: 129880 - DNA, 973 bp, Arabidopsis thaliana columbia
gagaggggaggaaagacaaacgcgaagacgagcaacacaccaggaagaccacgaaccaccgacgagtgacatcagaaagaaacaaaaccgagcaggacagaggaaccataccccacccggaaggagaaaggttgaagatcgaaaaccattgccaaagagcagaagaaacagaagaacgaaggcaggaaagcgaaagagaggacagacgcgacgaccgagacaaaacttcgccgaaaacgagcaccggagagaccaagagagaggggaaaaggggagaacgcaccaagagacaacgccgagagtaaaacaaccgagagacagaaccgacagcagacagaaagaggacggagcgagagaacaaacagagggcaggagggacacagacgggagcaacagaacaaagaaagaacgcccaccgggaaaaaaaagggggagaaccgcgacagaaaggggcgcgaagagaccgaagggacaaaagagaaagagaaagcggaccgaggccagggagaccccccaaggggagacaggagacgcagaaaccaagaacagcagacacaaccgtcaaggcacaggggacaaacagcacgacaacgaaagggggcagccacgcagcgggggggaaaagaccccagaagcgggccccgacgaagaccacgccggcggggggcagagggccacaaagacgtcgaaaaagagcaccgaaacagagagcacataaggaagaagagtacaaaaccgaggaggggagggacaccccagacgagacaaaccagcagcagcgcaacacgacggaggaacgggcagggcccccaaaagacaggacgcacgcacgaagaggaaccagaccacggacaaggcagggaacgcggagaaagacgaggacgatgaaagggacgaggcggacgagcaggacaagacgggaagaagcacgagaaccacgcaaaagagcggaacgccaaaaacgcggaaaaga

SEQ ID NO: 129881 - DNA, 757 bp, Arabidopsis thaliana columbia
atgacagctatgtacgtcgcatgcacgcgtacgtaagcttggatcctctagagcggccgccctttattgttttttttttctctaaaatacctgtccgtaaatcacacgtttgacaattcgatataaattgagtcatattgagaaaaggaacacacacggtaggaaatgaaatgagcggaaataattcataacaatgtttttgaaaagaaatatagcttcggggaagcttgggggcttgtccggaagggaactgatgcattggactttacgggtgttggcgaatcccataatgctaatgaaggcgcccgggaacccctttttgcattcttcaaattgcttcaacacttgagcggagtgagggcgtccgaacaatggacgcttccacattgttcagttccgcccatcgtaatatccgggagtgttttcgtgctcacgggtcacacatacggggctcttactcgagatttcacacacggaattcaccttgttggggagaaagtatgcaacttgcttagcccattgggcatttctaaggtctgggaggtaagaatagagtcttacacttcttttttatccaagggggggcacaccttcctggcctctgacttttccccccttgcttcccatggcaagtgaagcccttgctgagcccttgcggtgaaccggacaatgcccctgttgacttttacccgggtaatggggcgaccctggtgggcctgtccggggaattttaccacccgggttgggggagaactta

SEQ ID NO: 129882 - DNA, 695 bp, Arabidopsis thaliana columbia
  unsure (1)..(695): unsure at all n locations
nnnnnnnnnnnnnnnnnnnnnnnnnnnnnnnnnnnnnnnnnnnnnnnnnnnnnnnnnnnnnnnnnnnnnnctttttttttttttttggaatatatataaagaatgctgtgtaacattagattaatctcatgtcgaacgcccatcgatggcatgtgagctataagtgtcgaaagagatactcttgctcattaaacccccacaaaacacactcataccttgatgtacactgactttacactacctcttaacggaaatcatggatgataatggttatcggactttaagcttgtccagttaacatgtgcaaagtgtgtaggattttactgataaagccgatccgcaaaaatataggattgattgacccatataacaggaacaagtcccgccaaattcccatctctttcaagccgtttcttctctacgtaaaaccgggccatcaacttcatactctatctaccatttctattttgccgtcacggttaactgataatcttcttctgctgcgatgtcataaagcgctgttccaaatcttgacaccgacgatttcctaaggacttcatcagatgattaaaaactttggagaaccagagcctgctgcagggtttttgaaggtattacgactatgcgggtcaaaaagctaataaagcggaggaggccctaatctaatcggggagccatagactgaatgtgtggac

SEQ ID NO: 129883 - DNA, 610 bp, Arabidopsis thaliana columbia
  unsure (1)..(610): unsure at all n locations
tcnnnnnnnnnnnnnnnnnnnnnnnnnnnnnnnnnnnnnnnnnnnnnnnnnnnnnnnnnnnnnnnnnnnnnctttntttttttttttggttttttttgggtcataaacttttgagggggaagaaacttacacattcagagaaccgacctttgacttctaatttatgacccaattggacatctgggtagttgccaaaactttttttatttccgggttatattaaccttgcacatgattcctggctgatgagaaaacgatctttgtcttcatgaacacaccaatttgttcttgggtgtatgctcgtggggatgggtttatatgcacgagattcccacactgctccttataaagagaacactactgttgaaacacctacgggataccgcgttagttcaccttgtggtacccttaccactttatggaaatgcctaccacctttctttggagttctaaacaaaagctcttgctcaaagggttgagcgggaaccccttaagggtgccatgggaagaagagcctaacctctgaaaaacgtctctctttgggaaataatggtaaaaaccatccgagaatcgtatttgaaaccgggccttggaccctaatttggggggg

SEQ ID NO: 129884 - DNA, 710 bp, Arabidopsis thaliana columbia
  unsure (1)..(710): unsure at all n locations
nnnnnnnnnnnnnnnnnnnnnnnnnnnnnnnnnnnnnnnnnnnnnnnnnnnnnnnnnnnnnnnnnnnnnncttttttttttttttttttttgagtaaaaggaattctcatttttataaaaccgtaatttcgactttagtaaaacaactgcatatcgaactgaaaatgccttagtaaacaacacaggagcacactggacaaaaagaagaatccaacgttggccgagacatctctatggagacctccttctgctgctaactggtgccccgacttgggcgaactcgggaggagccatggcgtcctttgcggttaatccgtttggaggaccataccggaacagcttgtccaaatacccaatcgcctcaggtgacaccaaatgcctattggcagcggtgatgaatctggaccacggcttcctgctatgtttcccaacaagggcctttagttgagtttcaaggtctaactgatactgattccgatgtgcattcgggttatcagggaccgagtaccttggccattgtgaccagctggccccgggtgccatggccagagaagaatggtccccttgcggaacattatcccatggaacatgcaagcgaaggttcacatggccaaagaacagcgataggtccgggagggcgctataagtccggggaccttcgaagtatcttgaggccccacggacgttgggctcttttccaggacgataaa

SEQ ID NO: 129885 - DNA, 1553 bp, Arabidopsis thaliana columbia
  unsure (1)..(1553): unsure at all n locations
aaaaggcaaacgaagggcagaacgccacggaaagaaaacgaggaccgccagacatgcccacgaacaacatcacagaaaagagaaggacaagccacagaagagacaagaaccgacatgaacaccccacacccaaagcngagagcaaacgacttgaaaggttcgatagnaccaatcccgaaaggaaccgagaaaaagaaagaaggacggcagacaagaggagagaagagacagaaccgacaaacaccacaagagacaagaggagagcgatttacaagacacaaagacaacaagaaacaacgagacgcagaaaacccgacagaggacaaagggggaaagtacacaacaagaacacaaaagaacaaacaaaggacaggagccaaccaacaaggacgaaacaccaggaaagcacaaaagcaaacagaacgagccacacagaacatgaaggcgagacgaacataacagaccaacaatgaagaagaaaaacaagatgacacagcagagtgacgcagaccaacgagagacagacagacgacgatacagcaagaagcaatacgaacgcaacgaagccgacgggaagaacgaccaaacacgaaagacggacgggagataagaatccgcccgcacgaaacagaaacaaacaccaacagcgaacaacgaatggaggaaagaggacggagagaaacggaagaagcaacgaccacaacgagccatcgagacagacgccgaccgaacgagaaaaagaaagaccgcagacgaagaggcagcaccaggctcaaaacgaaaagcggcgagggaacagagataacactaaaaaaagcgagaacgaagaaaaacaagacaaacaccacgaggaataacgaaaagagaaacgcaaaccgaaaagaacgaacaaaagcatcgaccaaaggccaaacaaaagaacgacaacgaaaggacgccacagcaccgcacgcaggcagaaacacacatgacaagacggaccaaggcgacgacgacaacaagacgagtgagacaagaaaacaagctaggaccacgggagcacacaggaaaaagaagacaagcagcgacgagagggaggaaaaggagacgaccacgatggcaactcacgcaaaaaccagcgagaaggcaaaagacggagaaggacaggaaccgaaagagaacagaagaacgaaaaacacacgggcgagcgcaagacaaacaagagcaaaacgagcaagaagacgagaaatagcaagaaggagaccagaacagagacgacgcacgacgacaacgaggaacagagcgaagacacgagagcgcagccagcacaaaaagcaagaggaagaagacaagaagaagagcagaaagccgaaaaccacgaagaacacagagaaacgacgaagatactgagcaagaagcgaaaaaacagaggacccaggacagaaccacgagaacaagagaggcaacaagagaaggcggaggaaaagacgtaaagaagaccacgaggggcacagacgacggagaggagaaggaaagaacgagaaggagaacgagaaaaaaggaacaagaagacc

SEQ ID NO: 129886 - DNA, 747 bp, Arabidopsis thaliana columbia
  unsure (1)..(747): unsure at all n locations
nnnnnnnnnnnnnnnnnnnnnnnnnnnnnnnnnnnnnnnnnnnnnnnnnnnnnnnnnnnnnnnnnnnnnnctttttttttttttttttttttttttttttttttttttttttttttttttttttttttttttttttttttaaaaaagaaaaaaactttttttccttttaaacatgaaaaactttttttccccagaaaaggcctttgggccccaaaccaaaaaattctttcaaaaaaaaatggttttggccaaaacccttctaaaaaacaccccccaaatttttccaaaaaaaaaataacccaacccgttaaaaaggtttaaaaaaatttttttcccccttttagggtttcccaaaaattagtttccatccccccctaaaagcttttggggtttccctttttcctttaataaaagggaccccctggggggggcttctttggaggccccccccttttgtccgtttgtccccatttggggttggggttccccccttttaaaaaacccgagttaaaaggggtaaacctcccaaaaattaggcccggcaatttaagcccaaaattttgaaccggcgggggttgaccctaaaaaagaccccccggggggggggcttccttggggcgggcccatggaaaaaaaaaaccccgttcccccaaaaaaaggggtgttttttcccctcccaccttccgtttttttcttcacaaaagtcccaaagggcccaaaaaaagaaacccggggccccgggggggg

SEQ ID NO: 129887 - DNA, 695 bp, Arabidopsis thaliana columbia
tacactcatttacgagctatgacgtcgcatgcacgcgtacgtaagcttggatcctctagagcggccgccctttttttttttttttggttttttacgggacataaacttatgacaaaaaatttctcgaataactaatgccttcggctgcaaactttaatactactactgaaaacactcatatggatagattagtttacgaggatgccctgagactctgaaaatctttcccacaaaagactgaccaaacttgcaattccccggaacaatgtttcactacttctagcttctacggtcactgttcgtgactctaaaagaaaatgactgaccaaccaaaactgattcagattgccagtattgacccgagataccacttatggtcaaacaggaagcttggggtccttttacaccttgccgcactattttttcggccccatcgtcctctgtgactagaaccaacttaagatcatggaaacacgtttatgtgaaccttattccttctctattacggcatgggactcggcgctattaggcggggactattccggtccaaaacccagcgattttgctaaaaataggcttaatctgatcaaaccagggttatgtgggtgccaccaaccccctttggcactacagtgggcaagccccggtgacaagaactagtccagcgatgaagattgcatgacttttaaaagggc

SEQ ID NO: 129888 - DNA, 718 bp, Arabidopsis thaliana columbia
  unsure (1)..(718): unsure at all n locations
nnnnnnnnnnnnnnnnnnnnnnnnnnnnnnnnnnnnnnnnnnnnnnnnnnnnnnnnnnnnnnnnnnnnnctttttttttttttttttttttttttttccataaaaatagttgtctatatttaattccggtaatctattgggcaaacatcggctaaatagtaattacacaggttcttttaagttttaacaaatcgaaacttacttcataatgtgaagagaggagataattcaaaagttactaagtgtcgtttagcgcccatgcaaaacaaatggttctgtaaacgtcaatgtagccaccgaacagggctctgcaagggactcagctgcttcaccgaagccttcaatggctccaacgttctccctagctttcacaatgtcaaacaagttgtttggtagctgacccacaccgtccaaaaactggatgacgctcgacatgcttggtctgacggctgcaaccggatgcgaacagaacaagccgagcttaaaaaccagggctacttgctcctcaaggtacttatcatcctgctttaccctttcattaaccccttgcaatatgtcatcttcccaacaatctagcccccaatccgtaataaccatctcgcttggcgaaaatgcctcgggcaagacggtttttcccccgcaagtaatctttaacattagtattccaaacgcgaataccttaaaacttgtgcttgccttccctgttttgaaagcttgg

SEQ ID NO: 129889 - DNA, 749 bp, Arabidopsis thaliana columbia
ggagacactctttaagagctatgacgtcgcatgcacgcgtacgtaagcttggatcctctagagcggccgccctttttttttttttttgttttttattttttttttggaggtggccaggatttgaagtaaggaggtttacagaagttccaaagactgggcttacccctcgatagaaccaaagggagtctaggaattttgagacgtttaaataagcacaccaaaggcctgaaattaccgattttacccggcctgttgactaacaggccgtttgctggcctccttaaaaatgttcaagtggataccttggcccttgggaagaaacccccctgggtttgttcctttgccaagggtgaccactttgcccacccttgtgtcaaactctggcccggtcgaacaatggggggggttggtatcaaagccccccttttggtgctcagggttttttataaaaccaaccggcccttggttggtccctccgggacccaaccccaaatggccaacatccatctgatggagcccccaaattttcttggcccaaagggaaaacttaggggggtcatatggctttaagagcgggttagggaaacggatggggcaaccattttaagggttaaggtaaggaatgccttttttcccaaaccggttagaaagaacctttgaaagattgaaatttggttaaaaatcccttctggaatggaaaaggaaaccccctttggtttaaaaaaaaaacaagaacttatggggcctgg

SEQ ID NO: 129890 - DNA, 757 bp, Arabidopsis thaliana columbia
gatactcagttacaatctatgacatcttatgcacgcgtgcgtcacctcgtatcctctagagcggccgacctgccgccctttttttttttttttttttttcaaaaactttttttattttttttgggccaggggctttggttcttttttacactgggttttaccatcttaactttcgctagcgtaacaaccaaaacccccattaaaaatttgacacaaaggttttggcaaaaccgacttaaaggcttgatcaaaatagctgcaacaatgttccttccaagaacttttcggggattgattccttggaacccaaaaaaaaaaaaagccctctttgatgaattgccaaaaagggtttaacccgggggggtaaaatttaccccttaaatggcgggttggggtcaaaactgcctatgcctaatccaaagggtttaaaaacctttatagggggagtgaattatccctggggaaaaaattcctacccgttttgcccaaccggtagaacacccctttttgttctttaagcggggcttacaaaaaaagcgtaattcttttcaaaaaattggaaatttttaaaagaaaccccaggaactatttccttgaagggggagccccaccgctgggggagtttatgccccttagggagggttttatctgagaaaaaagggggggggcctataagctggaaaaatttacgaaaccttttgggaacggagaaaagttcccccttttgggaagggatggaaaaccctccttttttttc

SEQ ID NO: 129891 - DNA, 748 bp, Arabidopsis thaliana columbia
acactatagaatactatgacgtcgcatgcacgcgtacgtaagcttggatcctctagagcggccgccctttttttttttttttggtcattacacaaacaacaacatttaaatgacttggggttaatctaccatgttccaagacccgaaaatttttttatcagagtgcaagggattaattaccggcgtaacccacaacatagtgtgataccaaatggacaaatgaggcctcattatacatggcacaaacttgatattcgtcctatttccgaatggcataagctggcatttacgataactgggttataccataaacaaattcggaagaccctgccacacacatgggacttgctggaccccatttaatgaccgggggctggctccctaagcccattcaactatttacctgctttgcggtacttacaccccatgcctgggtactaccatgacctgaacctgaatcaacaaacggcccttcaggactaaaggctttattcaatgtatattcttcaattactggtttcacactaaaagtggacagaatagttccacgatactaatcaagctcatgaataaaaccctccatggtttgaaactgggggagcctttgattaatactaaatttaataacatttggctgaaaaagatccccacgacaggaaattatttcaaaggggcccttttcgtgcctaccggcattgaacctttttatgtcaccaccaaatggcaatgcaaaacttaacccttggtt

SEQ ID NO: 129892 - DNA, 667 bp, Arabidopsis thaliana columbia
  unsure (1)..(667): unsure at all n locations
nnnnnnnnnnnnnnnnnnnnnnnnnnnnnnnnnnnnnnnnnnnnnnnnnnnnnnnnnnnnnnnnnnnnnnctttttttttttttttggtctccaaaagcccatagatttatatgttaaaacacaccaaatgcctaatgccttcagctggaaatgagggctcatataaggaaaatcctaatagggaatgatgaacatgcgcttatgccctaacactatgagactttttcccatgaaaggaagaccaaacttccaatccgactgagcaaggtcacacaaaatgactgttctactgcctctgcttgtggctctgacacaaagcgactgaccacccaaaaccgagttggacagccaatcgagcccccagttacaactgatggggatccaacaagtatgtgtacctctcacacctttaccggacaatgtttactgcgccaggcacttttgccgagtagaacccaggctagcttgcggaaaccgtagtttgagaaccttatggctacttaattccggcttggcactcagcggaaagagacggtgccaatttcgggacaacccttagggattttgaaaaacatagggttagagagaacaaaacgggggactgagaggggtacaacaaccaccgtggttactaggctgctcgaagctcgggcgacagaaatagtc

SEQ ID NO: 129893 - DNA, 761 bp, Arabidopsis thaliana columbia
  unsure (1)..(761): unsure at all n locations
nnnnnnnnnnnnnnnnnnnnnnnnnnnnnnnnnnnnnnnnnnnnnnnnnnnnnnnnnnnnnnnnnnnnnnctttttttttttttttggtcacacaaaaaacataaatatatatcttaaaaatttttaaatcactcaagcctgcggatggaaattacaattgtaataatgaaaatactaatagagcaagatgagtgtccgaaaacgccctcagactctgaagctctctcccatgaaagggtgacctgacttacaactgagcggagcactgtgccacaacctaaggcttggaccggcacggcttgcgactgtgaacaaacggggctgcccaaccaaaactgggttttattgccggttttggcccccgttacgactcacggccatacaaaaagtttgggttcctttccaccacctagccgcactaatgtgttccggcgcgccgcgatcgttagcggctaaaaaacccagtttaaaaacagccggaaactcgtagatgcgagaacccttatggccttgccatgtatagggcctggcgcttcgggggatgggagcacaggtgacgaattcgcggggacaaacactcagctgatgtttgaacaaaaatatggcattactagggatcaagaacggaggttctacgaggggttcgaccccaccccccattggggactgggggtggccttaatggaggttggaccagaactcttttcagaatgcgttaaagatggaatgacctccccggaagggacccattttggaaaca

SEQ ID NO: 129894 - DNA, 766 bp, Arabidopsis thaliana columbia
  unsure (1)..(766): unsure at all n locations
gttacactcnnnnnnnnnnnnnnnnnnnnnnnnnnnnnnnnnnnnnnnnnnnnnnnnnnnnnnnnnnnnnnnnnnnnnnnctttttttttttttttggtctcttaaagaacataaatttatatattgaaatttctcatattactaatgccttcggctggaaactttactactaatactgaaaatactaatattgatagatgagtttccgataatgccctcacactctgaagttctttcccatgaaagtctgaccaaacttgcaattcgccggatcaatggtccccgacttttagctcctacggtcactgtttgtgactctaaaagaaaaagactgaccaaccaaaactgatttagattgccagttatgtccccagataccacttatggtcctccacgaagtatgtgtttctttcacacctagccggactatgttttcggcgccatctacgtttgtgactagatccaagttaagattacggttacccgttgtttgtgaaccatataactcctctattgcgggttgggaactcggcgatagagacggaaacttattccggcacaatactcaaagattttgggaaacataggctttatcatgatcaaaatggggtttaaggggggttacaacaaccaacatgggcactacgctgagctaaacccggaagacacaaattagtccccggggggaaaactggatgtcctccaggtggcgccattctggattggttgcccatttgacctcaaaaacaagctcccaagcttaat

SEQ ID NO: 129895 - DNA, 1174 bp, Arabidopsis thaliana columbia
  unsure (1)..(1174): unsure at all n locations
cttgacgtcgcatgcacgcgtacgtaagcttggatcccctagagccgccgccctgacgcccttttcatgttttttgggtttaaacaacaaacatgcacactaaaattggggcaaatacgcacaggccttaacggcggtgcagcctgcaaattccccacaccaaaaactcgaaatatactccgcccgagactaaacgacgtatgcccgccctatgccccctcaagacctctcttaataaccgctcaaccccatagaaaaccctcagtccaaaccacttccccatggcacgcaaaagactacaaacgaacatcatcaaaccttgctcaccccctacaaaccagcctgggtagcccctcgtcgaacctcgacaaaaagaacaacgtcggaaccagtagccccccccacaaaatcacgtatttctccccattttgcgctaaaatatcaggttttcccccactttcatccgaacctacaattgcgctccaacaccccacagagagggtactgttgtgtatcccacatttccacccaacccccaatacccgtgtactttaatgggtcaccctcgggcccgtcccccatctcttaggcggttcttatcttgcgaccccccaccacttacgcgcactgctctatctaagtactcaacccccggtcataaacaccccggctatacaataacggatgtaaaaccacccaaacaatgttctccatcaacataatacgactttgtgccagacacacctggggcgaccgttntagtgttggtctcattacggagaacccgtaggggcaacccccatttctgccgggtgctaccacgactactcttcaaccgcgcataacctccgtgaaacaaacaccactaaggggcctatttccccaaacgaatcccaacacccctttaagaggcccacgaagacaaggagtttataccaacccctaatcccccccaccctttggcccaaacctcatggaggagggataaccccaaagctctccggcaagagcacactgataccatccaacgttcccccacgaatcaatattaagtaaacgggaagcggacccttactccaagaatatgagtcaccccacatttcctggcacaaccacttatagccaccactttttgaagaccagaacgaacccaagtcccccccaacacgcctat

SEQ ID NO: 129896 - DNA, 942 bp, Arabidopsis thaliana columbia
  unsure (1)..(942): unsure at all n locations
aaaaggctgagaattcgttnnnnnnnnnnnnnnnnnnnnnnnnnnnnnnnnnnnnnnnnnnnnnnnnnnnnnnnnnnnnnnnnnnnctttttttttttttttggtgtttttaaggataaaaacaaagactttgatattgcctgttgggctatgaacctttgaaggagactaacataccccaaactattatcatggaaaagattaaattgctctatagaaagttgtctggttcaaaaactcttaaaaaaaaagttctgagttaaaccatgggcgccatggtgatggctggaaccaataatggctttgtcgagataaaacccaccacgtttataaaggaaataagtccaccgaacatatctgcagccatgtgagtatatgtgtcttagacctattccttacaccgacatatagggttgttttgcaccgaaataaagttggatttcctatcaccggatgtcaccataaccttgttttttctcgggtaccttgccctgttgtggtattaggagctgacaccctctacacgtaatccttcacttgattgaaaacagtcgaagtatccttaaagcattcagtaacccctccacccgattttgagactctcaagcacattgcagcccctttgtaaggagacatgaccgttcctctaaagggggaactaagagcttgaataagaaataggtttccaaaattcatctttgtaccacatattccacaaacgtataataaggggatatttttgccctgtggtggggaacaatttggaacaactacggtagtagacccttatgaccttgggaaaaaacgctttttgattttcaccagggacttattatgggaatgggcgtggaaaaaccagaattggtttcaatttcagccatcttaggagggggaaaccacccccccccggccgttgaaaatgagaccctttttctttgtgaa

SEQ ID NO: 129897 - DNA, 465 bp, Arabidopsis thaliana columbia
ctatgacttcgcatgcacgcgtacgtaagcttggatcctctagagcggccgccctttttttttttttttggtttcttaaaaaacataaatatatatattaaaatttgtcaaattactaatgccttcggggggaaactctacttctcacatgaaaattctcatattgatagatgagtttccgattatgccctcaaacttgaagttctttccatgaaagtctgaccaaacttccatttttccggagaatgttcccgacgtcgagcttttacgggaattgatgggatttttaaagaaagggactgaccaaccggaattttaaataaatttgcctgtttttgtcccccggtttccgacttcatgggaactttctccacaaagaatgtgtgggcctttttttacaacccttattgcccgccaacttttgtttttttccggggtatacctatgacttgtaacctcctgagt

SEQ ID NO: 129898 - DNA, 733 bp, Arabidopsis thaliana columbia
ctatgacgtcgcatgcacgcgtacgtaagcttggatcctctagagcggccgccctttttttttttttttgaacctttaacgacacgtgtcttaggttttccaacgggcctttattaattgggcctctattttcagtccatattaataacagttgatgaaaacatcatctacaactttgcttcttattattttatttttttcaagaacaaaagccaatattctttttccaagcttctgcattatgaaataacacctccttggttctttcttagctctgtagaggatatatccatacggaatgtatctgctgaaattgaggtaaacattgtacttatttcctttggaatctcatgatcgtcaagaaccttgaattcactatctacattacggccaccaacaaggaacttgcaacctgttcgtttgcaatcacctagtaccttcaacattccttttggggcttccttcattagtactttggattaaccatccttgctgcagtatcagcccccattaccaaaacggcttcctgggaaaaggtcagctttttttgtaaaaaaaaggctgattttgaaactattaccgtcttttcaagtacttcaaattggttgaaccgaactttaatctctgaaaactgaagcgaagggttgtctgctttcagtgcagattttttaaaacatggataccctccttccttaaaaaccattatatgagctttccacagcttgaaatcacc

SEQ ID NO: 129899 - DNA, 589 bp, Arabidopsis thaliana columbia
  unsure (1)..(589): unsure at all n locations
nnnnnnnnnnnnnnnnnnnnnnnnnnnnnnnnnnnnnnnnnnnnnnnnnnnnnnnnnnnnnnnnnnnnnnctttttttttttttttggtcttttaaagaacataaacttatatttggaaattcatcatattactaatgccttcggctggaaactttactaccactactgaaaattctaatactgttagatgatttatggataatgccctcagactctgaagatgtttcccatgaatgactgaccaaacttgcaattcttcggatcaaagtttcacgacgtttagcttctacggtcactgtttgtgactctaaaagaaaaagaccgaccaaccaaaacagatttaaattgcccatattgtccccagataccacttatggtcatccacgaagcatgggtttcctttcacacctagccgtactatgttttcggcgccagcgatgtttgtgactttatccaagttaaacttaccgggaccgttgattgtttaaccttattcctgcatcttttcgggatgggacttcggcgcatagagactgagactattccggtcccgatactcaacgaattttgaaaaaataagcttatcaa

SEQ ID NO: 129900 - DNA, 647 bp, Arabidopsis thaliana columbia
  unsure (1)..(647): unsure at all n locations
nnnnnnnnnnnnnnnnnnnnnnnnnnnnnnnnnnnnnnnnnnnnnnnnnnnnnnnnnnnnnnnnnnnnnnctttttttttttttttggtctcttaaaagacataaacttatataataaaacttctcaaatgactaatgccttcggctggaaactctaatactaatactgaaaattctaatattgatacatgagtttccgatgatgccctcacactctgaagttctttcccatgaatgtctgaccaaacttgcaattcgccggagcattgttccacgacttttagcttctactgtcactgcttgtgactttaaaagaaaatgaccgaccaaccaaaactgattcagatggccagtattgtccccaaatactacttatggtcatacacgaagtttgtgtatcctttcacacctaaccgcactatgtttccggcgccagcgacgtttgtgactaccaccaagttaaattaactgtagaccgtcgattgtgaaccttattcctactcctggacggactggcacttcgcaaaaagagacggggactattccggcacaaaactcagcgattttgaaaaacataggcttatcatgatcaaaaagaggtttatgcaggtgacaccaggcacacattgtcactaggctgagcaaaa

SEQ ID NO: 129901 - DNA, 467 bp, Arabidopsis thaliana columbia
  unsure (1)..(467): unsure at all n locations
nnnnnnnnnnnnnnnnnnnnnnnnnnnnnnnnnnnnnnnnnnnnnnnnnnnnnnnnnnnnnnnnnnctttttttttttttttggtctcttgatggacacccacctaggccttaaaatgtccccaatatcaactgccaacagctggaaacactacatatcgcctactcaaaatactaatataagctccatctagttacgccataataccctccaactctgaagctttttaccaaaaatgtttcaccatactaacaattcgactgtacaaaactacacgacattgtacttccaccgaaagtcgctgggacctctaaaaaaagtgacccgaccaaaccaaaacctgaataaacaatagccaattgtgcaaccctctttgcatactctagtggtaaatgcactcaagacaagtggttgtcttgtcacacgataggcacgccacatatgttctggcggaaacccagcatact

SEQ ID NO: 129902 - DNA, 755 bp, Arabidopsis thaliana columbia
actatgccgtcgcatgctcgcgtacgtaagcttggatcctctagagcggccgccctttctttcttatttcttttttttttttgtcaaaaactctcgagaatttcagcattgtctaaaaaagatgatcgaatacaaactagacaacaacatcttattgatttcaaaaggttacaatattaaaagaggacaacaaaaccggactttacatgctactaccaccttactcgaatagactgaaacccatgtaatcatcggattcttccttttcttccttcttctcttctttcttggactcagcagcagaagcaccaccgcctcctccaccttcaaatgtagcaaaaacaaccggataaccacctccgcctccagacgggactgaagctaacttttccctttcagcagtaatcaactaagccaaatctttttcctttcacttcctttaacaaaagctcaattctgagaatccctctgttttaaacacccaactgatccaaggatatgtctggatatcggcactgggttggtgaaaactttttccggttcaaaacagcgagactattttgctgcaacaaccttttatttttgtggaaactgaaagattctctaagaaaattgggagaattagggcggacgcctgggtcaaccccgggaaatttcggtccggtaccttgcaggttacccagcttttcccttaaggagtccatataaaaccttggcgtaattatggacaaaaaatggttcctggggaaaatgcc

SEQ ID NO: 129903 - DNA, 1008 bp, Arabidopsis thaliana columbia
aaaatgacccaaagaaaactaggccgcacgcgcccgaaagagagaaacaccagacagcccccacaaaaacgaattaaaatttttcaaccaaacacacacggacaaagaaaacgggggaacagcgcacagagcccagcggcacacacaaaccaccgaacaacccacaaagcaccagagaaaaaccgaccagaaaaccacacacacgacaacacggcaaaggaaccaagacccgaacgagaagacccgccaccgcaacaggcagcaggccacgaagcgacacccaacgacgagaggccgtcacatacagaagaccaaagagaacgcgcacaccaacaccacccaaccacgcccagagcccacagagcgaaccaccaccagagccacctatacgacacagcacccaacaccccaacaacgcgccccgcagcacgccaccacacaaaaaacaacacgagacagcacgagagaaccgccaacgcacaagcggagggagggcagacaaagagaacaaggaacaagctaagagagccgaaagccccgacacaccacacgacaacagcaaagaccagggagacaacaccaccagaaaaaaacggagacgggcacagccgcgagactacaacaaacccccagccagacacagacccacaagaccacaagcgacgacggcgcagctcacaccggacgagaggcaacgaccccgacaacaagacaagaccgacctgcaccacaaaaccgcacaccgaggacaaagcgaacagaagcgcacacgacgccacatgatcagaagaacagcaccgccccaacagtactagggccaagcaaaaggcccacacacccatgtagcgacaagctacgaacagaagagacacgcacagcagaggagaaccagaggacgacggagcggagcgcaacaaagcacaaagacgcaaaaccaacagccgacagcagacacgacagaccacacaacacgaggagacaccaaggccgaaccactcaagccatccc

SEQ ID NO: 129904 - DNA, 1001 bp, Arabidopsis thaliana columbia
  unsure (1)..(1001): unsure at all n locations
attccgttnnnnnnnnnnnnnnnnnnnnnnnnnnnnnnnnnnnnnnnnnnnnnnnnnnnnnnnnnnnnnnnnnnnnccctttntttttttttggtctcccaaaaaacattgctctttttttttaaaatttgccaaaagataaatttaccccggggggggaaaatttaattgggcataaagagaaaaactccaaatttggatatatcagactttccctaaattatcctccccaccgcttgtggatctttttctccttatagaggtggccccaaattttcaaatatttcccgggggaattttttttccaaagaatgttacctcttgttgggcttctttttttggtgtttttctcctgggtcaaaaaaaggggggcaccccacaaaaaggggttttttttttttttccccccctttttttttttacccagggccgcaccttaattccggggttctccatccccttggaaatagttttttttgggttttttttaaaaaaactattttttgggccatcatttttatttttttgggaggagacccccccccactcaaatagatgaggggttttcttttctgggcgcggggagaattaaaaattttcattttgaaatgccctgttgtgtttttaaaacaacctttttccgcccccccctttttttttgatttgaggatcttcctgtgggaaaataaaaagaaggggggggattttttttggcccacaaccaaattataaagtccgttgtaataaaaaaaagggggggggccttgcctaaagcatataaaaatgtggggggtcttgaggaagtattaaccccccagacccattttttttgtttgccttttgtcctcttattgataggtgtggggaatgttacattattcccttctttccccagttgaaaataattttattttccggggagccccttataagagttttgttaaccccttttgggggggggcctactcttggcataattttttgcaaaacacaaacatttt

SEQ ID NO: 129905 - DNA, 754 bp, Arabidopsis thaliana columbia
  unsure (1)..(754): unsure at all n locations
gtgagatttcnnnnnnnnnnnnnnnnnnnnnnnnnnnnnnnnnnnnnnnnnnnnnnnnnnnnnnnnnnnnnnnnnnnnnnctttttttttttttttggtcccttaaaacgcattaatatgtatattaaaatctctcaaacttctaatgcctcgggttggaaattttaatagtcttaatgaagatgctcatatcgctagatgatttctccttcctgccctacgactctgaggctatctaccatgaaagtctgaccagacttgcgatataacggatgcctgttccaccatgacccgcttgtacgatcactgcttgtgactcttaaataacgagactgaccgaccgaaactgatatacactgccatgactggccccggtgacaacccgtggtcttccacgaccactgtgttccttttacaccaaagctcactatgtgtccggggcccgcctagttcgcgactacaaccaagtccaaaaaacggaccccggagcacgggaaacttataccaactttgtttccggttggcactcggcggacagagactgggaccattgctggacgaccctgatcgagctaaacaaacattaggattcccagagctaggagaggcctaggaggggggcaccaaccaccattgtcctttggttggggaacctccgaggacagaacttaatcgcggtgatcaagattgaaggactcccctaatggctccattctgggataccttcacatttgagctcaaaagaggcaccaca

SEQ ID NO: 129906 - DNA, 849 bp, Arabidopsis thaliana columbia
  unsure (1)..(849): unsure at all n locations
gttnnnnnnnnnnnnnnnnnnnnnnnnnnnnnnnnnnnnnnnnnnnnnnnnnnnnnnnnnnnnnnnnnnnctttttttttttttttggcgatgaaaatgatgaattaaatgaaatgacaaaaatgagcccgcggattcaccattgagggctaaagacttacctattactaatcacaaagagaaatatcccatacagtattgatttttatgtctcgggcgaaggctacgagtaaatttaccttgacagtgactccaataggatcttttggtggctccaaaacaaaaatactggagctgaaacactggcctgtgtgtttcacaatactcaatgtggtaacaaccctgcacaatacaaatggcttggagccctatgttgcacacataagcctggggccggaactagaaacatggggttccacacactattcttccccccccgtctaaatctggttacgggcagacctacaaaggaaaatctgcattacaagaacttgtttgggagaccccttgtgtaccttctggaaaacacctcatgcccaacttgaagcacacccgttgtctagccccaagcatggggatgtttttacagggtcctagggtccaaaatcaaaattgcagcaacattttgaacccggatgaccaataaaaggaagccttttccccccaaatgatttttgaaggacaatttgcttatttggcataccccttctcagagaaactaggcctccacccgaacctggatgaatgcgtaaaaaaaatggcttcctttaagaggtttcccctgggggaaaccacccccattgctttcaaaaaccctgtttacttttaaaatcaaatgggaaaccccac

SEQ ID NO: 129907 - DNA, 651 bp, Arabidopsis thaliana columbia
  unsure (1)..(651): unsure at all n locations
attcnnnnnnnnnnnnnnnnnnnnnnnnnnnnnnnnnnnnnnnnnnnnnnnnnnnnnnnnnnnnnnnnnnnnncttttttttttttttttttttttttcgggacaaaaacttaggatgaaaagccttacttatattttctaagattggtaacaaacataaaaactctctttgttacaattttccggggtaaatattcaaacatgaaaccttttggctctgatactttttctgggaaagttttaacatgaaggatctggcctgtaacaaaagcaaaaccactcattaacctgacaatctcatttgtggcatccaagaaatacttggccttgctaggcttttgacccacagtacaagggaaaatctcagatcttggggcaatcaaagggccctcattggaactgttaatcacctcaaacatgtttttatttagaccggtcgtttcctattccttaaacaaacttaggaagggttccactatcttgcgtcatagaaagcacccttctcgctttaagtacctttctgacgccctgtggctgggcctcaacataacatagaccccgttttactgttacaagttcctttggtaggaccctttcgggatgatctagaaggtcctttacttgacatgggccaaactcggggaaacatgc

SEQ ID NO: 129908 - DNA, 939 bp, Arabidopsis thaliana columbia
ttgaatagcttgacgtcgcatgcacgcgtacgtaagcttggatcctctagagcggccgccctttttttttttttttggtcttttaaaacacatcactatattcattaaaatcgatcaaaatacttatgccattcggctggaaattttaaatgccacatctggatatccataataatttgaatgaacaatgtccgcacatagccactccgactctggagatgtcatcccatgaaagaatgaccaaatcttccaattcgcgcgggaacatagctccccgtacgcccaacgcttattccggccacatggtatgagagctctagaaataatagtgcactgaaccaacccacaatactggaattacaagttgacccaacttatgccccccaagaagccaaggtcagtggtttattccaaagacaaaattgtgttttcctttttaacaacctaagaccgcaactgatgtgtttaccggacgcccccccggacgtttaagatgaaataccataccacaatttcaaaataaaactgcaaaaccggggtgaatggtttaaacccttgattgtcggcgctattatttcccggcagtggggcaactacggacagggaaatgaggaactggggatcccatatttctcgagcgacataatcccttcatccggattcattggaaaaacccctaatggccctccgcccttgaatccagaagacggcggggtctaccggaggggggttactcaccccacccctcccaatggggtcaagtgaggggcgtggaatcataccgttccgggggagggacaaccaaaaatgtaggaaacccaattgtccccacatcatatggggacggacctctccccaggaataggaccccccaatcttcgggggaatcagctaaacaaccatggtttgaccccttcaaaagaaaaaaccaccccacta

SEQ ID NO: 129909 - DNA, 777 bp, Arabidopsis thaliana columbia
  unsure (1)..(777): unsure at all n locations
cnnnnnnnnnnnnnnnnnnnnnnnnnnnnnnnnnnnnnnnnnnnnnnnnnnnnnnnnnnnnnnnnnnnnnnnctttttttttttttttgttttttaaataaacattttttatgtccatgatactttccttaaacacatcagcatagaaaattaaacaggttttgcccttgcttatttttaaaaaaacctccttatccaaagacagagggctggacccccacacaaggctctaccctaaagatcttacgaggttcgtaaatttcctttttgaagaactgccccacaatataatttcttgaataaatcggacgcgctgttttctcaaacactgaactactttttttcttaccatccatcgctgaattctataagggcgtcttcctaggctaccccgtggtaacatgaaatcgagaagaaccactttttttttggaaaattgaaaacaacacccggtgtggtgcactcttagcgaatttttttcgctaacgcccgacaaaaatcctgggttcggctcctgaccccccaatttcttaggcttttctcctgcccatagaaaaagcagcccgtaattgttaagcacacaggtaatactcccccagggcttggggaaaaacctcgccttcctctggaggcctaataggccctttaagaagggccggctttttttctaaatctaccaatcattaccccatacatgttatagggggattttaacctcgtggcccttgaccgactagggcaaaaattaaccctgggatccacccggtcttatagaag

SEQ ID NO: 129910 - DNA, 738 bp, Arabidopsis thaliana columbia
  unsure (1)..(738): unsure at all n locations
nnnnnnnnnnnnnnnnnnnnnnnnnnnnnnnnnnnnnnnnnnnnnnnnnnnnnnnnnnnnnnnnnnnnnctttttttttttttttttttttttttagaaaaaaagaacacatttatgatcaaataaaattcctcacaagtatgtatagagccaagaagagaagagaagctatgaacagatcacatcaaaagacacaaactttaggggaactatttcttgttaaagccaaacaaggatttgatggcgttaatggcactctcattgatgaaagattcgtcgaattgcttcagaagtggatcgaaatccttcgacttcctgagagtttccagatctggatcacttctgattctcttaaaatctttatatcctgacttcaatgctttttccagagccgagagaccagcttgaacctgattaagctttgagtagcaacaagcaacattgtaacttggaactggatgcttcttttggggttgggttggaacctaacaccgatttaaaccttttcaaaggcttcttatacttacccatttttggaaaattgcagcccttcacaaagaaccttttcccgttgagctttccgggcttttcttcttcaaaaaggtttgggtctggaatctttttcaattctacggttaaggattcggcttttttttcaggttttatgaactctttttttggaaactaccatttttttagccttacctttttttttctccatttgataagcaagggacc

SEQ ID NO: 129911 - DNA, 792 bp, Arabidopsis thaliana columbia
ctatgacgtcgcatgcacgcgtacgtaagcttggatcctctagagcggccgccctttttttttttttttgttcgataacgggacaaaaactcacgataattctcagactgtttcttacagaacaacaaagccaaactccttacccactacaaagcgtttgcacatagctacatatatatatgtggacacccatccccgtcctaccatggttcatccaaatctctctacttgagtgaaggccttgtgaacataagaatctgactgttaatcggagctcttttcatatatgcgctcaacacctatagattcctccaactggtttcacctttccatgtgcattgaagctaccgacaaaccagtctgagtgaagaacctggccagtgggggtgactttctcacatgacaccccgcgctttactcagaacaaactgtttcggttacatttcgggtcacggggagcttgcattttgaaaaagcatcggggaatgccacaatcctgacaccaggggattggtcatgggcttccggccatgaggaggtggaaggcttcttccggaggaaaaacattcaacgcacgtgtttgcgaacaaccagcggtgggtcttacgccgcatcccggttttggtccagaaataaaattggggaggaaagggcagatcccctcgggttaaaaccggttaattcgggacggggttgcctacaaccaatatcgttctggaccgtataggggggacctttttccagcttggggttaaaaaggggccgattttgcggtacgggggggaatttgtc

SEQ ID NO: 129912 - DNA, 754 bp, Arabidopsis thaliana columbia
tttacgagctatgacgtcgcatgcacgcgtacgtaagcttggatcctctagagcggccgccctttttttttttttttttttttttacgggacaaaaactttcgagaattttcgcagtgtctaataaagacgatcaaatgcaaactaaacaaccacaacatatagatttcaaatggttacaattttaaaagaggacacccatcccggacttatgatgcttctaccaaatgactcgaatagactgaaacccatgtgaacataggatcctgacttttatctcttcctctctcctttcttggactcagcagaaaaagccccaccacctgctacagcttcagatgttccattaagcaaccgaaaaaccacctgcggtaccacacggagctggggctaacttctcactttcaccccctatttactcgggccaaatcgtttcctttgacttccttcaacaaaagctcaattttgaaaatcctctggttaaacatacaactggatccagggattgccttggatatcggcccctggttggtgaagtttttttcggtcaaaaaaacaagcaattgttcgacaaacaaaccttatttttcgggaaactggattatctaggaggacattgggagaatatggccgtacccctgggcaaacccgggaaaacccggaccgggttcctgcgggggaccagcctgaccctataaggggggcctatttaaggttggcgtaaaccatgggcagttcttgtttccgggggaatt

SEQ ID NO: 129913 - DNA, 996 bp, Arabidopsis thaliana columbia
catctatgacgatctttacacgccatgcacgcgtacgtatgcttgaatccggtcgaccggccgccctttattttttttttctttttgagaaaaactaaaactcaaatattgagtgactgcgatatcactcaggctatgtaacaaatattcttatactacaactgatcataacactcattatttgaacaacgcttgattattcccccctattccttaagtaaaccactacgacgctcaacgttattggacctctgtcttgctatagccaactttgttaagaagcaaccgccgtatccggaagcatcgcaatttgtgacgcacgtcattctagagttcgttcatccccgctacccagccaacctgtttaatggcaccttagtcgaaccccacgtccactaacgcacgtgtttcgatataggtacacacacctcccttatagtcccatcagcctctgccaaaaaaacaaaagcacttcatgtctcattccatttttcgaattcccgagttaccatgtgattactcctctcccggaatatctccggggaaataccaacattaaccgtgggtttttcaaaagattaaattttctttccatccctttagtgactcaaacacccacaaacagggcctacatctctacttctattccagaatatttgtaaatttccccaatccgtaggtttatttctcaacaaataagctcttaaaaagaagggttcaaaaattcctccatgaaaaaggaattcctacgtccaccccagattttgccttcttaggaaaaatggggtaaagaaaccctcccaaagaaaaccccctttggcttcccgatctcccaaataatttattaaacctctgggccccaccctaacttttgttttgtggaatcccccaatactaaagtttaaatcgggtgtttcgataccccgcgttgttcccattcctccacaaaaccaaaaaaacccttttttaggaagccactggcccatattaattgat

SEQ ID NO: 129914 - DNA, 882 bp, Arabidopsis thaliana columbia
  unsure (1)..(882): unsure at all n locations
nnnnnnnnnnnnnnnnnnnnnnnnnnnnnnnnnnnnnnnnnnnnnnnnnnnnnnnnnnnnnnnnnnnnnnnctttttttttttttttggtcttttacaggacaaacacctttgtatttacatggatcatattacacatgccatcggatggaaacttcactcccattaattaaacatctaatatgtgcttcattaatattgctatactgccctccacctctgaagttgtttcctacaaatctttgtccaaacgcacaattcacgggaacaaagttccacgacttctaacttttaccgtcaacgtttgtgcccctaacacaaatggtacctaccaaccggctactgcaattacgatggccatgtttgggtccccactttacctacttagtggaacaatgcccgcaagatcatgggtttgtcttttcatgacattatgccctcacatatgatttgccagaagacccaccgaagtgcttaagtgatctacgaacccaaagtgtaagacttgaattggagaaacaattggatattgttgtaaagcttttattcccatcctcctgtttaccgggtaattgcgactttcggccgtttttagtattaccagggggccttatatcccgtgtggccggatcttctaaaaccgagattttttgcagaaaacaactacggctggaatcattgaaactaaagccgggggtttttagcaaggggattaaaactctttgccacccattggtgcgctcccgccttggggtttaaaattctgggtgggaccccaaaacttggttcgccagtgcgcgaaaaaattgcattggacccgccaagaagggggggcccctttcaaggcttgagccttaacacattggggagctttttagaagtg

SEQ ID NO: 129915 - DNA, 818 bp, Arabidopsis thaliana columbia
  unsure (1)..(818): unsure at all n locations
nnnnnnnnnnnnnnnnnnnnnnnnnnnnnnnnnnnnnnnnnnnnnnnnnnnnnnnnnnnnnnnnnnnnnnctttttttttttttttggtttttaaattagcaagcaagcttttatttaattgaagaatattcctaatgccaacggttggaacttgtaacaattatcaaaaaactactaacacggtttgatgaactccctattatgccctccccccctaaaagggtcccccaccaatttttgaccacacttcaacttaatgggtcctttgttccacgagcattatactttacgggtgaacgtttgtgacttgtaaaagaaaaacattgaccaacaggctactgaatttgatcgccagagtttgcgcccggtttactagcttatggcatgtccccgaaacatgcgtggactcattaaacctttgacgtgacacttatagccggacacccccgtgggtattgagcactaactaatcaagcttctttttttttaataaccgtagctttgtgaaaactttttttcatcttttgtttccggccatgtgctctttcgccgttttgtagccttggggacgcatactggggacggattctaaccggttttttgataaaccatcatgggtaatcctgtaatgacactggggtttcacgaggggtcacacccattgcaccaattgttccctctggatgatgctaaagtttggtggccatgaaaatttggctcaattgggtgaacatatgatggaccgccagggaagggcccattcctggctgggttaacaaaattgaaacatttaaatttggccttgctttttgggacc

SEQ ID NO: 129916 - DNA, 749 bp, Arabidopsis thaliana columbia
gacttcgttacactatagaacagctatgacgtcgcatgcacgcgtacgtagagctcggatcctgtagacggccgccctttttttttttttttttttttttttaagaacaaaccaaaaaacttttgatggagtgggaaaaatgctaataaacaaacttaaaacggagcaaaagacctttccccctaaacaaagaggaactctttcatccgccaaaatgtaacaatgaaaaaactaaaatgtcttcctaaattaccaaatccatatgacaaatctgatctaaaccaaacagttaagctgttcatcatcatatgcaaaggtagatacacagaagcgagcggtcaacaaatttaggaacgagcccttttgttgctgcaagaagggcacttgtattgcttgatgtgctcagctcttgctggtgttatcttaacacactttccatgaaaccacatctcacagaggtcacagcaaatccagaactcatcagctgcatagctctcaccacatgctccacactgtgtttcaccttgctcatcctcatcctcctcttccacaccttcctcttcctcctcctcatcatctttcggctccggctttgaaaacttggcacgggattcagatcctcgcttggagcttgatttggatctggtgctgctgctgttggaaacagaggacttatcttttccttggttcttagcagtgccagctacaacctcaaagattgttgggaggtcattcaccatattgaaaag

SEQ ID NO: 129917 - DNA, 907 bp, Arabidopsis thaliana columbia
  unsure (1)..(907): unsure at all n locations
agaaagctcgacgtccatgcacgcgacctaagctggaatcctctaaaccggccgcccttnccttttttttttttttttttttttttaagggaaagcaaaaaggtttgatatagaaggttaacgccaaacaagctttatattataccaacaatgggaaaaccagcaaaaacattggaaaaaaagggtaaaggagaataaaaaccttttcaagggggaaaaaagtaacacttttttgctagaagatatcacgaaaggtgatgctcttcacctgggttagaatatttggtttcaaatatcctttaaagaagaccaacctacctttgctgccatacctttggccgctttttgaaaggaagaatcacgcctgtgcaggagggtaaaccaattcttgaggaggctttcttccatggtggctcttcatgaagccttgtctcctttggattttttgggatccaataggctttcttgatggccttgaattcctttccttaaacttaaaactttttaacccccaaacttcacccaaagggtaccttattcttttcctcgaatcaagaaataaatccatactcttcaaataccgggcttttttttcctctggtcaatgcagatttccaaacccggataccaacctccccaaaggcaaattaggaccgttcaagatattccgcgggtttggccaagcttcggtggttccggggttggcaaagaaacttcatggaagggaaaaataaacccccggtggagcccatggaaataaattcttaattggtcccaaaaacccatttttccaaaaaaaacttttgggctttaaaccccaaaaaatccagaataaatctttggggttccccagaattctggggccaaagataaaaacacctaactagccttttcaccaataccctaa

SEQ ID NO: 129918 - DNA, 732 bp, Arabidopsis thaliana columbia
tcgcatgcacgcgtacgtaagcttggatcctctagagcggccgcccttttttttttttttttacagaaaaaaagctgttatgtatcactattattcttacacacatcaaagagtcaagacaaaggatgttacataaagatgagtcctcaaaaccaatgactcatttattttaagtaaaaccaaaaacttccacattagctttagattaatgcaacggatcaacaacttggccaatgaacagaaccactcctgttatgttctctgtgaccaccaatagaaacggatggtctgcaacaaaatctatttcatcttcctccataagcaatcctcttagctttataactccagctgatgcagctgcagcttctgttccttcttcattcacttcgatacacgctttatggaaaatgttcgatacgcatagattcttccccatctcaggagattcaaccatctcagttaaaccttcttcaccgctgaaaggcgaagtcagtcccaatccttttaaaacatttgaagcatcgaacccgaaagagaatttaaactttggaatcttgaattcgcggactttaacttgtctgcgtgggatgtggttgtctaagaacccaggagtggaaactattttgtccagaagatcagacagtccgttgtttgcatcgggaagataaaagtacatggagaattgtcgcttatcctgtccttgtacgtaaggaagtcccaaaactttgaaac

SEQ ID NO: 129919 - DNA, 1212 bp, Arabidopsis thaliana columbia
ccccgcggcagggggcaaaacagacaggacgcgcacccccaaccacgaaacgaagacacaaccattaatataattttagacaggagacgaggatacaccaaaagacacaccccaaaacgggggggggggcgcccaaaaccaaaaaacagagagcggcccaccacagccaccaaacgcgaagagacaaaaagcgcaagaaagacgcaagaaacaagcggcgacaaccagaaacaccaacaacccccaagacgcggaacacccgaagaggtagaacgaaaccacactgacagagaaaacgaaaaaagaggggaagacgggaaaaaaaccccaaagccgaacgtaaggggagagcacgcaaaaacggacccgacaccgccacaagaggcaaaaacgggggcgagcaccagcgcaacacaaggagggggccagagcaccaacacacacaaccgaagaagctcaaccgaaaagagaacacaacccgaaacacggaaagagaccaaccgaggaagggagagcgacccagcgcaaacaacgcctgtagagaaaggacagagacgggacgaaacacgaccaacgagaaacgccacgagcgcagctgaaaccacaccaccgcgagagccacgcacagaagagaacacgccagacgcgcgataagagccacgacgagcgaaacgcacacagaaacgaagagcaacacaaaccagacacacgagaacaagacacgcacaacagacaaagcacatgacaagcgcagacaaaaccagaccagaagcgagagcgagtgtgccgaccctacgcgagacacgagtagccgcgacaacatcgcacacacacaactccagcgagcgcaagaaacacgggccacgaccgagagagaaaggagtgaaacaagagaaacgaggccacaggaacgatggcacgcaccgcaacggggccagactaggagaccaacacagaacagccagaccgagcagagcggccacagcacggaaaaaaagcaagacaccacgaaacgacagagagcggggacgagccagcccaaacaccacagcacaccaagagaagcccaacgaaacgagagagagctcagcgccgcacccgaacagcataaccgacaaactacagcacaccacacgagagagcgagtccacatgagacacagcaacatgcgagcaagcacggaggcacagcaaacacccagaagccaaaacc

SEQ ID NO: 129920 - DNA, 681 bp, Arabidopsis thaliana columbia
tacactatcgacgagctattacgtcgcatgcacgcgtacgtaagcttggatcctctagagcggccgcccttttttttttttttttttttttttagtaagactaataaccaaatcaataaaaatcttatacaatacttatattaacattgcaaagagtttcaaggtttttcttctgagttttgaaagaaattatagggaacaaaaggaataaagaggcatcaattcgatcactcagagctacaaaacaatgggactaaaacgcaaaacgaaagcggtttttttttttgaaacgcaaacgtaagtaaaaacccagagagtttgtcacacacaagtgcatcatagaaacgaaaacaaaaagggaaatgaaacaaacaaatggagaagctaatttaaaagaaaaaaagaaactttgatcccattcataaaaccccagctttttaagcctttgatcttgagagcttagaaacattttctgtgaacgattcctggacctgcctcatcatactcggccttggaaatccacatctgctggaatgtgctgagggaagcaagaatggaaccaccggtccagacactgtacttcctttcaggtggtgcaaccaccttaatcttcaagctgcttggtgccaagtgcttgtgccggaccccgtggggtcccaccccgggaaaattcccggaacc

SEQ ID NO: 129921 - DNA, 1143 bp, Arabidopsis thaliana columbia
  unsure (1)..(1143): unsure at all n locations
taaacaccagatttgttgaccatctcccctggaccttaaagggcgccttttattaatctctactttttttttcctcggcagaacctattttttgattgggggggatccacttaagctatgcgtcagggggtatcaccccaacaatcaccactccatccaaccattttccaatgtatattttttcaatcacttccttgtcgcgtacgacaattaagcgtcatcctcacaatattcattgggcatcatctcccctctgtcttttttagcaattacatacaccgccgttcacccaaaaaaactcccatttctcttgtctggacgtcgcaattctttatcttctccgttacccatcaaaagatacgcgcacggtctctctccttctttctagcccaacctgcaactccctcctttgtgagtatgagacattttaatcaatacaacacccatgggaggtattttttcctttcatgggctatgtacatacaaggtcttccattgattatgtagcaccatgtatataatctttcaaacaacctgtaatgtcggggacccatgtgctctctccgcgttgcatcctttttacataaagtccatgggggcctgattaataacctccccaggtagaatcacaccttgaaaccacacttgaaccctcaatattgtcgcgtggtttccccatctaaattgatcctctaaacctaaagtgatttccgcaatatattctttaaacatcccccaacatacttctcgatgagaagaacaagggactccctcccaaacttccatctccctcagagagggcaaaaccctgtttaacctcacctntggggtcttagatcacaccagagaccctcgatacctaagattgtatagatataactaatctttcatatccttatcgagaaagaacctcccacactgcatcatctatatgcactctacttattcgcactaataaacaagctgtgccatacaccttcaacaatccgctgtactacagacatcccttttattctaggcggacaccccatcttaataacatcatatttaaagcactactgactctcccacatagcggctactacgatagatctctctgaccatataccacactccttagggaatcttaacacaccgcctcgg

SEQ ID NO: 129922 - DNA, 847 bp, Arabidopsis thaliana columbia
  unsure (1)..(847): unsure at all n locations
cttacgtccccgacgaggctgacatcgacaatccatctccccccccagagaggtgggtaggaccttgatgaaaacancccactatttagtggaatgcacgcgtacgtaagcttggatcctatagagcggccgacctttattttgactttttttttttttatgaagaaatctgaaaatatcacctggggggggacttaagaggaaacatgagtttgggtgtaccaaacataaaaagcgctccacattattggattcttcagcgctagagacattcttaatgaatccaagtaaaaatattatgcagatactccaaaaaattgggcaaagctgggatacttgggctcccatcctatctccggtcgtggcttagagttggtcagcttcttccctaagggaccactggtgcttggaaaaccttggaacttcttatcaaaattttcgctttgggccgataggggcatcaccttttgccttgacaaaggatgggtgttacaacccaagaaaatccgagcaccgggtttcttcttcatgattgcaactgccagcgagggctgatcctccatagtgcatgagatttagaatatgatccggacgagcataaattgggtccttacttaacccgggaagtatgtgcacctcttagcttctggagaaaagacctgggtggtctaagggacagtttcttacccaattcgaaacattacttttttcagggttttacaaaagccgaataaaggttctggggaccttcttttccaggggggacttactggggagaaaaccctccgtaggcgttcttcccggtttatgaaaaggcaactctttaaaggggggccggaaacctagg

SEQ ID NO: 129923 - DNA, 763 bp, Arabidopsis thaliana columbia
acactatccgaagagctattacgtcgcatgcacgcgtacgtaagcttggatcctctagagcggccgcccttttttttttttttttttttttttttttttttttttttaaaaagagaggacagctgatcatcgaatttcaggcccttactcgttggaacatggcatattgttgaaattacaaacaaaatctagcgggtgataaacagtgaacagaagcacgctcctttgtaaatgcagaattatattcaaagtatatgtggggacaacaatcatcactgtgtgagttgcggaatcacacaaaaggattttaaagaaagccccctcttttatcttggtcttgagcttccttattagcagcttcaacggatttgaaccctaggaacacagaagtggggattcccgtaagagcaaagaatcccagcccaggagtataaaagatgctgtcagattccaagatccccaaaactggatttttgcttgtgtactccaaaacagaaccaatagcagcaatggcggtaatcgcggaagctttccgataaacaaagaaaggaacctccaagctctctttggacctaaaaaaacgaccttttttttttgccccagggggtggggtattttagtcaagattctccccaaacgggccacttttttttaaattttttagaacccctcggggggcgggcggtaaaaacccaaaattcctcaacttgtacctaccgtttcggaaaaggggagcaaaggggaacccctttttttttttttc

SEQ ID NO: 129924 - DNA, 774 bp, Arabidopsis thaliana columbia
tacactatcgacgagctattacgtcgcatgcacgcgtacgtaagcttggatcctctagagcggccgcccttttttttttttttttttttttttttttttttttttttttttttttttttttttgttttttttttttttggggcaaacgaatcccaccccaattttttgaaatttcatgggtttacctggagaccctgtttttttacccaatcaaaaaaatgggcaatccaaatcaaaaaattttcttcccccccccccccaattgttctgacccaaaaaatgaacccctgtttgacaaaaaaacaattttttcaataacccccctttttggggttaaaaatttgaaaaattaaaccccaaacccccccttgggaaagaagaaattttttggaaaccccaacccttaaaagagtaaatttggggggagaaaaaccccagaaactgttttttgttttcatagctggggggctgggggccctactttaccaaataacccaaggggagggggcttttagaatatattcgcccggggggatcctgaaatctaggggtgtttgggaggtttccccccgcgaattttttttggggaatccttaaaaaaaggggaatttcttcttcacaaaggttttgttccctcccggcaatttggggaaaggttttttttttcccttcccaaaaaaccgggtttggaactttttcccttaaaaacagggtaagcccttttttggggtttggaagaaaaaaccccctgtgaaggggggtttttaaaaaatt

SEQ ID NO: 129925 - DNA, 1135 bp, Arabidopsis thaliana columbia
  unsure (1)..(1135): unsure at all n locations
nnnnnnnnnnnnnnnnnnnnnnnnnnnnnnnnnnnnnnnnnnnnnnnnnnnnnnnnnnnnnnnnnnncttttttttttttttttagttttataaaaacgaaaaaatgatttcattaaattaaatgggatacacagaaagggatatacagcatcttcacctacctgaatggtggggaaacctatactctttgggatataagaggtctttttgtctgaacaagggaatacaacacttatgggataaaaaggcactcttaccttattaaacttcctaaaaagcaaattaacttgtttgtctgggaatcttaagaccttaaacagtgggaaaaaccaagaaggggtttttctttaaagttagatttttggcattggaacatgttggggaaccaantattttactaaattttcctttccccaaagccccccaatatggccgcctatttaagaccttcgggcaattttggcctttccaaaattatccccacaattggccttatccctcctaaggcccccaagagaaaattctctgaatagaggaaaggtcccttgtatatccccaatcctttgattgggggggaccttacgacctattgaaattggaaattggtaaagcctttttagggctcccagggtatttgttttccaccttaaatttccccggtgggagttttcattggattggttctttgccttttcgggggaaccccacttttttacgccaggcgctctggcttctttgagtaataatcaattccctggctttttgggccattcgaacgtgttaacatggaatttttgtgttatcaccaagggggaacttttctgtgcccacacaattgggggaccctctcagcttggataagccccaatttaaatttggtgccgttttggttgttatttttttaacccgcaacaaaccacggtggggtaacattatatattttctgtttcggggttaaaacttaactattgaaaggggaattgttgaaaaaagttttttcttgggggcggaaaaattccttcccaattaaattttgggtaaaaacaaacctttttccaaatttccccgtttgggtgggtcaacctatttccaggaaccgagacccataccagttgttaaaaaaaggccccctgg

SEQ ID NO: 129926 - DNA, 1052 bp, Arabidopsis thaliana columbia
  unsure (1)..(1052): unsure at all n locations
tttacactatagnaacagctatgtacgttcgcatgacacgacgttacgaaagacttggtaacactataggaagcggccgaccctttaattttgttttgaattttttatttatagaagaaaaaaaaaaataacgctgacgcatgaagaaggacacccaaacaatggcaaggaaacaccaaaaaaattggcgaaaaacagcaaagcttgggtcaaacaaagcacaaaaaaaaggtacacaaagggaaaagaaaataaaaaacggacaaaaaaaagaaaggaaatcccttggtggaaaccaaaaaccaataaaaaacgggaaaaaaaacacctgaaaaaaaacaaaaagaaggaccttcggaattgtaaaagagataccaaaaagaaggtcccagaaaaacaaatttttaggctcaggaccaagaaaataaatcataatttgaaaaaaaatggaaggcatcattgaaaggggggacttccctgaaactggacccaaaaaagcccctaaaatatgccacccagccttgtaaaacacaaaaaagggatgggaaaaaaggggccaaaaaaagggggggccaccccgacaaaaatggaaaacgaaaccccaaaaagaaatcccaaaaagaaaggaatcccaaaaaggccctttttagaatttgctcaggaataaaaaaaacagggaaagtctacaaaaaaaaacttcctaaaaaccgaagaaaaaaaaaaaccgggaggcccaagataaatatgagaaaattggtgggtttctaaaggaaaaaagggaaaaaaccatttggagagaaaaacaaaggggaacaaattggaaaaagaaaaaaaccatgggaaagggcgaaaaagggtaccgggagaaatataggggctctagagggaaagaaaaaacggaagaaaaaaagggttataaccaccgaaagaaacaagaaaaaagccttaataaaaaaaggaggaaaacaaaaggccgaaaagccccaaaaaataataaattccgacccgaaaaaacaaaggagagtgtaccccacccaaccggataaagggag

SEQ ID NO: 129927 - DNA, 714 bp, Arabidopsis thaliana columbia
agacttcgtatggcccccgtccgtacgctgggatcctctaaagcggccgcccttttttttttttttttcaataaactgaattaatatgtcggccacccatttaaaaggtggaaccaaaaccagaggaaatccacccaactttttacaaacctcactcacataaatcacactaacaacgaagcaagagcaaacaatttctcatcaatttcgtggtaaatatatagttggtttaaccttgaaccggttttacaagcatgaagagtctgcacagacgagactttctttacatttttctatttttttggacaagagcttctcaaagagcctaattccatggtggagaagaggatcggtgcagagaagaagaagaggaaccatagttgaggtcaagattctgaatctgttccataagttgtgaccgtcgttccttgaagaaatccagacgagtggttagctccatgagagctgcagatgttgcaggaggatgatgatgtcttccgtagtccattaccggagaatactcttccattgggatgcctaaggatgctgcattcaagcttggtgagcctggcacttgtctggttgtttccctcttgccattccctccaagtcttggctttttaaggcctaggtttttcaatccccgggtcctctctggaatttttctttttccggggggaaatttaaaaccggaaaaaggccccaaggaaaaat

SEQ ID NO: 129928 - DNA, 737 bp, Arabidopsis thaliana columbia
  unsure (1)..(737): unsure at all n locations
gcacccgtacgtaagcttgctacacaatagagcggccgcccttntttttttttttttattttaacacgaaaattccggaacgaaaaggagggggagcattttttcaaaaacattattattacggggccggaaacccgcaaaaagagataaataacggacaaagaaacgacagcgtttttgtgtgaggtgtcattttcagatggctcccagagcttgaagaatgtcagttttgacatcttcaaagtcttcaactccaaagctgaaaccaaccaagatatctctgattccatactttaatctctcctcttgcggcagatcccagggggacatgatagcaagttggtcaacaatgctgtctcagccaccaaaggatggtgcaatgacaggaatcattatagagaacacaaacttgattgtcggtacaatgtctccatcaatctcgaaactgaccacacctccaaaaccagtcatttgtcgcttggcgagttcatgttcgggatgacttggaaggcctggatagcacacatgactcaccttaggatgcgcctctaaaatttgggccattctaaaaacggtcgaattttgttgctgtacacgaagatgcaatggtctcatgccctcggatgattaaggaaacccacccgccctgggtttaaagaggaaccctccccaaccaccatggagagcaaccaactgccgcaattttcctgaaaaaccccaaacaataaagggggaac

SEQ ID NO: 129929 - DNA, 606 bp, Arabidopsis thaliana columbia
tagttgcagcacgcatccgttagcatgctatcaatgaacggcctgcatttatttacatctttttttttgggaaattctattaagacagaaaggggtaaaagaattgaaaaaaagataaaaaaggaaaaaggttaaaaagaagaaaacaaaatgcgaaaatagactaaaggactttaaaaaaagttaaagaggatattttaaaaaataaatgaggaaacgagggaaaaaatgatatatgaaactaaaaggaggctcaatcaaaaggaaaaaaggatttgaatgaaaaattggataagggtgcccaatatattattaaaaaaaaaaaggttaaacaaacactttaatgagccggaaaaaaggcaaaattaagacaaggtgggaaattacttgggaagctataaaaattggcgctagaaaaactttaaaataaagggaaatgaaaaagaaaggtgagagtaaaaatattagagggaaaaaattaatagactgtagactcaaagaacaaaatggggtgggaaaaaaatatttgaaaattattagtactaggaggaaaaaaatgttagaaaaaaaagatatcacaggataacaaaatttttaaagattgga

SEQ ID NO: 129930 - DNA, 1260 bp, Arabidopsis thaliana columbia
  unsure (1)..(1260): unsure at all n locations
cacgcctacctccgctaggatcctctagtagtggacggcctttcctttttttttttcgatttttttttacaccaaacgggaaagctatgtactgggggtgtacatacgtcacatcacgtacatatattcccctatcttgaaactagatggtaactattaaacaaaataggttttgattataaaaaaagacatagagtagacggatactgtttcagacggaatacattgtacaacgcaaaacccttttggcttcttccgctacaactataagcgccttaatttgtgtcttacatatggcggccttttaagcaccatacaatatgggactaggaagagaaaaaccgaatctagaatgagcctttctattgatataggggtagttctaacacaccgccttttcctgttagggctcttttgtagaaagataactctattctcccagaaatttatcgccacacacagattttttgtagcaaaacaaaagaggaattggtacaccttcttattgcgtaatactaaattccaattaacgaacaaaactagatctattgtggatgagaatggtcttcataactacgatttctctctgttgtgctttactttgtgggaacgccaactcgcgagaagacgtgtacaacaaaccaatatttcatctaggggcacatccgcactcataatagtcgttcnaagcaataaaattcgcgcccttctctcttctatgagcgcggaaacaatcacacttatcaaaccnatggttaaccacaagttgaacacaaaccattcttgttagggaacaaataaaataccctctctcttagggcgagcattatattttgtataacagtccatattttggcgcacttctttttggggcatgccttccctagtatattacgcaaataatattattataaccccttcttaacctgttggggtattacacagtggaaatccgcgcacccagaacaacaatatccctttcatagtttgcccaaaccaaaacacaattcttcttctcattaaacactttcgaaactcctgggcgtcttgtgggacaggtattagaccggatacaatatttagttcaaacctcaaatatcgtgcgttttttttcttaccccacatcataggttataaaaaatattctctcttatacaaacaaggtttgtgaatccccgaccttttaaccaaaaccctttttaaagagttacccgggatcgctctaattatcctcaccggataatcttcgtcttggaatat

SEQ ID NO: 129931 - DNA, 751 bp, Arabidopsis thaliana columbia
actatcaacgagctattacgtcgcatgcacgcgtacgtaagcttggatcctctagagcggccgcccttttttttttttttttatcaatacatatatatgtattattctttattcattattcatgacatgaacagattaagtattacatgaacatattgagtattacatatattcacccgtgaatatatttacccattattcactgacatcaaatgaaaagcattcattaagacattaacagacatagaaaatcattcaggcaccaactaaagttagttggtatcaccaaaataaagtttcttcatagtagccatctcacgcttgaattcaaccattgcgtctcgtggcaactttatgatcactttaactccaccttccattgatggatccgattttgaaggtttcaagatcatccctacgtgcactgtgctctcccgctgggtcaatggtcgtaaattcactggctcattccaaccgaaatccattgatccgaaccaaccaatattcctccaatccgtcaagaaaaataatccatcgcttaccccttcgaacattgaatcatctctcatcaatctctccgtgttctttaactcttcctcgatataccctttttcataggctgttttcttgggctttcttcacacgattcgcgatgttagagattgatgattcttcgagttcttttcacagtttagcttcgacgttaaaccgtttattgtaagcgttacccgtaagtatcccttttagggaa

SEQ ID NO: 129932 - DNA, 765 bp, Arabidopsis thaliana columbia
gcatcttttatatcgggcgccccttcataatatttattctactttttttttaaaaaagggactttgaaaataaaaaacaggtggtggtcaaaacgtgatataaatcatttcaccgacatttggtccattaacggctaaaccctgcaagtgaccaccattttcacatgatcaaaaatgcaaaaagaaaaccatagacgtctgtctctctttttaacccaattttgcctttgccttgagagaagcaatgggaatcttatagagaacctttttataaaaaaccacatactgttactgcaactcctttattggtttctctgccaatggatcaaccttgtcctcgtgtttctcatacaacattgggactgtgcgcaatattcacgaagctaatgttcaccaaagtcaggaaattgaaccaattgcccaccaccgagatgatccatagaccgacaacaaccattatgaatttttttaggtccctttcctaaagcaatgctttttatgcataacaaaagcttggttttaattcgttcctcaaatacaaagcaaccacaagggaaagccctctcgggaaacatggatttttggaaatttgtggtagaaagtccttggttgtaaagcggtgcagaaccatttggacccaacaaaaaagtaggcccttccataaagacaaattattttacacatgtggtacaccaaatagacctttaacctaaattgattaccttctaccccagcttttgaaaacaagtaaactccaaaattagc

SEQ ID NO: 129933 - DNA, 1135 bp, Arabidopsis thaliana columbia
  unsure (1)..(1135): unsure at all n locations
agacgtacatgcactcctcccttacctaagctcctatacaacagaccggcccgncccttttattttatttccttattttttttacaccaacccaatatcaatttaacaacaagggggtgggtcactattactgatataaatccttaaaaatccctcccactttaccattcactacatctcacctactacacaaacataaatattactaatctatgcactcacacttttctctcaaacaaaaaaactaaaaatttttcactcttttttccaatcataataaatgagaaaccccgcccatttttcaaattcccctaaacaagaacactcacagcaaccacttcacatttttcattctctcaccacaataaaaagtggcccccctttacattctccccaaaaaactgatattcctctaaaaaacaacatcttttttcttactgctaacacaactttcttctcaataacacacaccttttttttataaataatacctacttccccacaaaaaaaaaaaacatccccttacatatcacactcacccctttttgcgataatcacctttatactcccttacctgaagaactttatccacacttaccttttcttacaaacccccacttaatactccatgtctgacctttaaactactccacgtccaacctttataagaatataatattccaaactctgaccgttatagaccatataactcacatttcactatcccttcaaatactaccaaacaggcatttctcttccgtataatatccttacccaaatatccatctttctattctttaaatcaatataccaatcctatatcttctccactaaagatcaccgtataaccctaattatctccttcaaccactctgtctcattacgagtaatcaataaaataatccctttacacaatcatccacatcacttacctcttattttctcttctccccaaaaatctttcactttcccggccccccccctctttcaatggggaaaaaaacccccccctctcatgttttctatagtcaaaaattattggactaacaacccaatatacacacctcccctacctgtggtttaaaaaataaacacccctattctttccctcctccagactaaataaaaaaaaaac

SEQ ID NO: 129934 - DNA, 1474 bp, Arabidopsis thaliana columbia
  unsure (1)..(1474): unsure at all n locations
aaccccccccaaaaacctggatcatcgtaaagcggccgacccaaaaagtgacccacctttttttttttttcaaaaccatccccgacccccccactcaacttgtgtgtgtgggtttaatacaccaccaagtacaaacatttcaaatcacctaccttaccacacgaactcatacagctcaatatataataacttcaacttcaatatttcctatctccacttccatacatcatacatcttttcataacgattaccatcaactaactcaacacttatcacttcacattccatctcataacaacgcccatccaccacctactatacatagtgaacactgctacctcacataacacacctatctgctcagcgaactcctctatcattaacacatctcctatcgacaaaactgacacatttcatatctagtcaaagatgataaccatcctactgcaacacgtatctctaatatcctctgatctcagagcgctccaccactccgcgctacacatgatctcacttcatcccacactcacattatacacacacctatacacttacacacgatgccataatgaaccgcatcacacatcatcgcagtacgtcagcatatcacatacatcattaacacgttcacttctatctctccgctcatcaagcgacgaatgaccgtatctncagataactactctcccntcactccnacctatcatcccacatcacggtctccttactactaacaccatancgtcctcttatatgctcctcataacatgcaatcaactatacagtccatatctcatctacaccatagagacgcctccataatacaatatcaacttcatccgaatatagctctcaatgcttcatctctcatccatccgtctcgtaccctacaactgcctacacaatctagcctatatactctgtgagaaatccagtttaccacctcagattcactccgtcaatattatgatagctccacaaagccctctcaatacacacactccgatcatctttttcttactccacccaatcttctcaccacaatatccgtcctccttaacactcacaatacaccgtcccctctttactcccacaatctctcgaccctagtttactctcacatatcccccaattccatcactccctcccaactcgcacctctatatcctaaatacatagcacaaggaatgctcccctctcacactcataatactctatctcgaaactacattcatccttacaacagcaatctatcgtctcacaaacataccgccgcatgcgcgtatatatccatctaccctcacaccacacctatctactttttacctgatatcacaagaccccacctagtacgcgactaatcagtcaagtnatctcttcaacatatgcccgatcttacactcatatcacctatacatgtcactactcagatatcacagacggtagctaactacactgtctcatacacaccact

SEQ ID NO: 129935 - DNA, 527 bp, Arabidopsis thaliana columbia
cccatagacacgtagaacccactgagaaaagacccccgagaggaccggcaaggcgccaggaaggccataataaaacaagccaaaaaagggggacaacaaccaagaagccgagacgacaacccaggacaaaagaaggccacgcggacagagagacaaaagagaagacaaaagggccgggaaaacagccccaagccaacgcggaggcaagagggggggcacaaaccaaaaaagggagcagagcgaccgaagggaacgacaagacgaaaaagacacaagacgaaagcaaaaacgggaaaacagaccaccgcagaaaacaacgaaacgaaaaaaggaaggcacggacggcgaacaaaggccggcggaacagaaggacggccaccgagacacgacaagaaaagaaccagagacagcaaagcacgaccacagggaacaaagaagcaaagggacagaaaggccaacaaaggagggcacgaaaacggaaagagcaaggggcaggcaggggggacgggacggccgaaaaccgccag

SEQ ID NO: 129936 - DNA, 1132 bp, Arabidopsis thaliana columbia
ccccccccaggagaaggcggcaagaagcggaacgcacccacccacaccaaagaaggacgagacaaattataattataagaaccacgcgcagagcagagccaaacaaaccaccacaggcgggggggggggggcgaagccacagagaagcaaacggacgcacgcgccgcccacacccaccgaccgcgaagcaaccacagaaaggagaaccaacggaccaccgcgccagggaagcggcagaaagacaacaagacggagacaaccaacacaacactaggaacgacacaggggcagcgccggatgacgagacagagaaaacacaagaccgcagacacgcggcggacaggccaagcgcgacaggagacacggcagaaagaacagggacgagagaagggggataacagcgacccgccacacggagcaggaaagcgaaagcagactaccacgaccaggacgacgcgacaaaaagaagaacgcgcgagtcaggacaaacggaccacgagcacaacaacacaagacgaacacagccagcgaaacagcgacccccgaacagagacaacacacgacccgcgagcagagaacagcccacagccacaaacggcgaacgcgagaagacacaccaacgcaaggagacgacacgaggcgagagcgaagagacgagacagcacacacaaagggacaaccaagacaaccaaaagacagaaagaagcctcgacgaaccacaccggcggcgggacgaggggccgcaaaagaggaagagacacacgcgagcgcacgaggagggaacaaaaagaagacaccgggaagaggccagaaagacaccggcagacaacaaccacggcgcgggcggggcgcggcgagcggcgacaacgaacgaaggagggcggcgggcaaacaaccaaaaaaagagcaaccggcgcccgcaagacaaaggaacggagaaagggccaggaaccaaagacgacgaaacgagcgagcaacagaggaccacacccccacgacacaagacgacaacccgaaacaacagacaagagagagccgagaaaagagcacgcgaccgaaccgagagagcggaaacggaccacgacaaagagcacgcacgacacacaaaacacaacacaacaagaggcacagc

SEQ ID NO: 129937 - DNA, 724 bp, Arabidopsis thaliana columbia
gcccccgtccttacgctgggatcctttaaagcggccgccctttttttttttttttttcaattttttcccactttattcaaagcaccaccttttagaatactggttacaaagacttaaatcttatttaatttccttattttttttggataattgataccaaaccttatttcttatataaccattttgatcttctaagaccttttcgaaccaacacgtccaccttcatgacgaggacgactcctgcgagatgagtgagactgttgaacattaatggtctttaacccttaatggcatccttcattgatttctcatctttgaaactaacaaatccatataccttcctcgttgtcacagagaccggaaggtcatattcgtagccgtttccataatcaaaatattcataatctctttcgcaaatgacctgtgaatcaaagataaacatattatagatgaaaaaaaaattcagtaccaatgagggaaaagtgaaaagaaaaccgaacattagaatgtataacgtcaccaaactgagaaaatgcattcttaagatcattttcttctgtgtccgactccaaattgccaacatagcacgtgaattcaacatttgtggaagccattttgaaagagtaagagagttcaaaaacaagtagtgatttctaagtagaaaacatagcaattttatgagtgacataaaatgaaaaacactttagtcaatttatagaaaaag

SEQ ID NO: 129938 - DNA, 232 bp, Arabidopsis thaliana columbia
ctattacgtggcatgcacccgtacgttagcttggatcctatagagcggccgcccttttttttttgccattttttttggtgcggaacctgaacccagctagaaaagggggtgggcattatcgtgatcgaaggatatacaaacttcctcaactttatttcctgccagaaacatcgaaaatgtctttaaagaaaacaccaaattggttatacgtcagtgcctagggaaccaaaac

SEQ ID NO: 129939 - DNA, 744 bp, Arabidopsis thaliana columbia
  unsure (1)..(744): unsure at all n locations
ttnnnnnnnnnnnnnnnnnnnnnnnnnnnnnnnnnnnnnnnnnnnnnnnnnnnnnnnnnnnnnnnnnnnncttttttttttttttttttaaaaggttataattttattggattttgaaggagatgacttcaaacaaacaaaaatgaatcccagtaggtcgtggcattacaaggcatctctactcaatgcaaacaatgtctaatagtcttatctaaagcctgcaactgcaagattctctatatgttgtataaatatatatatcatgacagtcgctctccattacttcgataatggttctttttttcttcgaattctttctatttacactgactaactcctgtattagcttcgttgactaacctggtcacaagtccttgaagcctctgagctccaaagctaggaacaatcttagccacattaccgaccctggagcattttggtttcccactgcaccatccaccaggagtaaaactatctttatcattcctccgtttaagtaattccttatcgatcttattaagtacttcatcatctcttctgaatttcctagcaaacgcagcaccgctccatatcatcggcattgtgtcgttgagtgacaacacgtgtgggtgctgctgcggcggattgtcccaggaaatgtagtgtaggtcatggtttactgcagtttttgcaaactcaggcacattgcaaatcacggtctggaagtaacctttcgggcgagaaaagaagttggtgtaatacatt

SEQ ID NO: 129940 - DNA, 1187 bp, Arabidopsis thaliana columbia
cacacgaccctccctcttggctactcttccagcggccgcccccacctactattttttttcttttttttgacacacagctctctggtataacctatgacatggggttacatttaagagcccctgggggcgccccgatgtctatactttacatacacccgaaccacgaaagaaggagattttgctgcctggcagcctggaattccttggcttttgcttgcggaaccccaaacagacgatgactccctctctcttcaacccttctttcaacctttctaggcaaaactggcactcttgctatttttgtgcgcccatcccaaaatggtaacacgccaaacggtgaccacatcccttctctcctggggtccattcacattacataaaaagcgccttctcgtcaaaataaagtggggcgccccttttatcatatcagaagtcacacgcctcttaaataggttaaggatccctctatcttggtcgctaatactcacgaaggatcggaaccggatcccttatgatccatccattgcgacacaaggaaccggtggcttcttggtcatatattcatgagacacacagtcctaatccatattcctctaatacacttccggactacttgggcgacacgttcctacacagtttctggggggcactcttcttgcaattctggggagaggcccgcatctctccaggaatttttctctacactctttcctcaaggcagtttctcgagttaaaggctctctcttctcctcacgcacacccccacccagtttttacaagaatacccatctctcatgtttctctttcccatggcagggacaccccgggccccccacctgcagcacagggcagggaaacgtaactcacctttcccgtgttaaaaaaactcccctttcaaccccggtttagaaaaacccacagttcactttaattcgccgcgatctcccctctggaggtatccaatagcctctggccgtatagcaaaaccaacgtcaagtcccgccttgtggcacacattccatcttcggtctcaccacgtggccgggaaacaacaaatgttgatctaaacacccgcccctctcaaacaaaaatgttccttgtaaacaattctaccttggggaacctcctaaccctctggtatatcccttcttttcgtacccctcttacggaaacctgagggcgaaact

SEQ ID NO: 129941 - DNA, 695 bp, Arabidopsis thaliana columbia
cactatcgacgagctattacgtggcatgcacgcgtacgtaagcttggatcctctagagcggccgccctttttttttttttttaaaaaaaactaaagtatacattgcatcataatataaatgctacaaaacattagagacacttgttttcttcttacattgatacatttctatgatttaagccacaaattgagctctatcctcgaattctcctattagcttggcaactttatctatctccggcaccacattcttcactgtttcatctgacaaaaaccggttggcccatctataaagagaaggagtttttaattcgtctaaaatcttttcttttttaagcttctctctagctttcaagaaaaccaaaaagcttccaaggcaaatgtctatgaacccgattgtttcaccgccgaaaaaagattttcctttgcttagagcaataaacgcagcttcgagttgcaacaacccttcttccacttcttccatgccttttgcttttgcgtcttccgatttagcgaccacagctgccatcaaagccggaaaccacttgtcatcaacgaaggcagaccagaagcgagcaagggcacgatcatgaggatgagaaggaaagaatgaacgatcccagatgaatttccacgtcttcggtctattgtatttccaaccgatggttttaagagcacttcaaccaaaacccgga

SEQ ID NO: 129942 - DNA, 752 bp, Arabidopsis thaliana columbia
  unsure (1)..(752): unsure at all n locations
ggttggatttcgttnnnnnnnnnnnnnnnnnnnnnnnnnnnnnnnnnnnnnnnnnnnnnnnnnnnnnnnnnnnnnnnnnnncttttttttttttttttttttttttttttttttttttttttttttttttttttttttttttttttttttttttttttttttttttggaacaaaaaaaccccattggaactttaaagggggatttcgggttgtttttgtttgaaaatgttttttttttttgcccccaaaataaacttttttagggggttttcccaaaaaaaataagtcattcaacccggggtttgccccttaggtttcaaacccaccccaaaaaaatttttaaagaggatcccacattttttttttaaaacataactaatttgaatcccaaaattcaaaaaacggggggttcccctcaaatcccttttttgacaaattttcccttatttccgggaatttttttttcccaaaaccccaggccctaaccaaatttgatcccaggggtcccccctggaccccaagtttttttaaattccccttttttttttccaaaaaggggaaaattggccttgaaaaacccccttttggggctccggggggggggggaacctttagggggcctttggaaaaaaaaacccagacggggggggtcaaaatttcacctttcctcccaaaaggggacgcgtgggtcccccgggaatttcggaccgggacctggggggggaccaattttccctttaggaggggtatta

SEQ ID NO: 129943 - DNA, 1264 bp, Arabidopsis thaliana columbia
cgtcgcatgcacccgtacctaagcaaggatcctatagagcggccgccctctcaaaattttttctttttttattatgaacaccaaccccactcgcaatcaacaaacaacaaagggggggggccacacccaaaagccacaccaccgggaaccccacccaccaccaaaagaacccccaatccatacaaaaaaaaaaacaccccccaaacaactttcaaactacaccaaaacaacctgaagaccacccaccctaacaaaccagcctaacacccacaacaattcaccaaaggaaaacacccccacaaaacccccccacctaaacaatcaaccccagttcccgggccgcaaaaacaagcacaagtgtggagcaccccaaacccacagaggacaacaccatcaaccgaacagaaacgatccccactccccgcaccgaatacccaccaaaaacttggagcttccaaccaaacaccaacctgaagagagcgccaaccacactaatcctagaaaagacactcgcctcacacaccctctccagaacctcaccgtacacaaaacacacacaaccccacacgcaccacgcaacatatctccatcatatcacacaacacacaacgagaaacggaggttgggacacacacacggcccccggaaaactactcatacgacacaacccacctcttcgcccacaacaacgacaccaacaaaccaggacaaactcacaccacaccggcgctccctgaaaacaggcacaagcaacttcgtacgccggctctacaaaacacatagcgccgaacaatatgaacaaaaacacacaacccccctaagcctaaccacaaccaatcccctaccccaaagaccccctgacaaggcaaaccccgtccggggaacattgcccccacaccgaaacaccgggaaaacccacaaagcggccaatacaaaccatgcccaccgcaaaaaaaaaaaaccacccgcacccccggcgaaagccaccaaaaaaacccaccccaaaaaaaaacaacaaacaaaccaaccccgacgagaagaaataaacccacagcccccaaaaaccccaccaaagcaaccaccacaaaacaccccatgcgaacacatcaaaatcccccaggccccaaacccacaaaactcccagaaacgaaccacccggcctacaccccaaaaacacaactaccaccaagccgcccgggggacaacacacccgcgaaaaaaacccaccacacaagagcgcataaaaccttgccaaaaaccacac

SEQ ID NO: 129944 - DNA, 1025 bp, Arabidopsis thaliana columbia
cttgacgtcggatgcacgcgtgcgtaagctgggatcctctagcagcggccgccctttgcgtgcatttttttttttttggccgaatgcaggaaccaaaccgaatgtgccagaacctaacaccgacaaagggctacttggccgggacacaactcgcaggacacccccaattcgaacaggactcaaaaaaccaaatgaccctagggccgagcccaacagggctaccgctcaaatatcgctcacaaaatgaggcctgttatcctcaaatgacagagttgacaagccggccaactgctcatgagaagactgagcatctccctaacgatcaggagaagtgccggcataaccttgagaactttaccggccaccacacgcaagaccggaaaaacctctcctgctacctgcaggcctgcctacctgtagctggcccaaaccaacaataaaccagtgagacacccctagcctgggtctccagaatacggagtgggacgtgacccctgcaaaaagccaagcaaggttttcctgggaccagtgaaccaacccccaccaagagggtggacggaacaatctgcccatccctcctctatccgtaaagaagcaaaagacttttgttgcgggccggtggcacagacacagacagactcacggccaccggacaacacaggaaggcggcctcctacggcaggaagctctttcgggacaagagcactccactgagtgatacaaagctccataacactgatttatgggctcatctgtatcctctctacggatctcacatagcctatctgcgcctcgcacagaggcacacttcaatactccatcctctcaggagagcgcccataaacaaaacctgtctaggggcccccagcctcatccacacaaaaaacaaccgggaccaggcgcttccccaccgggcgaactccccaaagcctcttccaatatccaaaacctgctttgcgagaccgctgaaaccagggtaccagaacataaagtgaacaccttgggcatacaaccacccccgccac

SEQ ID NO: 129945 - DNA, 598 bp, Arabidopsis thaliana columbia
accaaagaccagctatgacgtcgcatgcacgcgtgcgtgagcttggatcctctagagcggccgccctttacttttggttttttatttttaaacgacctaattatgcaaacagcatggattacaactcaaaccacataaaacattacataagcaaacttaattcccatagttcccttcttaatctatagtgcctcaaaaacttgaggcagttcattacaaacgcaccatggtggacttaaaatgatacatgcataatgcaacaaatgcatggtggtgattggctaatatattggtctagtgaccgggctgagtctgaacagcttttccggcatacgagcagcatcttgagcagccgttgtaacctatgaagcacaagccgagggggcagaaacttcccccacttccccctcctccttgtggcccaccgcctccttggtatcgtgctcctcctccttggtgccgggctcgatcacctggggggcttctctccccctacctaggggaaataacccgttctagctccattggggaattaaccccacccaccttggccttggagagaaatatacccccaccctatactctccccttgggaaaa

SEQ ID NO: 129946 - DNA, 803 bp, Arabidopsis thaliana columbia
gaaaagtgccacattgcatgttagcgtaagtaagcttggaaccctataaaatcgagccgcgcatttgaactattactataacggtttttaaatttttgcgacacgacgagatgaaaccacaaaatgttgcttttctaagaatacatacaatgaagaatctggggcagacaaaaacacaattaaactagacagaaaaaactatgtttgtaataatagtataaaaatatataaaagcaaaagaattcatgagggaaggctttaatatagggtacaaatgaaaaaaattttaagatgtagctcaactaagcaataaacagtataatattggcgcaacagtttgataaacagtaaaagaaaaaatgacacttcatggaaaaggaatattcccttaaaaaatttgaactagaaatccaatggggagacgagctcctggaaaatatctctgaaaaaagtagtagactatgtggattgataaaacccagaaatattataccctcattcagtatgtagacccgacctatgaaatatatttatagagatttacaagccttaaagtgttaatgatccggaaataatattttaattctaagaaaaactgggagagaggccccttataaacacagggtggggacgaaaagatttattgagtcggaggaaagtgcttaaatagacgtaaaatcactctacggaacgggaagctgaaaaaggattttacaattgacaaacaaattcgttgtctcgtggatatctaatgaaaattatgatacttcatttagaatacggtttccccagtaataagaaaa

SEQ ID NO: 129947 - DNA, 796 bp, Arabidopsis thaliana columbia
acactatgtacgagcttgacgtccacgcacgcgtgcgtgagctcggtatcctctagagcggtcgcccttttttttttttattaaacataaggggcaccataggacataaaaaggatacaaccgcacttttaaaggggacaagttctcaattatgatactacaacaataactaaaagcgcttaaaccctcctaaatgaaaggcactgcatcttgagggttgaagcgcatattgcaaaggaaaagtgatcttgtctatgaattcatcctactgcaacagggataaaagggctgccttcactttgtctgtgctgagaaccggaccagtgggtgcaggagccagtgatggtggtggatttgggggtgggaaaggctgcaacaccggaataccatatgaccgatgctggtgactcgcattattatgattgagaggaggagcactgggcatagatacaccaggaatgaggtgtggctgtgccatcattcgtggggggccaaggaaagactgcgtcaccaaatctgtgtgaatgttggacttgctgctgataacttcagggttgtcgtcaaagatagtcatcagaggacaagatgattgtataggcagcggtgatacggatctgtggaaggtgctgatgtcgtgttcaggaaggagcaacgggcgggtttggcgaagtgaaagccagagccccgggggaagggaagcccgaggaaaattacccggaacagatgtgccctggggggggccccaccccagggatatcccatttaaattcggagctcccaacattaagaaatcttg

SEQ ID NO: 129948 - DNA, 624 bp, Arabidopsis thaliana columbia
acactatgctatgagcttgactgcgcacgcacgcgtgcgtaagcttggatcctctagagcggtcgccctttttttttttttttttgttcgcacaagatcgattgccagcgctcgttgtgccacacattattgatgatatatgagtatgtcaacactcgcgtttgcaaactcacatagacaatgtcactgatgtcttacgaagtttcacattgtaacttcaacacatttctgaatctgaaacaccatttgaacacatgaacaatgccgcccttccaacttaaaccggggtgacagtggccctgagcaccagctgttcctagttatagggtgaggactttactgaaaaaaatactctagaaagctcatctgctggagaattctgggatcacacccgatcatgagcatgagctgaacctcctctggtagggacatccacccaaagagcgtttttgttttacgcacccggttcactcgggaaaccgactcacgatccagggacaataaactgctgctgactttaacactggtccataatgaatgaatcctaaccgtgccagagtcatgagctaatcatagggcttattggccacctgttaaagcgctcactgtgccatgttggctcaa

SEQ ID NO: 129949 - DNA, 415 bp, Arabidopsis thaliana columbia
agtatctctgggcatatagccccacgactacgcgcctctttttttcgcagacacgcggcatgcaaacaaagttccatctacacctcccaatactacaaacgcatatagggaaacacagaaatcatcagatattttaacttatcaactacgcgttctacaggggccgatccacgtaccatacatgtcccaaagagcgatcaatgttggatcctggtagcatcacaaattgcaacaaaaattccaagcctgtatccttacggctactctgaacgtcttcccctttgttccacacactgcccaggggatccatcccctcaccttaatggcaacccaatcgtattaccttccaggggtccaaacctggaaatacaaaagcctaatcaaagtccaccgactggctaacgtggcctcccac

SEQ ID NO: 129950 - DNA, 739 bp, Arabidopsis thaliana columbia
cacgtcgcatgcacgcgtacgtaagcttggatcctctagagcggccgccctttgttttaggagtgcttttttttgtatttccgacgcactggtgcgggcaaacccttcttggcaatattaattaaatataccttcctccagaaacaatcaagccaaaaccaaaccctcttgggggacaaaaaattaatttggggtatgaaaccccaccaaaaatggcaaagaaaatgggatttttaaaccaaaattaggaccccaacaaaattacttttttttaagggggggaaacaaagcccaaattggcaggcccacaaaaggatctttgaacaaaaaggtgggcaaaaagaacctggcgaaaaaaaaaaacttaatgcttggaacacggttttggggcctggccccttttgggggacaaggggcggccctttcaaaggccaatgtctaacaggggcaatccccggctggtgccccggtgggttaatgggtgaggcccccccccgggtcatttggcaatttcaataccaaattttagcccccttggccaaacttgcgggaactccaaaatcggagccctattactgggggaacatttccccccgggggcaaaagggggggggtttccaaaccccgagggggccctttttacctgggcaatctcccgggggctccccttggttctggggggccctggtaaagcccccatttcccggccaaaagggagagccccgcgagagaaacccgg

SEQ ID NO: 129951 - DNA, 567 bp, Arabidopsis thaliana columbia
ctatgacgtccacgcacgcatgcttgagctcggtatcctctagagcgctcgccctttttttttatttttttactgaaagggcaagtcttaacatgaaagcatcccaagaaaactactttacgggcagagtctgcatatactaaccccttattgatacaacacccactcacccggagaagacgtgtatgaaaaagacaactttactgcagacgctcgtttgggctgttaaactgatcatttacctaggaattatacgggtgccacaagcatataccgcggagcatcacttcgcctgggctagagagggaacccgtgaacgcaccaccgaatttatggagatccatggacacgctagaggggccggagcacccaatgaccctacgtcgagctggtggtgacaaggaatcacaggaatgtaaagacgagaaatgcacaccaactcgacagcaatgtggcgggccagtgctatcttacatggggatcaaaaaagcgattgggtccgcccctctcatagattggctgaggcacgccctgtccttccccgaggttttgaaaggtttgcaatct

SEQ ID NO: 129952 - DNA, 738 bp, Arabidopsis thaliana columbia
ctatgacgtcgcatgcacgcgtgcgtaagcttggatcctatagagcggccgccctttttgttggttttttttttttcaaacgattggattatgcaaacagcaagtgttgcaactcaaaccacataaaacattacataatcaaactttattcccatagttgtcttcttaagctatagtgcctcaaaaacttgaggcagttcattacaaacgcaccatgggttacttaaaattatacatacataatgcaatacatgcatggtggggattggttaatatattggcttagtgaccgggctgagtctgaacagcttttccggcatacgagcagcatcttgagcagccgttgtaacctctgaagcagcagccgtggcggcagtaacttcccccactttcccctgctgcttgtcgcccaccggcttcttgtgatcggcctcctcctccttgggaccgacctcctcctccttggtatcttcctcctcctgcttggtaattacctgctgcctcttggtaagtacctgcctctgcttggtaagtaccccctccttcctggtaacctccttcggtattgaaatttcctgcattgccaccgcggccacggtgttcagggttgacagggtgccttacttcttgaaattcactgggggaagaagcatggcccggggctactttttgggggaccaccgcaggaaggaaaccagtcaggggggaaaacccccataacagagaagcctccaaaga

SEQ ID NO: 129953 - DNA, 740 bp, Arabidopsis thaliana columbia
agggcccgactagacgaaggcagcacgcggacgggaggcgggagccccgagacggccgccctagcgggcgggttttccgtttagggagagggcagacggcccggagggggggaaacacaacggggcgggaaaaaagcgggaccgggaaggcgccgggggggccaacccgggacagaggggacaccagccggccgggacgaagggaaacaaagcacgagccagagaccgcggaggaaaagaaggcggccggcccaccacgcagccgggggagacgcctaatagcgaaaggcaaaccgggacggggcagggcaagggcaaagacacccacaaggggcaaagcaccgaggcgacgaggcacccggcaaggggacggcggcaaagagagcagcggagcccgcgccgcgactcggggaagagaccccccaccgacaccggggccaaaaacgaaaccggggggccagaacaaggcgggggccccggaggaggggcccagccgaaccggggggccgggacaaccacgggggcccagggggccagcgaggggggacccaaagacccgaggcccagacaaaaaagcaacccgcccggggggaaccccgacggggaaagagcaaaccacaagccgggccagaggaccacccgggccccagaaacgcgcggggggacccaaacgcccagcagcgcggcgggaaccagaacggggaaacggccagccagcaccccgggggggggacagggac

SEQ ID NO: 129954 - DNA, 881 bp, Arabidopsis thaliana columbia
acactcatagacagctatgacgtcgcatgcacgcgtgcgtaagcttggatcctctagagcggccgccctttgtttttttttatatttttttttcgaaacctggaatgctttacagttgtgtacaatgaaaaggctgacaccaccggcactaatgagttgcatgaacccacgccgtgagtatgaggaactgtgtttgatttttacactcaacctcaagactcttggagggaatccaccaaggaacctttgcgtgaccataccatttatgcaggaccttgaggggtgaatcaaaccacaagaagctccttcagccataaacaaggaccccggaagacatactgtagggacagaaggcccaaggaactttagatataccggtagaaaactgcagaggctgctagaaccaaaaccctcaatcctgtggaacaagctgtcggcggagcgacggacacttttgtttttactatagcaccaatcatgccccaatgggccccttttacgacctagagcagatgcccaagggggggctgtttacagaacggaacgcccagcgtgtgcacattgtagagcaccccagggggtgggaattgggccactaagaaatattaattccggtgggaaccctttcactacaaaaaggaacctaagaagcctggaaacattatttttgggtcccggggccgggaaactccgcctgtgttttgaaaagccccttcggactcaatttgggtgaccacaaccttcttccgccaattgcggcccaaggggaaccactgggggggctcgaacaccccaccataaattggcctttgcccccccgtgtcacccctgcccgcgtgttggaaacccccccaaagagcccgtaatacacgggcacaatt

SEQ ID NO: 129955 - DNA, 858 bp, Arabidopsis thaliana columbia
ggctatagaccagctatgacgtcgcatgcacgcgtgcgtaagcttggatcctctagagcggccgccctttttttttttttttttttttttttttttttttttttttttttttttttttttttgtttttttttttaaaagaaaaaaaggtcccccccccaaaaaactttttttcccccccagggggggaccccccccccctggggacggggcaagaacttttttggggggggcccaccccctttgtatacccaagggacccaaagcccacccttaaaaggggattatggggcccccaaaaaggggggggggaaaatcaagggcccccacccgggaaggggtttgggcaaaccccccccccagggggctttgaccctgaaacgggacccgggccctggaggggccccgggcgggggggacaaccttctttttttttccccccccaaaaaccttcccttaaaccaaaaaaaaactgggggggtccctcccttccccccgggaacttttaaaaaggggctttaggggtttgggggctcacattcccgccaggggttccctggggataacccaaccttgggggccttttgggccggccccgggcacaaacccgggttggggggagctttctctccccgggggggaacaacccgcctggggacccccggggcccagaaaagacggcccccccatttcccgggggggggggccccttgggggaaaaagtgcccccccggaagtggcggtggcccccctcgggtggggggccccctttaagaaaaaaccacccttgtgttgtgggggggcccccccccagaggagcctgttttccccccccaaattataaaccgggtctttttttt

SEQ ID NO: 129956 - DNA, 909 bp, Arabidopsis thaliana columbia
ggcaggcacgcgtgcggaagctgggatccactagagcggccgccccagcaggagagctttttggtgttagagaaacacacacactgcaatgggggcggcgggcgaaagcccggcaacaaagaaaccccacccgagggagcgggaaccaagaaaaaaaagaaggggcaaacacgaccgaggggaaaagaccgggcggacgaaaacccgcgggaaagccaaaaaacaaaaacgcgggaaaaaggatccttgtaaaccaaagcggaggcggagggaaagaccacccccccaccccgggagcgcaacaggagggagagaccccaaaccaaaaagggccagggcccggggcaggcgaaaaatgcgagccaagccgacaggggggaaaggacggagggcaaacaaaaaaacccagagaaaagccccccggaaggagaagaaccaacccataaccacaagggacgggcgaaccaaaacacccaggggccacacaactcgagggcccgcaccacggaggacacactcccgggaaaaaaaaacccccccaaagagggaaaaacaccgccccccagggaaagcgggcgccaaaaagcgggggggatccgaaacaaaaaacaaggggggagcaaaaagaaaaacacggccccctgcccgcgaaggagcccccgggggccgacaacaggcgacggggacccccgtgcacaagaacctaaaagaagtcggtcccgaaaaacagaggacccgagggggaaaaaaacccccctcacaaaaaaggggcgaaaaaaactctgccgggggaaaaagaccgcgcgcggggggcccggaaccccccgaaggggcggccccccccggggaaaaggccccggggaaacgggggccccgggggggggggggcccccccagacggggcaccca

SEQ ID NO: 129957 - DNA, 858 bp, Arabidopsis thaliana columbia
cacacgttacctaagaccggaggattctataaaattcggtacgacccttaaaacctaacaaaggaccgagtttttttgatatttaaacgacagaaaacaaagatcaataaaattttgtttgtgctaaaaaaacgaaaagaactcaaatatagagaaaaaaacgaaaaaatatttttcatgagtaatataataaaatattatacacaaggtttataaaaaaaagcttacaaagaagaccaaataaaattgaatacaaggtccaggaatacctaaaaaacttaataagattttattaaaattcactctgaagacaaatatttcttacacgaaaatgatttcaatccacaacttaaaccctcttgtatggcttaaatatataaaaactttgcgaaacttctttatctcaaaggagggggtcaaccacaattttattcacatcgacaaataactgggaggaacactcctcttgctgatactatattaaccgaaagacttagcccctcaaaaaaaataacgtccaaagtaaactccgcgcaagattaaataaaaatctaacttagattggtgtaccctcaaatatgttcatatatctgtattcacccaagataacaagggaaacaaaggaaacattataatggaaagtattgcataaacgtggaaaaaaacatacttaataaccccttttgaattttctaaggtgtcgataaataatattcttagaagacaactattttattaaagaaccgattaatgtacccaattcacataaaaacgaaaaaacgggggtaaaaccgaaaaattgcgaatttttatttggtacaaacaaaattaacttaaatgcgcaaaaatctcgaaaaa

SEQ ID NO: 129958 - DNA, 853 bp, Arabidopsis thaliana columbia
cctagaagagcttgacgtcgcatgcacgcgtgcgtgagcttggatcctctagagcggccgccctttttttttttttatattttttttcttttttttttttttacaccccttaacttcttatttttaataacagtatgggccaaaagaatggggccaaattaagtggcttttttaaaaaaaaaaccaaagctggggggccaaacaaaacctaaatttttggataacccaactgggcaaaacccctatacaaaccaatatcattttcaggttctggataccccggttgggccttaacttttcaacaaggtacaaaatggggaaatcatgaaaaactaaacctcccccccttaggggggtaatgaatcctttttttttacaaaccggccctgaaaaaaaaacccaaggcttattatttatttttagcaaccccccggatcaaccaattttatgtttcttacggagtacaatcatttaaatataattctaccccatggtgttggccccaaacgggggggaaaaatggttaaaaaaacaaacctctagaaaaaaagcttactttaaccccaggacgttttttcgtattgtgtttcccaacttggttttgaaatcccctttaaaaaaaaaaaaggttttgccctttttttttttttacccaggaacaagtggggttttgttttagcccctttttcaataaacctccggcggggggggttagccaattcccgggggggattgggcacaaaaataatgtccccaggttttttatccgggcggtgtaattataaaaccccctattagggggggagaagaaatatccaaaatttcccgggtactttggttgttggggggggcg

SEQ ID NO: 129959 - DNA, 971 bp, Arabidopsis thaliana columbia
ccacgtggcatgcacgcgtacgtaagctgggatcctgtagagcggccgccctacgcgttcggttaaatttttttttgtgttttccaaggctgaaaactataaaacatggttgtggtgttttcttatgcgccattgaaagcagggatcttaccgcaaggcaccaaacctatgagggggagcgcaatgacgaaagcaacaaacgacccgcctttgggggggaagtacgaaacgacccacagaagggggggcaagtcacggaaaaaaaaaaaaccacgtccagaaacttgtccataaaaaaaaaaaccaggggcaacaaccacaagaaccgagaccgcattgttctccaaggatgttgtacaaaaaccttgccggaggaggagagggaacttgccccatctgtgccgggaaaaaaaaaaaaagaccccgccgcgcagacccccccacccacgccctctatggatgggagaggaagaaaccaacaggcgttgcggctgcccaaaggggggggcggaaaaaacccctgcactcccgggaaggagggaggcccctagctaatgccgcacacaacgaaatgcggggtgtcctttctggggcaaaacagccccctacagacgggagagagagcacccgctaccaagattctgcattcggcgcccctcatgtgggcagagacctaacagcgccccctggtgagagttaaaatcaacaatgtcaacatccccctcatttaaaagatgcgcggcctcttgtggacaagaaaacaaacccggcggggcggcaaccgcacccctatttgtctttcttctgcggggaggcgcgggccccggcgggcaaaaaaacaaaatatctcaactatgagaatacgcggcccccctcctatgggcgtctccacaagaaaaaatttctcgtgacaggtccttgtgagacaggaaccgaagtgttttgaaaacaagggaacctggttttaacaa

SEQ ID NO: 129960 - DNA, 887 bp, Arabidopsis thaliana columbia
  unsure (1)..(887): unsure at all n locations
ttttttttacgcaggaggcagaggaaggagaacacggggggggcggtgttggaacgcgaggggcaaaggcgttatcacattattacagtgaattttgctttttatagggcttgtggtgttgatgttttgtgtgttgaaatgtttattaccttttttttttttagaaatacttttattttgaagaatttactgtttgtttgccatcttttgaaagtagatttttgaggaagaaatctgcgaattatgttggtattgattcacagggaagtgattgatgccatttcgctttttttagcactttttttctgatattggagacacgtggttttgttgttcttgccgctgtgcaatagtggaatcctctttttttttttttttatcctcgtcttttaaaaggatctttttttgttttttgctcccaagaaagggagaacgatagggggatgcatatgttttcttttgttatgggcctcggagggttccttttgggtcaacaagtgggtggtgatnagccagatagcagtgtttgagaaatgaaggttttttatgccatccagggtttcggtttgtggtgggtcgtgttattttatcccattttgtctttcaaatagctttatttggggctctctttggggtttttttgggccgaaacttttttatggctactaatgcaacttggttgtgaggaattcttaagaaaattattgtatgtttgggtggggaattcttgaatagtctttttgtattagtttagtagcgacgcattttttcatgttttttaacatttttgtgtatggctttatattggggtcttaaatcagaacattgaggtgcattgggtactgttcttcatatttacacgttctgtaatggtttttggggctttt

SEQ ID NO: 129961 - DNA, 343 bp, Arabidopsis thaliana columbia
tcatgatgtggctgcgacaacgccctctagatttttccggagtatatttaagactagccccggggctggacgcagattcctaaggtcattaagctgtgtaaaccgccgttaaacaggtgggatccaggaataagacgcgtaaatttagggttaaccagaccgatctggactgtaacagtgtggaaataccgaaccatgaatacggcatacacgaaatcagcaaaaatgagttgcttacttcgctcttgcaccaggactggggaaaccggtagcagacgacgatgtcagccccggaatgccagatcagtactaccatgctctactagtgccaaacccgggggga

SEQ ID NO: 129962 - DNA, 798 bp, Arabidopsis thaliana columbia
  unsure (1)..(798): unsure at all n locations
nnnnnnnnnnnnnnnnnnnnnnnnnnnnnnnnnnnnnnnnnnnnnnnnnnnnnnnnnnnnnnnnnnnctttttttttttttttaaacaaagggggcagggcagtatcttataaggttccaacaacactttcagagggaacaaaactacattttaactacacattctagatcaaacagccactatcccacacgtagatgctgaccagcgcagcttcattgttgaagtgcattttgtaaagttcgggtaatcttgtcaatgaattcatcctcctgcaacagggataaaagggcttccttcactttgtctctgctgataaccggaccagtgggtgcaggagcgagtgatggtggtggagttgggggtgggaaaggctggagcaccggagtaccatatgaccgctgctggtgactcgcattattaggattgagaggaggagcactgggcatagatacaccaggaatgaggtgtggctgtgccatcattcgtggggggccaaagaaagacggcgtcaccaaatctgtgtgaatgttggagttgctgctgataacttcagggttgttgtcaaagagagtcatcagaggagaggaggattgtagaggcggtggtgattgtatctgtggaggtgctgctgccgctacaggaggagcaacggggggttggtgaggtttgcgaggctggtgaaggctggaaagggaattccttgacaatgggtaaggggccccactcgcttgaccccactccaaagggagcccccaagaattcacatcgtggaagcaagaggaagcttgcctaaagcc

SEQ ID NO: 129963 - DNA, 1073 bp, Arabidopsis thaliana columbia
  unsure (1)..(1073): unsure at all n locations
aacacatctagagagggcggaccggatgtttttttttgttaatcacagcgaacgggagcagggacaaaacaacactaccggcagagcgtgtgtgacaggaggagggcccgcaccaatatgccagacagggggactgcagtcatctagacaccatagggagaaagcatagcaccgagaccaagactgaaaccaaacgaaagggatgttcctaaacacataaatgacaaagtattcacactgtgagctctacgataatggacggggtgattcttatagggctgtatgaaccaaactcccagcagatagggtaatcgcagataaattggtgaaagagagaatcagaatggaacacctccccaaatggtgactaagatggcaaggcaattactcagcggcattactgcacaatgtgtataaggctgatgataaagactggtgtgctaagagacccacaaaagacatgttggtggaaatagtaggggtggtggggagaaagacacccaatcgagtgaaccaataagtatagcagcatatccccgtgggttggtctgaaacacagaacccctcgtgctagggggagaaaaactagtctggtgggcccaatgtgaatggggctgaaaacctgccatagaatagacactgcgagactagcctcttatagaggaaaggcgctcaaggggagccnctctgtgtgagaaatcgccaccggcgagccaagaaggccattctacaaaagaggagataggcgcctcacccaggtgcgtatacacttatactacagaggagacacatggtggggcataagtaacatctgcttaggagctgtcaagaaagcacactccttggggaaaaattccacagagggacccagagagcacaggggcgaggggcaacctgtccctggcaatggaaatatgcaaaaatggggggagagaaaccaaaataggggtggaacattgggactccaaaaaaggggttgaataccccgtgggcgaaaaagggggtataggggtttacaaatggaggcccctgtttggggggggagaccacaatagaaaagttggactggggcg

SEQ ID NO: 129964 - DNA, 891 bp, Arabidopsis thaliana columbia
  unsure (1)..(891): unsure at all n locations
nnnnnnnnnnnnnnnnnnnnnnnnnnnnnnnnnnnnnnnnnnnnnnnnnnnnnnnnnnnnnnnnnncttttttttttttttttttttttttttattttttttttatttttttttttttttttttttttttttttttttttttttttttcatttttccagggggggggaaccccccccaaaaacttttattaccaaagggggggttaaccaaaaaaataagccaaaatttttttagccacaaaaatgttcccttcccccccctgccttggaggggcggggggggcccaagttttcccttctcgaaaaaaaaagaaaaattttttccccccccccagaaggggcccaccccccccgggggagggggggggccccccggggggaaaccccccccctcatttggaaaaatgcccctcccaccccggggggaggcacccaaacaaggggggcccacaacctccgctaaagagagggggggcccccccctcctttttaaaaacccccctcaaaaaggttttttcccccccccgggttctttcgcggggggaaagttatctaaaaaaaccaccccgcccgccgcccgtgtggtgcccccacccgggaaaaaaattggcgacccggggccctccgggggggggggcccacccccatttattttctttattgggaggggggcgccaaaacaataaaaaaaagattggggcggtcacaacccaagggggacactttgcctttatttcccccgcggaaggaaaaataattgtggtttaccccccccaacaagaaagtcctcccaccaacaacaaaattaaaaaaccggggggggagaacaaacaaaagggtggaaacaccccgcgggggggcgcccaccaaaagtggtggggggggggtcca

SEQ ID NO: 129965 - DNA, 398 bp, Arabidopsis thaliana columbia
ctaagtcatatgtccctgcgactaagcgctgtttgttttttacggtttctcttgtaataaatttacgaacataaacggtgtaaagtcaccgtttgctttaaccatttggaaattaactaacagcatttgttgacatgtaaatcacgagggtgaaccgaattttcaatttatgataagtcacgtaactccagttctacttaaagggcggaattcttttccttgtcctttaaaaaccgaatccaagccaatgtgaaaaaccccttacccggaaaccctttgaaatccctttttttaaggttttcccgaaatgcattaaaggccgcccctacctttaaacggttaaggaccgggtaccgaatcgacggctggggttccgtttatggaccataattggtttt

SEQ ID NO: 129966 - DNA, 796 bp, Arabidopsis thaliana columbia
acactctagacgagctatgacgtcgcatgcacgcgtgcgtaagcttggatcctctagagcggccgcccttggttttttttttttatacatacacgaaaagctttatatttacaaagagagattgagtttaacaacggatcaaagagtgataaatctccaaaaccgatggataagactgactgcacacccactttaaggaagagaaacaacggacccactgcacattgcgtagttccaatgccctaatcatcaccttaaccttcatgtccttgtctccggccataataagagagcgtactctacgccgttgtcgaagggaccattcaatgaccactatctgctggttccaatcatgtacttgtgcatgctacagtggaaacctctcttagacagacttattagctaataccgtgcttatttgctctttcaaggcgagaggcaaagacccacgcgcatgaaacccatcctgggtcttaactcgaatggccgccccttttataaaaagaagctgccccaggtcactttttttggcctggaccgaaccctgcagagcaacgcacccgctcttgccctgagcgtttatatcaggaaaccacagggggagaaggtctattgggagagctgatcctaggcgcacattatattgcatacaagatgaacctattgttttaataacaaacggaacccgcgattccactccgaagatactagacataacctgcttgctacccaagattgcctagagagagtctgattagccccccacatcggtttgttcaaaatcaagaacgggctt

SEQ ID NO: 129967 - DNA, 709 bp, Arabidopsis thaliana columbia
  unsure (1)..(709): unsure at all n locations
nnnnnnnnnnnnnnnnnnnnnnnnnnnnnnnnnnnnnnnnnnnnnnnnnnnnnnnnnnnnnnnnnnnctttgttttttttttttttttttttttttttttttttttttttaaaacccaacgggttccaaatttcatttcactgaatcatgttccaagcaagttgtttcctacctaaagggggaacaacccaaacagtgggcaaaaacccgaatcacaatctttatcaaagcttttttgaaatgaaacccgttcacgggatttttcaattgaccaaaatcactaaactcaatggttttaacaaactaaatagggttgggaagctccattaataaccgtttttgggggagtaattttttggagcaataaccaacccacgaccctttcttggaccacgggtgacaggctcaatgatttcaatgaacccctgcttggccttgaaagcccaagtgattttggtgttgttacccgttccaaaatccatcatgatgggcttggtcctgaaaaaaaacatgaccctagaagggtcctacaactcggacatggggttgaaggttggaaccttagggatgtccaccaaataaatgactgcaaaggtcttaattgttttaagaacaaacccaagccccttatccatttggattcagggttttatccccattatgggccgaacccaattgactgactaggccccttttttctttgggccaa

SEQ ID NO: 129968 - DNA, 768 bp, Arabidopsis thaliana columbia
  unsure (1)..(768): unsure at all n locations
cgtcgcatgcacgcgtgcgtgagcttggatcctgtagagcggccgcccttngctttttgggtttgttttttttttctctggtttggctcctggcttctttgggggtcgggttttagtcttttgtcgttgttgttttttttccggccccccccggggggggacctaggacgcccccgggggggagggacccccccccccccccccccaaggaggcccccccgccggaatgaggggggacaccctttttcttttaggaagcgccccccccggggtgggggggggcgcccccgacggaaaaacggggggggggcaatttttttttggggggcggggggggggaaacccccccggggggggcttttttttttttttcccccaaaatattttgggcgcggcgggggataaaaaccgctctcccccccccgggggggccccccgggggttttcggccccggcccggggggggccccccttttttttttgggggggggataaaagggggggcggaccccagcccttaatgggtccccggggggaaaaaggcccgccctccaaaccccaccaaaaaactgggccgaaatataattgggggaacccgggggggccccaacggggggaccccctccacgggggggggggggggcccccccccccccctttggggggggaagaccccgggggggccctgtgttttaagggggggccccccccgggggggggggggggtttttttttcgccccccgcggggttttttctttcaccagggg

SEQ ID NO: 129969 - DNA, 840 bp, Arabidopsis thaliana columbia
  unsure (1)..(840): unsure at all n locations
nnnnnnnnnnnnnnnnnnnnnnnnnnnnnnnnnnnnnnnnnnnnnnnnnnnnnnnnnnnnnnnnnnctttttttttttttttttttttttcacgaacattgtcatcaacttatactttggaggatgaattcatcgtactggacattgtacaccacgagttaccattaattgatagccgcttccgcatgtatatatctacagtaaagttactgaacctctgcaccatgctcagtcacaagagtgacttctatttgagtgactccaaggacagtacccgaccataaagacaatacaaggcctccgtacgttggaacataaccaatcattcaatacatgatcaggccttgcagtatgactctgaagctcctgattttgcaccactcgaagatgtgaaattgctatcaccatctccattaccctatttgccaaaagtcttatcatcattcctatgacccatacttccgctgattggatacggcttcccgatcttaaacaccgggacgccttttctttgaatttagaactaggaacgagcttctttgagactctggtggaactcagaccatggtttcatgcaccgaattaaccgctttgattgaaaggcaccctgagataagcacctctggaaacagagcctgaggtaaccctgacgaccaggaatcggagcttgtttggttttatgaaccgggaccccttttggacacgacctcccttaaattttttgagccggacttccccttgttgtgcaaagacccaatcttttgggccttaataagtgggagtcccctcaattgtggaagaatcgggtcggaaaaaaacagttggtttgttaaccctttt

SEQ ID NO: 129970 - DNA, 668 bp, Arabidopsis thaliana columbia
  unsure (1)..(668): unsure at all n locations
tnnnnnnnnnnnnnnnnnnnnnnnnnnnnnnnnnnnnnnnnnnnnnnnnnnnnnnnnnnnnnnnnnnncttttttttttttttttttttttttttttttttttttcttttttttctttttttttggaaaaaatttaccctttataacaaaggggccaccaaatccataaaaatttgttttttttcccccccccccaaaaaaggaagatttttttttttttgctaccaaaaaaaaaaaaggaaaggtttcgtggggttaaaataaaaaaaacaaacccttttttccatggccaaagggctgccctctttattaatccctctctaccggttttgggccccggttttttttgaaaaaaacaaagggcccagggggaccttgtttttgcccttaaacaaaacaaaaccaaccctgcccttttttttttaaaaaacaaaaaactctttggtttttttaaggaacaaaacatacttttttttcttcctaaaaactttttttgtaaaaagggaagtgtcccccccttttaattacaattgcccccaaccggggactggattaaatttctgctgcaagggggccccttaaaaattttttacctaaaggttttcccccaactttttcatcccaacctcaaaaacttggttttttttggaaagaaaaaaaaccctttt

SEQ ID NO: 129971 - DNA, 432 bp, Arabidopsis thaliana columbia
ggtgaggcatggaaagcaagatgagccgcaaggggaccaagcgcggagcttttggcgacagagggagagggaaggagaaacgaagaaaggggggaagaagaaagaagagcgggcggaaaaggcggcaagggggcgggcgggggggggcaaggacccaacaggacaagcgaagagacgggaaggagaggcagaagaaccgagaagggggaggaaggggagaacacgaagcgagagccagcggacaaggggggcacaacgcgagaagaacaagccagagaaaggcaagggaagggccgagaaggacgccaggcaagggggagaaaaaaggcaaaagggcggaaagaggacggtgagcgaaaagggacacggagggacacggcaaccgggggaaaccgacgcggccgggggagaagcaagggacagacgggaacg

SEQ ID NO: 129972 - DNA, 849 bp, Arabidopsis thaliana columbia
gggccggttgggttgaaattcctttagaaaagtgccacgtcgatgtacgctgacgtaagctcggatcctctagagcggccgccctaagccccagaaattatttttttgtttttcaggggcccaagacggattaccacattcggggacgtcacatatgtcttccaccaggattattaaatgaattcgaacaaccctacctatcaatgtcataacaatgcaagaatggagttcacgaccattcttctgagggaagttagaagactcaaatcaaatagggtttgccaaaccaataaagaaaacggacctgggccaaaagttaattaggtttgacccaaaaaatcagaatcgggccggcctatatatcttattgggccctgaaaaaagaggcccattttaaaagaggagcccacattggcaattaaggctttggcttttgttctctcccttgaccgggaaacgtgcacttgttttggaagcttgtcggaaagccatggaaccatcacccataaaaagaaaacctcaggcgccgactactactccaccggagatggctcatctgacggaccaagagacatctcttgccatgaacaaatctcggggtgaatattctcttggggtgggtgaaacctatctagaatctgtacaaaaaaggcggaggagagaaaaaaaagctttttgattgaacgaattgcatatccctggaaaagaaaataattttgggcgacccaaatttgctaaaaacataggggtgggaaccaaagaaggggctaactctccccgggacccaccattctgttcttgcctccccttaagactgggtttttttgtggccccgcccctatgaaaaac

SEQ ID NO: 129973 - DNA, 688 bp, Arabidopsis thaliana columbia
ctatgacttcgcatgcacgcgtacgtaagcttggatcctctagagcggccgcccttttttttttttttttttttttagagaagaaacaacttccaatactaagaaggtttgggagcctgaatcataatctagtaaaagtcttaccgaaatatgaaaatgacatactcttaaaacacagagaagacttgaggaaaagctaaacccaacagataaagaagactcttttagaaggcttatcaattaaaatccgcgcttggttctatgccattgcctgcgcttgggactggacctgatggtgtggtccgctcgaaaacaaactacacgaggaataggcgtgttctgtctcatattattctccaacttcctcttaattataaacgacttgtgcagacggcatcttgaagtcgtgagattcgaagctcctcggacgcgagggaacagaacactgctcttctttgcacgcttcaggccagcactgtcccgacctataactatgcggtttattggctgaagttcgaccccaacaatggccagatgacccattgcctttttccagcccttgtatggggccaggcccttctcccccttaaaacctgcacagaaacttgaacgtgttcttgaacctcttgggtcaagggaacttttcaacaaaacactttctttccccataaattcacactaaaggttt

SEQ ID NO: 129974 - DNA, 720 bp, Arabidopsis thaliana columbia
  unsure (1)..(720): unsure at all n locations
tagacagagctatgactngtcgcatggcacnnngcgtancagtaaggacttgggaaatcctctagaaggcggcncnngccctttttnnttttttttttttatttttaatattattttaatattttatttattttaataatgctatatagttttttgattaagattttttaataaatttgtttatagtgacaaggaaaacatggaacgggggggaaaaaaaaaaaaatggggcgaagcaaaaaaaaaccgcggcccaaggggggggcgccctttaaaaaaacacctaaaaaaaaaggagacttttttgggccgacaaaaaaaaaaaaaaatattttggggggcaaggaaaataggggggggcctgaaaaaaaaacaaaaaaaccaccctggggccccaaaggggacccccatatgtctaaaaaaaaaaaaaaaaaggcgtcccccgcaaggggtcttcccacaaaaggggaaaaggcaagggccaaaaaacccccgcaaaaatggggcactggggggaaaaaaaaaaaaaaggttaaaataactcaaagggggtttaggaaaaaaaaaaaaaaaaccaaagttttttaagggacaccaaaaagtgcggggggggggacccccgggaaaaaatcacttaaaaagagcccctgtagggcttttggaaaaaaaggcctccaaaagggggcccccaaaaaaaaactccccaaagaatttaaaaaa

SEQ ID NO: 129975 - DNA, 534 bp, Arabidopsis thaliana columbia
  unsure (1)..(534): unsure at all n locations
ctatgacgtcgcatgcacgcgtacgtaagcttggatcctctagagcggccgccctttntttttttttttttttttttgagnaaggcaaccccacagttctaaagcccagaaagggtccaaaaaacacccaaccacaacaattatccccataactcgtaaaggtttattcaacgacccaatattgatttaaaattgaaccaccggacacaagacctgtcccttgttaattaacccagcttggaccgaaaacttcaacacattatcccctttgaacaccgccgtcttaagaagaacaaggctagctattggccctgggcatttttatcgatgaagaaaaaatcctaaatcatatccttgagacccccctcgataataggactcatatcctttaaccccagaagagagcggcacggccattttaccattgctgtgccggactcaaaagtgggggtcctgtttacctccctgaaaacttcaccccttaggtgttaacttggctcgaaagccgatggaaattggagggattgttcaaac

SEQ ID NO: 129976 - DNA, 642 bp, Arabidopsis thaliana columbia
cttgacggcgcacgcacgcgtgcgtaagcttggatcctctagagcggccgcccttttttttttttttttttgaagcaaacaacaaaaatgtttcattgcggaattgattagatacagccccacatccaagaccaacacacctaaacggatgagacatgctccacagattgtctcctaacttagaaaaaaaagaatacactatttttagaacctaaagctgccttttgtaagggttaaactagcttggttaccttactattttagtgtacatcttcttcaactggattgacagagattgagtgacttgacctaagattacagagccacacatggaggcctgtcaaagtatgtttaaagaaactatcaaattcctacagttacggatccaacccttgagacaatttctcaccttggggacccacttgcatagcattatgtttgaagaattcaacttggaccagatcaatgcgatcttggatgattgggtatagcttcacgacactatgatcaaccctttccaactttttgaaaattgtggatctaccgagagacaacatgtatctgatctcagcatttacaagactgtgcatattacccaagacctttgcccatagtgggttctcagagacaggtaaatccaaa

SEQ ID NO: 129977 - DNA, 632 bp, Arabidopsis thaliana columbia
  unsure (1)..(632): unsure at all n locations
tnnnnnnnnnnnnnnnnnnnnnnnnnnnnnnnnnnnnnnnnnnnnnnnnnnnnnnnnnnnnnnnnnnnncttttttttttttttttttttttttttttttttttttgggttttttttttgaaaaacaaacctttaatttttttactttgggcaaaaaatttcctaaatttaccttggcccttccaaattggggtcccggttggccacctttgatttttccaaaaagggttttaaccttcctgaaacttggggggttggtgggcatgaaacctgtgccctgggctttacggggggtggccaaacccattaaccctatgaaggggccccgggacccctttttggattttttaacttcctttaattcttggaccaaagcgggggcttccaaccatgggagctttcccctttgcccagacccgcccttctaatattccggaggggtttccggcttcccggaccccaaatccgggttccacctgaatttcaccccagggattccctttgtgggggaaaaggagtcaactttctttacccattttacctctctaagggcccggagggaaaaataagatttaaacctttttttttccaatggtgcggaccccttggttcaccccggaatttcgggaccg

SEQ ID NO: 129978 - DNA, 699 bp, Arabidopsis thaliana columbia
  unsure (1)..(699): unsure at all n locations
nnnnnnnnnnnnnnnnnnnnnnnnnnnnnnnnnnnnnnnnnnnnnnnnnnnnnnnnnnnnnnnnnnncttttttttttttttttttttttggaagaaagtgtaaatacttgaaacttttcaatctaaaggttttcacagttgatgtgatctcaaataacaaaaaaaggtaatacgaactcataaactgttgttcaaaaagggaaccagagaaacattgtcaatctaattcagtttaaatgaagaggctgcaaaacccgaactcaatcttgtgtgtcgtttcaccatcctcctttgcagctgaagttccctcaaaatatgtgcatcaagtcataagcaaatgtccagaacagcacaaacgacataaggccaccaagaaagccgtcaaaaaggacccgattccacgaatcaaagtacaagtcagctgagaatcctgccttagccatgagcccaacagatgtgatcaacatcaccacaaagtaaaatacaaaaccaatcaagccattgaatccaattattcctgctaagacaccagctatgatagacagaaacgtccggctgttttgaatgactttcaaattgttctgcaaattctctgcactgaaagttggtatgtcactcatgatatcctttgatctcttctcagatgaacccatttaagatagcaacaataattagaaacgagagtagtaagaggaaga

SEQ ID NO: 129979 - DNA, 697 bp, Arabidopsis thaliana columbia
  unsure (1)..(697): unsure at all n locations
nnnnnnnnnnnnnnnnnnnnnnnnnnnnnnnnnnnnnnnnnnnnnnnnnnnnnnnnnnnnnnnnnnnnctttttttttttttttttaaaccaaaacaaactgttttgccataaaattatcaagacatgacgattattccaatggtgactctatcagggaaccaaaaagctatgataacaatttggaagctcctacaagaaacactctggaacaatccctccaatgtagagagaaaacacctactcaggacaatccaacctttgaaaccttccagtcctacaaagtcaggcgcccacctcttgagagacagcagtcgacactctaaccctcacaactttgcctctcatcccaactacagaagccgtaatgggagaactctgcgatgtcactattccatacaccagctgcgccgatcctagcaaatccctatccttttgataaccatgtctctgtagaacagactatctctactgatgtgccagtacatcctgctcagatacaacagatccctccgatccctccaaagaaaaagaatggccgacctccacttacaaaacctattagacgccatggagatgactctgtcagcacttcaagaaaaacctcttctcagagacgacaacacaccagggttgcatcaaatctggcttcttcaagcaaagctcctcctacaaggccaattatcccagccactgtg

SEQ ID NO: 129980 - DNA, 682 bp, Arabidopsis thaliana columbia
atgacgtcgcatgcacgcgtacgtaagcttggatcctctagagcggccgccctttttttttttttttttgtatctcaaaaaagtaaaattgttccaaaacttatattgtgagagaaaacaacaaaacggattcagatacaacatagtaaatcttactcaggtgaaaccatccacgactatgatggtggagatggatgtatggagatgacttatcagctaaaagcttattgcttaagaggagcttttttctctctgtctgcaattctagcaggggcgtttgagtgtgacttgaaccggcctcttcctccttcgtctctctcctttttcttgacgatctgaacaacatcttcgtcttcaagatgttgagaaagaccacaattctgtggattgtgccttgtgcttgtgccccaaacgagtgcatacttcatatccttcaccagagtactgtggacgtggctacagaagtgttccactgtgcagccacctcgatcagatgagaggacaaaaggctcatcgaaatctggttgctggccttgcggcttcgagtaaactctcacaaggcccatttcatcccacatccttgcaagtagtctgtctaagttaagcttaagattgcagctaataacaatggaatttggctgccgggatagtctatccacatcatcaatttcaacaacattta

SEQ ID NO: 129981 - DNA, 652 bp, Arabidopsis thaliana columbia
  unsure (1)..(652): unsure at all n locations
nnnnnnnnnnnnnnnnnnnnnnnnnnnnnnnnnnnnnnnnnnnnnnnnnnnnnnnnnnnnnnnnnnnnnnncttttttttttttttttgtgtaaccaacaaagagttatataaactggctatgacatcggcattgtggctcacaccaaaatagtttaaattagctcctccgattagagcaggatagaggaaaaccagggagcctatactcatgattggatagaaataacccaactgggtggtaacgcctcgcactttcttgggaaacagattgcggttctcaatggaggctccgctaccgacacagatgcatccatctctttgccgcctatggacccatgtgtacccgaaccctaccacaagaactgggcctatatcattggcccatacactagctgggtgccgctgcgtattgacgaccccctcaaacctatgggaaaggcctgttgtgggggaggaaaccggaggatgacgggatctacccggggttttgtcaccccactgaatctcatcgcggctgcgagctgaaataccgctcactttgtgaagcatgtgcatcatgattacggctgatggatggaaagggattggtgtcctaccatgtggatcaactcctaaaaggaaaccttttcctgtgctatcagagacacgtt

SEQ ID NO: 129982 - DNA, 716 bp, Arabidopsis thaliana columbia
  unsure (1)..(716): unsure at all n locations
tnnnnnnnnnnnnnnnnnnnnnnnnnnnnnnnnnnnnnnnnnnnnnnnnnnnnnnnnnnnnnnnnnnncttttttttttttttttctgtttttgtatccgggtaaattaatcacacggtagtttttgatgaaaagacaacaatcggagaacaatctggtctgctgctaaaatttaataaattgttttgtctaattgtctccacccataaaaaagcgcgaattcaattcaccgactaaagacattctccggtggagaccccgatgcaatccactcatataagcggcggaagtagcggtggtggtggtggaggaggaggaaaggtcanntcccncggnttccttccgtaccgttctcctcaccttccgcgtcttgaatccctcctcgcttaacgatgaggatcaaagtgccgatcctctcctttggttaccctaccaggatcctgaatactttatctcgggtggagccattactaaacttggcagctcattccagctcctgagttcccctggtcttggaatggataatctctattgggggtggggtcttttacccttaaagagcacttgcttcggctttgtatatgctagggggccatttagtcccttgaacaaaatgtgattttatacctttttttttcatggcctttgtgccagcgcttattggcattaactatttttttttttgttgccacaacaaaccttatatctttttgttc

SEQ ID NO: 129983 - DNA, 692 bp, Arabidopsis thaliana columbia
atagacgagctatgacgtcgcatgcacgcgtacgtaagcttggatcctctagagcggccgccctttttttttttttttttttaaaagtagaccaaaaaagatacatagaggtaacaaaaagagtctataaaaacccctacaatacaaatatacaaagtcatgtagaagagtaataactcttgtttattctctgccgtccacaatattataaccaagatgaaatcactccttcatctcaattctctttcattcttcatcacactgtttttcttttctaatctcataactcaccgaagaagattcacaaacgacatgagtgaatcaacatctctatgctctgaagggtacttaatagcccgtggagctcttttcggaaagagaagtatcgtcgggaagcttcctaactgaagctcttgcttagcaaactccttctgctcaccgtcagctcggaatttcgccactttaactccttttcccgcaagtttctcagccaattcgacgtacgatgcttccatcgcctggcagaaagggcaccaaggagcgtaaagtacgaccagccacgcctctttacggttctctagcttcaaaagattctcaacccctcctctgctcaatgcaaccacattgttgctttcaaatatctcttgcacagcagcaggctttgagtctgcagcaccatcttcctccttgag

SEQ ID NO: 129984 - DNA, 691 bp, Arabidopsis thaliana columbia
  unsure (1)..(691): unsure at all n locations
caccatatacgactttgattgcacgcgtacgtaagcttggatcctctaaagcggccgcccttncctttttttttttttttttttttttttttttttttaaaatnggaaataaattggattgaaaatcttgaaactcccggaggaagatgggacccctttggattctcaggaaaacacatacattatttttttttcgggttatatttaaaaactttggtgaacaaaaaaattaaataaattgtccactggggttgtaaaaaattgaaataaattaattgtttttgattcatgtgaccccttgattcatagggattttggtttgtttaactttaccacccccttttttgtaggttgaactggtctcccatttgtttttgaattttgcaaatttatttttcaatcatatttacatttttgataataaacaaattttttttcccttcaacttttaaaatatagtttagttgggaaattcactaagtaaattttttaagtaaaacttacattgggaaccgcccctctgagtagcttcacttggtttttcgtcacaggccttacctaaaaaaccaaccaaataaatttaaacgaatgattttaaaataaaaagtcaaaatttaaaattggaaaaatagacctagttaacatgtagatggataaaccttttggatttggatttttacactattagtcc

SEQ ID NO: 129985 - DNA, 674 bp, Arabidopsis thaliana columbia
tgcacgcgtacgtaagcttggatcctctagagcggccgcccttttttttttttttttttcgagaaagtatgaatgtagcgagagtgacataagacttggatgggacaaggagtcgggagaaaagttaaaagttttgaactttcgatcccaagtatcataatggttctaagtgtgagaactttcgtgcgtttcatgcaactcagtaatcgaatccaagaattgagcattccatttccaccttgatatgggacatgcatgatcacgcagctctctagatgtccacgatgattgtttataacctgagtaatcaatgtagcaactggattcgaaccatcaggcgtgttgttggaattgataatcttcttccgcatgtccaagacgagatgagacatttgactccacacatgttcccatcgcttcgacacaacactcgtccttatggcttcttctgtggaaagtctcgataatattatgagcaatacatcgtcagggagtttgctgatccaatcaacatttttgaccttaacagagtgatcatcagagacggtatttagatagggcttatcgtcaatggccaatgtaaaagttgggtaaggtaaaccaagattccaaacctgaagatgaacaagcatgtaaacatagaatgagataacatgtgtcagaaccttactcgg

SEQ ID NO: 129986 - DNA, 684 bp, Arabidopsis thaliana columbia
  unsure (1)..(684): unsure at all n locations
gacgtcgcatgcacgcgtacgtaagcttggatcctctagagcggccgcccttnntttttttttttttttttttagtcaagtagagcgattacatataatacgcacaaacaaacaagaagagaagaagaaagctccctgtacaagaaatacaaagctccacgagaagaagaaaccaaaacaaaagacttctttttctgggaaactgttaaaaacccatcatcacaatgaaaaccctcagattctctgtttcttccttcttcttcaacctattcgtcatcttcatcaagttgaacaatctgagcccgtctctgagcagctttccttctgatgaagaagccccatctcatggctgctttgatctttagccatcctacaacagccttgcccgagtttgaacggtcttcttcgtaatcagccattgacgtctgaccaaaagaatggaacccaaaactatcttctcccatgttcaatggagtttgctggtcaccaccattcatgctaaacagtctcaacagttgctgcatatcgtcgttctcgagcatttcgttacttctagccctaatctcttcctctgataaaaacccatcaactcctctgttgcatgtatttgaccaatcattgtaagagttaatctcaggaggaggatgaacaagttgttcttggttttgagatcctgttgctgga

SEQ ID NO: 129987 - DNA, 673 bp, Arabidopsis thaliana columbia
  unsure (1)..(673): unsure at all n locations
tgcacgcgtacgtaagcttggatcctctagagcggccgcccttnnctttttttttttttttttttttttttccaaaaaggttcaaaatcataacacaaaacaaaagaaataaacaggaagctcgagtgccaagtacctccgccacctccgatcaaaaacccaattccgagaattgagctccgacggagaataaacgaagcggtaacacaaacaaccaaccaaataccaaactactaaagtaaagaaactaaaatagtccttcatttcatcagcggaaagagttttgatgttcaaagttcacttggcacccttcttgactgcagccttggtaaccttggctccagttgggtccttcttgtcaacactcttgataacaccgactgcaacagtctgcctcatgtccctcacagcgaaacgtccaagtggtgggtactcagagaaggtctccacaaccatgggcttggttggagtcatcttcaccataccagcatcaccattcttcaagaatttaggctccttctcaatctccttaccagaacgcctgtcaatcttggtcaagatctcagagaacttgactgcaatgtgagaggtgtggcaatccaagactggggcgtaaccgttaccaatctgaccagggtggttcatgatgatgacctgtgaggtgaagttagca

SEQ ID NO: 129988 - DNA, 696 bp, Arabidopsis thaliana columbia
gacgttgaatgcacgcgtacgtaagcttggatcctctagagcggccgccctttttttttttttttggacaagtttcccttgaacatgtgaacaatagccgagccctcggagttaacgagatgcactgtctatttctcccaaaacgtgcgctttctgacacaaccaaagaccgaatcttggaaagccgactttgttagaccttaggtacatgcatggcacttgtatactgtggtaccaatcaatcaccatcattagcctccggtgcacaatacagctttccttaatatatctcttcacactctcaccgattccattcttttgactcggcggacctatcacctaagccctgcagtatccgcaagaacagcttcctcatttttaaacatggcgtggttagcattccataacctcaccattaggtatcctctaatgccgttcgactgaacatctgatactcttctctgcctcttggtccgaacttatgcctatccatcccctaaagataatctcgtttaaacagccactaagtaccgtcactcatatgctataccccacgatcttttgttatgctcacaacaccataggtcaaagcctacataaatccaccggtaccagtttggacaaacaaaggagccactgtcctcctttggagatggaaaaacgctcccaccatggaggagaacgattcttacatat

SEQ ID NO: 129989 - DNA, 636 bp, Arabidopsis thaliana columbia
  unsure (1)..(636): unsure at all n locations
ctctgacgtcgcatgcacgcgtacgtaagcttggatcctctagagcggccgcccttnnnttttttttttttttttttttttctacccaataatttttagaaaaaacccttctgtttttaatcagctaaagggggaattcccattacactacatacaaataattctccattcccaggttcctgtaaacccaacaaacaaaaccaaactctggtaagggaaacacaaactgggcttttttgtcccatccctaaccaatgaacccacacttttctccctttaaaggggaaacaaatttaccaaaacccttaccttcaatttttttgaaaaactcaatcttattaggaaaattaggtgaaattcgttcccctttccaaacagaaaccttatgtttgagacaaccttccataccttttaaataaacctttggaacctgatcaacatgaaaaaccttcaacggggcagttactctaaccctaaatcctatcttcgccttcgtttccggtacgattttttcctttattgacggccaggacaaaagatgggcgcctgcgtttataaaatctggggattttatctctacaaacaacacaatctgggttcaaaaagtttttctaagacttgagtgttctattggaa

SEQ ID NO: 129990 - DNA, 641 bp, Arabidopsis thaliana columbia
ctatgatgtacgctgcacgcgtacgtgagtctctgtatcatcgagcgccctcgccctttttttttttaattattttaaatagaaattaccaaactggatatgctgtacatagcaaacatcatatgatcctcacagccacatatatatagctcgtagagattatacctagagactgggctttgttgttctacatacctacccgtctttattcacaactaatactttatgccgtaatcagactctgttgaagaataacaaaccccagttactgtgacaagttgtgctgatatgtagcatctacttgcacccgcctatacaatcctatttatactttttcaagaattcactgatgaatcctcccttctacttcttcagtgattgcagttctcagatccaggactttcagtgaattgatcgattctatcctccctgagtacctgctagagaccaacacttttcattatttgaccgtatgcttgtgcatgacgaagatcatgacctggttatattgatgtcttattgcaaaccaacggagatggaggaattggagcttgtgcacaatatcgagatgaaacctttcgctcctggctggcaccatttgaagaatctgctgaacaatgctggcttggcttgaatatgta

SEQ ID NO: 129991 - DNA, 591 bp, Arabidopsis thaliana columbia
  unsure (1)..(591): unsure at all n locations
tttaaagagggccgcccttnnttttttttttttttttggttttattttggaaaaccgaaatgatatggtttctttgattagaacacgggcattaactgcacaaaagttaaacaagatttacacaaattttgtcttttgagaatgtccaacaacaatacagctttaaaacacgtctaacggcaatttgccgggtagataccggacctcgaagtttccaggcttttgtagtataccatttttgtaataactaaaattctttaccctttatttgagtttagttatttgagcattttactgcccatttggttttacttcacatcaccagaacaacccatttggaattcttataactaaacaacttaggcgcacgcctgtgaccataaggatctgataaccttttgggtctatatgggggggtggagatttttgtcatcccttgaacgtaacctgggtcatattcgaaatttgaaagtatccttggttcgaaaaccggttttggacaatacaatgttaagattgaacctgcataaagcaatggtgttgaccggatacctggacttacggggagaaatacattcactggggaggaaa

SEQ ID NO: 129992 - DNA, 558 bp, Arabidopsis thaliana columbia
  unsure (1)..(558): unsure at all n locations
gacgtcgcatgcacgcgtacgtaagcttggatcctctagagcggccgcccttnnttttttttttttttttctttataagaaggaacacccaaaactgttacggatcacatgatccacacctttggggtatttgtctccaggacttaaaaacccaaatcagtgtgcttacagaaaagccctgatttttaaaaagcccaattggtctaaagtcaagacgatgaccttctccggtgagtagtttgcgccaaattatctccgacggaagaaactgaaccaggactttcggatgtataatcacatctttcctttccatatgcatatttatctttacctgtgcaaaatctagagcaaagtcccagacatgacgactacttgtgctctgggattgtaagaactactcttggagtctatcctcacagatgccggctactccttagctgtgactgactgacactcttcctaagccgtccttcttgagctgccaggcaagccgctccgtcgaaaaaaatgaaacccggcgtctccatccttatcttagaagaggatttgtacaacgac

SEQ ID NO: 129993 - DNA, 692 bp, Arabidopsis thaliana columbia
gacgagctctgacgtcgcatgcacgcgtacgtaagcttggatcctctagagcggccgccctttttttttttttttggaaaaactgtaagaaatttaacagttcaacattagtctggactcggaatagaccttataactaacccttagtgaaccgttgggtgctgcgacaagcttaaaaggggaggacgaaacttcttgaaaaaacccgctgaagaatataaccatgtatcttatgactttggctctatatattgggtacaaattcaatgcgcgggagcgatgtgacattgggcattagccgatatccgcttaatcagtttccggcttcaggcttaatacccttacctgtggattataagaagactcccgcttgggcgattacagctccaactgcgttagcaggctagacggttgtcttgactaagacgacagacctcacaaggaccacaacacgtttcacacagggtacgacagaacgcgttaccggtgatgctctcgacgacatcatgatcgacaccttgtggcccagcgggaagcatggcgcagcgattacacactttgtatatatgtgttgcacatccccaccctccgattgaatgtatgaaggagtgaacacgatgccttacgacaagaaagccacaggtgccagtctatctagagacatgacgctatcatggataagaagtgatgtt

SEQ ID NO: 129994 - DNA, 664 bp, Arabidopsis thaliana columbia
  unsure (1)..(664): unsure at all n locations
gatgcacgcgtacgtaagcttggatcctctagagcggccgccctcnnccttttttttttttttcacttgtgaccgngtattttattgcacaagacttgaactcgttactcgtcacacgctgcagcacactcaatgacctcattgtcatcgttgcacacgttcacactgctactcatacacgatggtggtgacgctgctctgactctgaatctgactcggtccagccctcatccctgccccctgtccaactcgccacaaccaccgctggcctcacctcttcctcctccatcctctccttcctctcctccctctccctccacggatgacgtcgcatgccgtaataggactgtgtggagtaggactgagtggagcaggatgaaggcttagcatggaaatgctcgatttctgcacggagacgagcgagggcgtctagtgaggaggaggaggaggaggaggaggatgcacttcctgcctcctcaaactgcttcaacgagcctatattgctttactctagatcatagccctttactcacccgcgttttctatagccttgcccttaccttgggtacctccatcctttggagttcctctacgttcccgtgccatagttgtctcacctggggtcgtctacacccattttttatctgggtttaatctaacctag

SEQ ID NO: 129995 - DNA, 730 bp, Arabidopsis thaliana columbia
  unsure (1)..(730): unsure at all n locations
ccgttnnnnnnnnnnnnnnnnnnnnnnnnnnnnnnnnnnnnnnnnnnnnnnnnnnnnnnnnnnnnnnnnnnnctttntttttttttttttttttttacacaaaaagtaacgaccgaaaataaactaattgtaaatgataaaccgctttttgcggaataaataacttgatattttttcccctcagaaatctataagagagaatttgtccctggcaagggcttttaataggggacgaggacaaatcacaggacaatataaagaacccttttttttgagagccgttgccattgaccacagtaacccaaccagagcttttttttcagcccttgatcttcttgaaaccatgagcgaagtacaaaaatgttgggctagttgaaccctctttgatgctagcaaagacccaagtgctggacttatgcatacgcttcgcaacaaagaattggaagtttctgaccctggtgagcaaaaacttggtagcttcctaagtacccttcttgaagacagcttgagtttcttcgctttacttgggtgtggaacgctttatgaatttcttaaggaaagcgacgaatcccttgttgtcataagaagggtgctcctgaactctgaatgtggggacaatgtcttgaaccttttgagcagagttttcatgaccttaatctaaccactttctttatatatggattggtggcaatgttaacatctactgtttccacagttacccactttgcta

SEQ ID NO: 129996 - DNA, 756 bp, Arabidopsis thaliana columbia
  unsure (1)..(756): unsure at all n locations
nnnnnnnnnnnnnnnnnnnnnnnnnnnnnnnnnnnnnnnnnnnnnnnnnnnnnnnnnnnnnnnnnnnctttnttttttttttttttttttttttttttttaattcacctgccaagggaatcctaattctttttattaagccgagcattccaatttgccaaaatctttttcaacattttaccattctacacatccaatttctagattcataggggttccgtgagaaaacggggattcatttaaagatgatccgacggccccattcccattaccccgcttatcatttaaggtaatgacgaaaacttcatgatttttgcagccttttattttacggctaccaacattgggggtttgtaatagctcgcgggcttttttatctaccaagacaaagttgttcctcattcttgacactccaccccgacttgagagaccccccatgttaccttggggcttgctcccgtttcttttacaacggtttaatggaaatctaatattgggcctttggaatctccgccttaacctcctccggggctgttgttagaatccaacgatggactcctctgtgtgaatggtgccgattttttccaacaagtacccgtacacttggtgatcaatcgggggtgtggcctttcttcgggaggggtccccacagcccccattttgtttctttaacccacctattaaaaaaaccccgtgggcgcgggcacaattattatggggacgtcttgggggggaaacaaaaccccaaaacggcctt

SEQ ID NO: 129997 - DNA, 718 bp, Arabidopsis thaliana columbia
gcccccgcgccccccggtgagagttgcgttaccgtttacactagctatgacctatgacgcacgcgtcccgcgtgcgtggagtcctgtagagcggccgccctcgccctttttttttttttttttttttccaaagtttgtactgagaaaagaaaccttagtggttttattaagcaaagagaacagagctgcaaggatctttttcaccatcaaaacattctacaattcacgtttccccattcaaagggctttcaagagaaattgtgggagtttaaaaagatgaacacaacgacccgttttaatacagccccgttaacattccctgtaaagataaaaacagatagatttttgaggacatttataccaatgctaccagacattcaattttttagtcataggccctgtggtgttcactaccatgctaagaatgatcctcggcattggcctctgacactgccttggcaaataccgcattttccttgggaccttcctccacaaccttgggggaagctgaaatgcctttataacattcaacctggcgtttgtaagccttagcaccatatggggctttcttacaatgagagaaggacttccacttgtctcctgcagtttttccaacatgagctacaaactgggggttggggtctaccttcttgaaagacaggcggaaatcttgcgtgaacacgaagaaagcactggctggcctctttggtctgatggg

SEQ ID NO: 129998 - DNA, 722 bp, Arabidopsis thaliana columbia
  unsure (1)..(722): unsure at all n locations
acgttgatgcacgcgtacgtcagcttggatcctctagagcggccgccctccncccaatttttttttttttttttttccctttctcaactgagaaaagaaaactaatttgttttataaagcaaagaggccagagctgcaagtctctttttcaccatctaaacattctcccattcactttctccattcatagggctttcgtgagagattggggaaatataaaaagataaaaagaacgacccattttaatcagccccgttaccatttcaaggaaagataaaaacagaaagatttttgcggccatctattctaatgtctgcaacattgagcttcttagtcctgggtctcctcctcttcactaccatcctcagcattatcctcgtcattgacctctgacactgacttggcaaattcctcatcttcctttggaccttcctccagtttcttgtgggaagctttaatgtccttctcatattcaaccttgcgtttctcagccttagcaccatatggggctttctcagaatcagacaaggacttccacttggttcccgggggttttccaacagttgcttcccgaccttgtttttggggggttttccctttcttggaaaggtcttcaccggaaaaattttttcccttggcaccaccccacagaaaaagggcccctggggcctgggcgcccctcttttttggatttttggggcgggggggtacctctttccggc

SEQ ID NO: 129999 - DNA, 729 bp, Arabidopsis thaliana columbia
  unsure (1)..(729): unsure at all n locations
gaccatctacgacgtcgcatgcacgcgtacgtaagcttggatcctctagagcggccgccctttnttttttttttttttttttcttttacccaattgccactgaaaaagaaaaactaaattgtctactaaagcaaagagcccagacctgccagtctctttttcaccgtctaaacatttgacaattccctttttccattcacagggcttctgagagagagggggcaagtataaaatgattaaaggaaagaccctttttaattgaccccgaccacattctgtgtaaacataaaaacctagagatttgggcccccatctgtgctaatgaccccaacagtcagcttcttagtgatatggcctccgcccgttgattaccatcctgaacatcatgctcgagaatgaccttggacacggacctggaaaattgctgaaggtcctttggacctccctccaggtccttgttgaaaactttaatgttcatgacacattcaaccttgcggtgctgagccttagccacatgtgggggtttgttataaccggacaggggcttccactttggtccagcaggtttttccacagtaccctacagactggaccttgggggtttccttcttgaaagcctcacggaaatctttgctggccaccaagaagggccccggggtggcctcttgggtttggggggggcccttcacaaaggcttggccacttgctggggctttaacccggcttttt

SEQ ID NO: 130000 - DNA, 662 bp, Arabidopsis thaliana columbia
gtcgcatgcacgcgtacgtaagcttggatcctctagagcggccgcccttcacctttttttttctattttttttttccaagggctgactgacaaaggaacgcggaatcgatgtctctaggccacagaccagaccccgaagggtctttttcccccttgaaacggattacacccccctttcggcgttaaaagggacttagggcagacacggacgacacttaaaccgaacggactaaagccccgtttcaatcctccgggagcccattctccgactggagagaagcaaagagactggtgggcgcatgcatccttatgctcccagcatctgacttataagcgatcagccttcacccattgactggcatcctcaagacactgcttgttattgccctcgcacagtgcaatggtgcaaatcaacggttcctttggacctaggttgaattacttgtgggacgcgggcatgatcttggtaaaactaacctggcgtacgacagcctaaaccactatggggcttcttttggtggggaaacagaaccgcacttggttactgctgcttcaccaaacccagggaaagacctggtaatgggggaccgcttcttgaaagcgtcccagaaattcttcaatgagacaccaaaaaagaactggggcggacctcatggggaatg

SEQ ID NO: 130001 - DNA, 749 bp, Arabidopsis thaliana columbia
ctcgacgtcgcatgcacgcgtacgtaagcttggatcctctagagcggccgccctttcttttttttttttttttttatttgtgaaatcactactaaatgcaaaaaagtcttaccgaggtttttgataataattaattggcctttttttttgaaaaatatggcctgccattacaagtaacttgataacaaattgcataatatcgaattgactaagcttaatcataaaacttgtgtagactccttatttcttcttttctgctaaaggagcttgagcggatgctgactcctcctgaggtggcctcattgccgggaagaaaataacctccttgatgttcattgagtcggtcaaaagcatatagagtctgtctattcctaatccccagccacgtgtctgagccaacccattttctaaagcattacaaaatgtttgatccaaagcccatcgctttattggatacagactgtggatccttgagctgaacaccaaaacgctggcgcttgtaccacaggatcgtttatcttcgtgtaggcacttggaatttcatgtttgttgatgaacatttcgaatctctttgtcaatccactcttttgatgtgtgccctttttgcccaaggaccccatgaatcttcgccttgactacatagataaaaaatctgggtttcaccaccattttgggtgtttcccaggaaatttccttccacccaaaggtttttatcttaaccagacactgaaccttcttttttttttgag

SEQ ID NO: 130002 - DNA, 681 bp, Arabidopsis thaliana columbia
catagacgagctatgacgtcgcatgcacgcgtacgtaagcttggatcctctagagcggccgcccttttttttttttttttattttaaaaacataatcatattactgagaaaagaaaactaactcgttttctaaagcaaagagatcaggggtgtacatctggcttctaccatctaaacaatcaacaattaactttttacattcacagggctttctagagagattggggaaatactaaaagattaaaagaatgacccttcttaatcagcccggtttacttttcaagttaagacaaaaactgagcgatactagtcaccttccttactaaggctaccaaaaattgcatttttactcatcgtgctccttctttttacttccataccaagaataggcctagttattgacctatgaccctggcttgcaagacccccgattttcctatggaccccccttcagtgtttggatgcaacctgcaatggctgtcccagatccaaccttgcgtatcttagcccttgcaacagatagcgctttctcaaaagtagacaaggacttccaccagtctacgggagataccccaccagtaggtacagacatggcctagggggtttccttctagaaaggctcgcaggaatcttccatgaacactaaaaaaacaccggctggcctgtttggcttgaaggggt

SEQ ID NO: 130003 - DNA, 494 bp, Arabidopsis thaliana columbia
acactatctacgagctatgacgccgcctgcacgcgtacgtgagcttggatcctctagagcggccgccctttttttttttttttttgtttgcagcattggatcaatctctgtgcacaaaaattcaagtttttatacaacggatttggccaccaaactcgcttactgatttaccaaatagaaacaacacgcaagatattgcctcctaatggggcataaaaagaaaacacgcccgatgactcatggtcgacagcacgacccataagtgatgtcccgtgatgctaacaagcgaattagatgttcggaatgatgtgactttcttttgacgcaagcgaacctgcgatcattataaaaacatagtgactgctaagcaacgataagatggctcatcaatttcggggccgtgcatagcatcactgccagcgttcataaccacaacttattagaccctttttcataaaaccatgagctatcatttacgatttttttcacatctc

SEQ ID NO: 130004 - DNA, 604 bp, Arabidopsis thaliana columbia
acagcaacatctgactctcgtttatatagaagcaaacaagaaccctagctgcttgtttttttttaggcatacaaacattctacaatccaatttttccattcagagggcttctgtgaaagattgcggtgatataaaacgcacaaaccaacgaccctggttaattatccccgtatgcattttaggttaagataaaaacataaagaccttggtggcgattaatctaatgctcccggcattcacttttttgatcattgggcgcctccttttcattaccattctaactgagcctcttgcaaaaggcctctgaccctgagttgaaagatccctcgagttacttgggagcctcctccagctactaggtggaagctttgaaggtccactcatattcagaccacgcgcttctcaatcgtagcaacatatggagctttctcagaagcagacacggacttcgccttggttgctgcagaatctccaacggccaacacagacatggtttggggtatccttatgaaagatcacggaatttgccgtgaccctaaaaaagcctggccggccaatcggataggggggaccttggacggtttgccacggccgctctgaaccg

SEQ ID NO: 130005 - DNA, 752 bp, Arabidopsis thaliana columbia
  unsure (1)..(752): unsure at all n locations
cccccgcgcccccggttggatttgcattagcnnnnnnnnnnnnnnnnnnnnnnnnnnnnnnnnnnnnnnnnnnnnnnnnnnnnnnnnnnnnnnnncttttttttttttttttggtccatttttttattttttttgcgggaaaaagaaaactgggtcgtggtataaagcaaagggtacagagctgcaagtctctttttaaccatgtaaacattttacaattcactttctccattaaaagggctttcgtgagagatcgggggcatgtactaagataaaaagaaagaccctttttattgggccccgttcccctttggggttaagatgaaaacagacagatttttggagccctttatactaatgctaccaacattcagcttgattagagatagccctcctcctgttccctaccatcctcagcattattcgcgacatggacctctgacactgggttgtcagattcctcatggtcctttggaccttcctccagtaatggtgtcgtacgcaaggatgcccttgggatattcaaccttgggttacccagaccttagcaacatagggggctgtgttagaatgaggccaggcctttgccttgtcccctgcggttttgccagcagcggctacagacttgtttttggggctttccttcttgaaaggtcacggaaatcttcctgaacacaaaaaagcactggctggcctctttggtttgtggggggacttctcagcgggtttgccacaacctgtttctttagacc

SEQ ID NO: 130006 - DNA, 717 bp, Arabidopsis thaliana columbia
  unsure (1)..(717): unsure at all n locations
gttnnnnnnnnnnnnnnnnnnnnnnnnnnnnnnnnnnnnnnnnnnnnnnnnnnnnnnnnnnnnnnnnnnncttttttttttttttttttttttttttttttttgccaaagcggctaaaagctttgaatttagcggactcgagtaaattcaacattttggcgttgagagatatctccatttattcctaaacgcatgttctatatccctaaaaccggcttttgaacacgcaaggataactctttcaggcgcgtgactttttttccatgtaagcggccgcgtttggcattacacctccacttacaaagctttgcttctttgatctccgccgtaacaatgtttccgacgttctccgtcgtaccatgtacattaaccatttttactaccgtgttcaacattatcctcgttaacggcctatgacaatgaatccctctaagtttcttcaaactcgggtcatgcataaattcgatcgactcgaattttaaaggcgattcgacaaaaactattgcttcccacagcccgattcccgtcggagtttttcttatacgatgaccccggccttcatttgacgattgacggttaatccactcgaacgcgagacttggcttcggtggccgggtcatagatagagaagctgcagcccccatttagcccctggatagaacctgctggcacctcctgatctgttgtgcgctacgaacatgtttttcgaactcaccg

SEQ ID NO: 130007 - DNA, 752 bp, Arabidopsis thaliana columbia
  unsure (1)..(752): unsure at all n locations
tcccgtnnnnnnnnnnnnnnnnnnnnnnnnnnnnnnnnnnnnnnnnnnnnnnnnnnnnnnnnnnnnnnnnnnncttnnttttttttttttttttttttttttattttttcttactgaaaaaagaaaacttttttgtttaaaaaagccaggagccccgaactgtaagtttctctttaagcggataacctttcaacaatgcattttctccattcccagggctttcacgagagattggggtttttttaacagagaaaaggaaagaccccttttttttagaccagataccctttcgcgtaagggggacccccggggaattatggggggcagctctactaaggctcccaagattcatcttgttagggatcctcctcctgctctttgctaccatcctaagaaaaatgcttcgttattgacccccgaccctgacaggggagaatcctcattgccctttggggttactccaggttgttgttggcagcccccaagaactttttattttcaacgttgggactctgggccttaccaacaaatggggctctgtcacattcgggggagggcttttccttttttgctgggggtttttacaacaggggcctacccagggtgcgtctggggggttcttccttgagaaaaagggcttcaccggggaattttttcccattaaaaccaccaaaggaaaccccccctggggcttgtgcccttttattaggcctttggggtggggggcccactttgggggggggggggttttt

SEQ ID NO: 130008 - DNA, 720 bp, Arabidopsis thaliana columbia
  unsure (1)..(720): unsure at all n locations
nnnnnnnnnnnnnnnnnnnnnnnnnnnnnnnnnnnnnnnnnnnnnnnnnnnnnnnnnnnnctttntttttttttttttttttttaaaccgagaaatgaaactggaaaaccgaatttacatattcatcccccaaagaaaacttcagtttacaaaacgaccctttaaaaacaaatgcgttaagattccccctaaaatcatagcgaggaacctgctgactaaaccgggttacttctctaattgttcgaatttaggcttatgcctggctcgattaacccggttcttgcttacgatgctctggaactgatatttgtcccccggcgacggcgaacaacattacgatgattacgaatatgacaaatgctgtccaaaaaaaagccctgatttcagagaacaaaccggctcattaagcaccggggagaatctgacattttcctagggcgatctacgcattccatggtgcgtgatcattctaggtccaccggtgaagcttccgggactactcgagcttctttcaatgtggtgaaacacgataataccggaggggttgagtcttggactatccggcgttacggagagaccccgagattctattcacgcggactatgatgatgatccgtcaacggaaggcgtccacggaggatgataacgccttggttgggctaatctgattgttgggtggcttaggaatcgggattgacacctccaccgaccatagggagt

SEQ ID NO: 130009 - DNA, 690 bp, Arabidopsis thaliana columbia
agaagagctctgacgtcgcatgcacgcgtacgtaagcttggatcctctagagcggccgcccttttttttttttttttttaaccatattccgaatctatcactgagagaaggaaactaacccgtttggttaacatatataaagagagatgcaggcctatcatttaccctgaaaaagatggggaaccatagttgactcctttggagggctttcaagagagaaggtgtggagttaaaccggaacaaagaaggggcggtgttggtctctcccgccaaaatttctcgtctatagaaccggcggtgggttgttgcacacccatatgcttaagctaccaacactaaagacgatagttaatgtcctggtgctcttgactacccgcccaaaagtgaaggccgcaatggacctttcacggttgatagggagaatcctgatgatgatttggaccttgctcaggttgacggacagttagcagtgaatgttcccacacatatcaccaccctgcgaacatacctcttaatataatatgggacttatgcggatcaataccgggacctccagctggctcctggcagttttacaacagatcttactacaagggattggggaattcctgcttgaatagccgagggaaactcttcactgaacactaaaaaagcacgggctggcctatcagttgtgcaggggagctccag

SEQ ID NO: 130010 - DNA, 744 bp, Arabidopsis thaliana columbia
gaacagctccgacgtcgcatgcacgcgtacgtaagcttggatcctctagagcggccgccctttttttttttttttacactgaatgaaaatgttatggtaagtgttattacaacgacacagtttttgtgtctggtatagaaaataacactgttgttttgttctaagcttttaacttaagaagtacaaaaactaatgctttgttactattaagatactgcctaactcgtccaaaataagccatgatgttgagaatctgatagctgcaaaccaaacaaagtgtaataccggcgatcaaaaaccaccatcatggtttgtataatcactcacttttcttggatccatcggttccataagcgggattcgcagtttcagatgaagctaaactagagttgttagcaaaggtatctgatgatgcctctgtaattccagctgagtactttttgatcctcaatgaaatcagaacacttgacagtatcccaagtactgggaaaacataaccccagacctgacttttctgttttccagctactgaagccacagccataccagcgaggctaccgactgattgcgtttctgcaggatcatcgggaggcagccaataaccgtggggaacagaaaatcagcttacaaaccgggactttagttacctgcccaaaagcgttagtttttatgaaccataatggaaagggaaattggggccgaaataaaccctttggccttggaaaggaaaccaaaacttttttc

SEQ ID NO: 130011 - DNA, 718 bp, Arabidopsis thaliana columbia
agctacgacgtcgcatgcacgcgtacgtaagcttggatcctctagagcggccgcccttttttttttttttttttttttaatttaaccaacacttactgacaaaacaacaaatcctgtgttgcaaaacatgaaaccacataattgcagaatctatggccttccctaaaaaaccctaaaagcaaataatccccttttaaaaggctaaaacagaaagccgagccaccatcatcacgagacttgaaaatcccatttcaatagagaccgcaaccgtttcttgaccaatatatatcctatgaaccttatgagccttcaccacaggatgagctcaagcaatagcttctttggcaactcctttgaaatctaatcggccctcctgactatctggatatctatggaccccagagaaagggctgccacacctacacttgaaacccggaccgcccacttttttgttacagctaacgcatatggtatccgcatatttcggcggatccaacggagccttagccaaataaccccctttctttgatgaggaaaacgacccacatccgaggacgccttgagtgacaacatggctcttctgcgggtgagtggggggtttattagggaaaagagaattcgaaaacggcggcttatcacgaaaacggctcgggcttgccctgtcttggatgtctgtgtcccattcaaaagccgagggccatgcccgattggtaaccca

SEQ ID NO: 130012 - DNA, 974 bp, Arabidopsis thaliana columbia
agaccagctatgacgtcgcatgcacgcgtacgtaagcttggatcctctagagcggccgccctttctttttttttttttttttcttttttaaggtaatcacgtgaaagaagaaaaagctggcttattttacaggaaccaggaaaatgatcaaagattgtcttttacaacaaacacaagccctctacatatttaacatttatacgctttgggaagaggaaaatgagaacggttagcgaataacacagatcccccctctagaaacgagcctgttaccttcataccgaaagagggaggcaacaagcggatgcacgcttgtctcttttaatggaccaaaaattgacctcgtttaaaaatgttactctccccgcttcactacgattgctatatgatgagggcccggctttatgtaactcttaaaaacatgcgttttgagaaaagaaaggctcagatagtcctgttcgctctctatgcaccctcttgatagtccccggaaggttataaccatgggagcggcggaaacgccctatactaaaaaggttagtacactttgcctctaggaatagtattttcaacacaccctggtgggtcggaattgaacatttacacctccctctttatactgcacctccataatttgcggggaccacatatgtcccttcagtgctagggggaggaaaccaataggcggactctattacccaccatttgggtgcaaaactgttagccgtggacgttaaatctccaccccataagggggtaatcttatccgacgaaacctccgaatattgtttggcgcggggaaatatacgatatttgttttcgaaagactttgtgaaacggggaaaaattgtttcttcggggacccccaaacgaaaatgggaccacctccgggacccctttgtgggggcgaggccgggggaaaccttgggatcgggaacttggccagcagagagcatctttttcctcaggggagg

SEQ ID NO: 130013 - DNA, 681 bp, Arabidopsis thaliana columbia
ctactgacgtcgcatgcacgcgtacgtaagcttggatcctctagagcggccgcccttttttttttttttttttttttttttttttttttttaaacagaaaaatcatagctatatccgatcctttggcaaacggttcaaacccgaaattaggtttttctgcatcttaccattatcccatgaacttgaaccattcgcacccctttcacgaaggatctgagacttatacacaacattcaacatatggggcccttggataattggtcgcctgtaagtggtctatttgctttcaacacacacacccaccagacgatgtctccgcttccctttgtattgctggatgcgtaccactctatgataactcgtttaacaccacgattgatccatatttatacttacccgtcccatacgaggatgccccccacacacgcaccctttgacccttgatcttgcatagatgatctgcacctcaccttcgtatccttaccaccagttactacgctgtatggttctagggaagacccacgtaggcacactcttgcgttttttaacatctttgtcgccactttcggagcctgatttataaaccctagatcgtaggatgttcccagtgagccacccttggcgctttttggtccaataaagttcacacaccttttcgagtggcctctagtgaggggggtt

SEQ ID NO: 130014 - DNA, 756 bp, Arabidopsis thaliana columbia
  unsure (1)..(756): unsure at all n locations
nnnnnnnnnnnnnnnnnnnnnnnnnnnnnnnnnnnnnnnnnnnnnnnnnnnnnnnnnnnnnnctttttttttttttttttttttctttttttactttcacaaccgagaacataaatattaactttatgttaaagctcagagtacatagatgttggtctatttttcaccatgtaaagactcaacaattccctttctaccttcaaagggctcttccgagagactgtggaaatttaaactgattaaaaaaaagaacctcttttaatggtggcccctaactttggacggcaatataacaacaaaaagacttttgcaattgtctattctaacggtcccaacattcagctccttagtccacctactacccctattaaccttcactccacaagttatgcccggtatctgacctctagaacactgactttgggaaatctccgcatcattccttttggcccctttccttccgggttcacttgattgcaagccgactaattgttacaaaatcgaaattttcacccttttgacggggttttttgagcgcatctatttacgccatataggggggctttttgcctccccgactttctcgcatccagagggaacactttccgccacctgtggcgcacttccttggcgaaggaccttttcttcctccaacccaagaggaagctcttctcaacacaaattacttagattttgtctgtggcggggggacatctctcgccctcttctataattaaataaagagcgcgttcaaca

SEQ ID NO: 130015 - DNA, 730 bp, Arabidopsis thaliana columbia
ctacgacgtcgcatgcacgcgtacgtaagcttggatcctctagagcggccgcccttttttttttttttttacttttttttttcacataactacgaaacggcaaattgagtaacgttcttgatggcccaatgcaaggcaaaccggacataatatatgtcccctaaaaatgaggagtgtctcactaatcccacaaaccaaattgtgaatgaagctttataaattttagctaatcacacaatcgtaacccctgatgcgttcttccttcctgggaaatgattgtagaaagaactaagtcccttagacctggtctttttcagagacctataaccggggatatctctgacccttgttttcctgtaacccccattcctatgtatgagacccggtgtttgaaccaaacccaaagttggaaaacctgacatactcttcactcctgggtggggggtaactgaagccacatgatgatttcttgcaaacaaccccctcttgaagatagtgcttgcttcacaattcgaagaaacgctctttctttgatcctaggaccaaaccgagtggtgaaactttctgccctaacctttccaaaaggtgtttttacgtccacatccctttttgtttggctgtggcccccaagacaagatttttcattactctctccgaaacaccgttattcaattgcgttgtttcgaggactttctttctcttatttcgagagaccccccgggggcccccc

SEQ ID NO: 130016 - DNA, 722 bp, Arabidopsis thaliana columbia
  unsure (1)..(722): unsure at all n locations
cnnnnnnnnnnnnnnnnnnnnnnnnnnnnnnnnnnnnnnnnnnnnnnnnnnnnnnnnnnnnnnnnnnnnnnctttttttttttttttttttttgctgacatttactgtttactgagaaaggaaaaccctatcgttttcttaaccaaaaacggcagatctggttccttttttttggccatcaacacatttgacaatttacttgttccattctcagggctttcgtgagagatcgtggaactcttacaagataaaacgaaggaccctttgttacttgctcccgttttcgtttctcgttgggcctgacaccgagcgatttttgcagccctctttcctatagctaccgccattcccgttcttaggcatggtgctccgtctcttgcctaccatcctaagaatggtcctcaggattgacctgggacactgacttgctagatccctgatggtcctgtgggccctcctccattttgttggagggggctttaaggaggcttttatgttcaccctcgggtttttcagccctagcagcatatggaggtttttcaaatcggacacggcctgccactagcctcctgctatttttccaccagttaacactgggcttggtcttgggggtttcccttttttgaagaggccacacagggaattctttccctttggaaacacccaaaagaaagcgctttcgggggtgggcccctctcttttgagattaggtagggggggcc

SEQ ID NO: 130017 - DNA, 1097 bp, Arabidopsis thaliana columbia
agaagaatgcacgcgtaacgtaagcttggatcctctagagcggacgccctttgataatttataatgttttgttttataaagaaaacaaccaagaggaaaaaataggttaggggtatttgaaggaaaaatgacaggaaagaacgtgaaaaaaaaatattattgaaatcaaataaaaagaggaaaagaaccgaattgaatacataacaaaagaaggaataaattaagaggaatagattgctaggtgagagtatttagggaattaaattgctatagcagaagacatgaatacccacagagattaagatgtcgaatgtctaatagctcatataactgtagcgatataaaatggtacatatggtagaagaaaaaaatgataagaatagagggaagtgtacatgagaagaggatacacaaagagagtcctatgagtgtagaaaacgtgagagacacaccgtaaatatcacaatcagggggggggcacacatattattcccaatgggaaagtagcaataaagataactataaacgagtggattaaaagccctatgcgtctaagataggaaaatagttgaatatggtagggatcacttggaattttgatatatgtgaaggacagctatgaaaacaagacaagataaggattatataagaaaaacaagataagtgatacaaatgaaccttatggggtcttaagagaaacgcaggatagtttaaacaggaaaggtttaaactgtgatcgaggtgcaaaaacgatgcaaagaacagggtaatttaagcgaaatatcgaatataagaaagcatgggatgtgggagaatttgagggaatttgtaacaacattaaatggggaagacattatgctatagtttgttgaaacgaagggacaaacagagggaggaaacttgtaagcttaatttaaaaatttattaacaaaaatcgaatttggaaggaaaaagaaaaaagaaaagattgaaaaatataaatatgggagaagctacttagaaaagaaacttactggagcatctgtggtcaaagagtagggaaatatagtaaataggaaaatatagaggaaaagcggaagatagtaaaaagagaaaga

SEQ ID NO: 130018 - DNA, 734 bp, Arabidopsis thaliana columbia
  unsure (1)..(734): unsure at all n locations
ccgttnnnnnnnnnnnnnnnnnnnnnnnnnnnnnnnnnnnnnnnnnnnnnnnnnnnnnnnnnnnnnnnnnnnncttttttttttttttttttttttttttttttttttttttactgagaaaagaaaactaaatcgttttataaagcaaagagtacagagctgcaagtctttttttcaccatctaaacattctacaattcactttttccattcagagggctttcgggagagattggggaaatttaaaaagataaaaagaaagaccctttttaatcagccccgttaacatttcaagtaaagataaaaacagagagatttttgccgccttctatactaatgctaccaacattcagcttcttagtcatcggcctcctcctcttcactaccatcctcagcatcatcctcgtcattgacctctgacactgacttgtcagattcctcatcttcctttggaccttcctccagtttcttgggggaagctttaatggtcttctcatattcaaccttgcgtttctcagccttagcaacatatggagctttctcagaatcaaacaaggacttccacttgtctcctgcagcttttccaacagtagctacagacttgttcttggggttttccttcttgaaaggctcacggaaatctttcatgaacaccaagaaagccctggctggcctctttggtttggtggggtccttcgcaggggctttgccacgtcctgctcctttagccgggtt

SEQ ID NO: 130019 - DNA, 737 bp, Arabidopsis thaliana columbia
  unsure (1)..(737): unsure at all n locations
ccgttnnnnnnnnnnnnnnnnnnnnnnnnnnnnnnnnnnnnnnnnnnnnnnnnnnnnnnnnnnnnnnnnnnnctgaggcagaatccatacattatgagtgacgtcaagaagacacagatggaacctcggcatctcaggacataggcaggattgaacaaggatccttgtgcttgcctctctgcttcacggtcataaatggaacttgcgatcagccccgaaaagactaaggatcccgctgggttggccagcgtcaggaaattgactcaagctccaaacttctttagaccaaagagctcagaggcaagaggctgggacgatggcccactgagcaccataggcaaccccaatcaatagtgtgccgatgtgcatagctccagtccattcgcatgcaaagaagatgtgtcctactgacattacaagctgagccactgatatagcaaccggtcttgggtacccatattccctgacgatgagtacggagaaataaccgcctccaatgcgaccaaggaagttccaaatgctaatcatggacacaaatacgtgagtgttatacgaacccatagactgacttatctgcccaatgctatctatgaccgctagacccgaaccagagcctaccttgagggagaagaagatgagcccctatcttggctttaacgagaagcttgtggttagaagcaaatatgctcggcttgtggggaggggccccatccggtttttttgaccccgaatcagca

SEQ ID NO: 130020 - DNA, 878 bp, Arabidopsis thaliana columbia
  unsure (1)..(878): unsure at all n locations
agcaccagctaccgacgtatgcatgtcagcgcgtcacgtcaagccttgggagtcctgctagcagccggaccgaccgcttccctctcttatatttttatttcttttctcttttctacggcgatgcacacagctgctcgcttctcctagaatgcgcaaagcacaatcagcgacattctcactcgcatactcagcatcgcgaacccttcgtagcacttctttctctctaccctcctctacacatacacaccatgtaccaccttccactccnatacaaaccaggggccacctaggagaacggacaaatcttcctacatcctttcacacaaggcgtggcacncagtttacagagctttccatactaaacccttagttactcagcgcactacaacctgtccgtctccgcagagcgagagatcaacacacgacacccaagacatgatcattttgtgaccntctcccattctgtattcctccaaaggccgcagccgcgaantatagtgcaaccgccctcttttgattcattcgagcctcccccgtgtccacacttccaactttcccaccntncttatagcacaaggaaccccccccggtggacaatctccctcccccttaacagcctcttaactataagccggcaagagcacggctcgcacttacatcgtggcagcagacagtcacctcccaggagtcttcgctggaaagcagaaccaataaacacggtctcccttccaaaaataaacccaccctgccccccctcttgattggacacacacccctagatggcctagggccccccttggtgggcggaccccaaacaaaaccacccccctctgcaaatactcccgttggggaaacaaattctccacccccacccgacc

SEQ ID NO: 130021 - DNA, 700 bp, Arabidopsis thaliana columbia
cctatagaccagctatgacgtcgcatgcacgcgtacgtaagcttggatcctctagagcggccgccctttttttttttttttgactaaaaataaagctttcatgaacaggaaagagaataccatagcgcaaaattaacctaaacgaacctaggtgtttgactgtcttgaaccatgaaaccaatgaacagttcctttctttctttcttaggcctgagaagaaagatcgtgtcagaaatctatgccaacaaaagggacccattttaaaactccccgtttactttaaagaaaatgataaccacagaaagagagaagcttcttgtatccaccatgcttccatcttcttaaacatatagtaactgttgttcttctcaaaagtaccagcccttgaacaactctttaactggaccaagcgcaccaaacagaaccaccgcgaacggtgctttggaccaacccgccgggattagacgctaacacaaagacataatccctatcgctctctgcgtttttaaagcacaatcaaccgttgctttatacggaagagcaactacggccaccaccttgatattgatcacttttcgccctagtcacatccagccgggattactggggacgctcttaacgaacgccgccgggaaacttgccgtcacatgagtaccaagcccgtctgtgcccaccgttttccggggtcgtttctttaaca

SEQ ID NO: 130022 - DNA, 725 bp, Arabidopsis thaliana columbia
atagaccagctatgacgtcgcatgcacgcgtacgtaagcttggatcctctagagcggccgccctttttttttttttttttttttttttttttttttttttaggagccaaaagattgcttaacattgaaactgacccaagaaattgcaaatcctccattttatagggccctataaaaaaagaggaacttaattaacccattcaaaagaattttttattaaattgtggaaatccaaacaaaccacaaacaaaacaagcttgcctcttaacctcatcctttgggcagcctcctttgaaacaactatttcctttgcctcggtttttgtctgggacccaaaatccattttgcctgctccccatttcttcctgttctctaccaacctgagattgaagctggccattgacccttccacgagtttgctgaactctaaattgtcctttggcttgaccgcgggcaaacccaagcaagaagcaatgttctggtgaacaaccgccccaagacgaaaattcctcttaacaatgggggccgggacttacatcttcctggactgagcatgtgtcccgacaaccatttcaattgggtctacccgacccgcttggggggacccgcggattttaaggccggacccgtgagggtcaccaactttaccaaaagggaggctgtcacatctgggctgaaggagggctatacaggggtcttggagaaactggtattttttcccaattc

SEQ ID NO: 130023 - DNA, 749 bp, Arabidopsis thaliana columbia
  unsure (1)..(749): unsure at all n locations
ccccgcgcccccgcttggagtgcaatttcgttnnnnnnnnnnnnnnnnnnnnnnnnnnnnnnnnnnnnnnnnnnnnnnnnnnnnnnnnnnnnnnnnnnncttttttttttttttttttttttttttttttttttttttccggggaaaagccaactctcacgtttcattgaccacagagttcagggcttcacaaattttttttaccacctaaacactcaacaattcacttgtccctattaaagggcacttaaagaaatattgaggaaataccaaagaaatctgctgaaagacccattttaataacccccagcaccgtctcaagaaaccataaaaacaaagaggtttttgcgggaataaatacccaggctgccaactttcaaatacttaaccatccacccactccttttgactaccatccggagcataatactcgtgatagaccccagcccctgacttgacagatccctgagcttcctttggaccttccaacattgccttggccgccgcaaaaaagaggctctcatataaaaccccgcgttcctcacccaaagcaacctaaggcgcttgaatggaattaaccctggacttgcacttgtttccttctcctttttcgcctgtactaccgacttgaactcggagttctcctccttgaaagaacacgaaaatatttcatgaaccccaagaaagcactggatgccctcttagggctgtgggggaacctttcagaagcttaaacaatgccccgttcc

SEQ ID NO: 130024 - DNA, 741 bp, Arabidopsis thaliana columbia
  unsure (1)..(741): unsure at all n locations
tccccccggcccccggttgggatgcattttcgttnnnnnnnnnnnnnnnnnnnnnnnnnnnnnnnnnnnnnnnnnnnnnnnnnnnnnnnnnnnnnnnnnnnctttttttttttttttacttattcactcaaaaacacagtagcgataaaagaaaaaccatactacaaacagatgaccataaacccatgatgatgtatttggtttgacacttcaaaacattagacaacacactctttgcattgaatggcggatgattaaaaaccggggttgagaaatgggcggaaaaaccctgccggtgcttcttctctgcgaaatgatcaactgtgaactcaaaagcacttactgtgaacaatccatggacctgactgcgtctactctgcctttgctaaccacatgtgctggaaggtactgataggaggccaagatggaccctccaattcaaactgagtatttgctttgtggagagggcaacaacttttttgtacctgctgctcggagccagaggagagacctattggcttattcagacggcgatttcggggaacattgcggttccaccactgagcacattgttaccgtacaagtggttcttgatgttgacatcagactttattatggcagtatctgcggacttgtggatgcggttattcttcatgccaatcttacggggatgttccagaacctcaagaaaacggatgggttgtgattcagtggtgaaggggtgcccatcagggagtttgg

SEQ ID NO: 130025 - DNA, 704 bp, Arabidopsis thaliana columbia
  unsure (1)..(704): unsure at all n locations
nnnnnnnnnnnnnnnnnnnnnnnnnnnnnnnnnnnnnnnnnnnnnnnnnnnnnnnnnnnnnnnnnnnctttnttttttttttttttttacacaaatttttttttcaactggaaaaagaaaactcaatcgttttctaaagcaaaaagtaccgagctgcaagtctcttttttgccatctaaacattctacaattcactttctccattcaaagggctttcgtgagagattgtggaaatatccaaagataaaaagaaggaccccttttaatccgccccgtttacttttttagtaaagagaaaaacccagagatttttggagccatttatactaatgctaccaacattgagattgttaggcatcgagcccctcctttttactaccatcctcagcattatgctaggaattggcctctgacactgacctggcagatgcctcatcttcctttggaccttcctccaagttcttggtggaagctttaaaggtcttctcatattcaaccttggcgttctcagccttagcaacatattggagctttttcaaaatgagacaaggactgtcacctggctccggcgggttttccaacagaaactaccgaacttggtcttgggggtttcccttcttgaaagtcttcgacggaaatctttctcctgaacccccaaaaaaaagcacctcgggcttggccctttttttgggtttgggttgggg

SEQ ID NO: 130026 - DNA, 248 bp, Arabidopsis thaliana columbia
gaccagctatgacgtcgcatgcacgcgtacgtaagcttggatcctctagagcggccgccctttattttttttctttttattccttttcttatgtaaacagcttacttgaaaacaaagaaaaacctaaattgcgttttctctagtatgcagaacaacgatagatagggcatgcactccgtgtaaaccttttttcttcgctattctcaacactcttttactccttacaaatatgagaatatatcttactc

SEQ ID NO: 130027 - DNA, 725 bp, Arabidopsis thaliana columbia
  unsure (1)..(725): unsure at all n locations
ctnnnnnnnnnnnnnnnnnnnnnnnnnnnnnnnnnnnnnnnnnnnnnnnnnnnnnnnnnnnnncttttttttttttttttttttttttttttttttttttaaacagaaaaaagaaagctaaatcggttccttaggcaaagagttcaaacctgcaagtctgtttttctccatttaaacattatcccattaactttatccattcacagggctttggcgagagattggggacttataaaaagatcaaacgatggggccttgttaattagccccgataaggttttaagctaagataaaaacagagagatttttgctgccttttatgctaatgctaccaacattaagctcgttagccaccgatcgcctccttttaactaccctcctaagctggatcctacgaattgacctttgacactgacttgcaagatgactgatcctcctttggaccttaccccatttactagctgtaaggtttagggaacacccaataggcaacctggcgttttttgaacttagtgacatatggagcttttttagaaccagacaaggacttccacgtggctccttgccgttttgcccaacagctcgccaccagactatggcttttggggggtttgagcattcgtttgaaatgaaccaccccgggaaatatttttttccttgtaggcaacctttaagaaaagagcgcccccttggggcttgggtcctctttgtatttggggataaat

SEQ ID NO: 130028 - DNA, 687 bp, Arabidopsis thaliana columbia
ctatgacgtcgcatgcacgcgtacgtaagcttggatcctctagagcggccgcccttttttttttttttttacttgtttttaacacaaatctacctgagaaaaaaaaagtaaatggttttttaaagcgaataggacaaagcctggagagtttctttcaccatcaaaacattgtacagacccatttatccatccaaagggcttttgggaaagactgtgggcattttaaatgataaatagaacgaccccttttaagcggccctgctaacattgcaaggcaagataaaagcaaaaagattctggcagccatctttgctaaggctcccaacattggggttattagtgatggtcgtactcctcttaactaccatccaaagcatgagacccgctattgaccactgaacctgacttgtaagatctgccatactttttaggaccttcctccgggttctggtggtcagctgaaaagtacctctcataatcaaccttgcggtgcttgggcttggcaccatatggaggctttcttataatctaacaaggacttccgcttggatcctgtagcttacccaacagtatcttcaaacttgtttttggggttagacctattgaaagtttcaaggatatcttccgtgaacactaaagaaaggcccggcgggcctctttggcagggttgggggactttagaaaaag

SEQ ID NO: 130029 - DNA, 769 bp, Arabidopsis thaliana columbia
  unsure (1)..(769): unsure at all n locations
nnnnnnnnnnnnnnnnnnnnnnnnnnnnnnnnnnnnnnnnnnnnnnnnnnnnnnnnnnnnnnnnnnnctttttttttttttttctttcttttttcttattcattttacggagaaaagaaaactaactcgttttctaaagcaaagagttcagaggtgcacgtctttctttcaccatctaaacattctacaattcactttttccattcacagggctttcgtgagagattggggaaatattaaaagattaaaagaaagaccctttttaatcagccccgtttacttttcaagttaagataaaaactgagagatttttgcagccttctatactaaggctaccaacattcggctttttagtcatcgtgctccttctttttacttccatcctaagaataagcctcgttattgacctctgaccctggcttgccagattcctgattttcctttggaccttcctccagttttttgatgcaagctttaatggtcttcccatatccaaccttgggtttctcagccttagcgacatatggagctttttcaaaagcagacaaggacttccacttgtctcctgcaggtattccaacaggaggctacagacttgggcttgggggggttccctttctttgaaaaggcctcacggggaagatctttcccatgggagcccccgaagaaaaagccccttgggcttgggccccttttttgggagtctggagggggggggcccttttaacaaaccgggtcttttggtcacccgaaacctgggtttcctttt

SEQ ID NO: 130030 - DNA, 767 bp, Arabidopsis thaliana columbia
  unsure (1)..(767): unsure at all n locations
cnnnnnnnnnnnnnnnnnnnnnnnnnnnnnnnnnnnnnnnnnnnnnnnnnnnnnnnnnnnnnnnnnnnnnnctttttttttttttttttttttttttttaataataacatactgaactatgaagacttttttgttttttaaagccaggtgatccccgctgaacgtttctctttaacccactaacctttattctagggatgacctccatttaaagggctttcacgagagtttgcggactcacatatatagagatatgaaagtctccttataatcttaactcgctagaccttcacgtcttaaggaactccccgggctttccggtgagatctatactacggccccctttatccatatagacacccatggtgctaatgaactttgaccccagacttattatcttgcgcgagatataacccctacactgggtggtgagaagtctaatattcttttggaggttaagccctcttcttttagccagcttcgaggaagttctcatgtccaacgttgcgaaactcccccgtaccatcttttggggctttctcagattcaggggatggctttcccttgtgtgcttgagggtgttctacgagagcaacctagggtggctgggggctttttctgtgagagagcaaacggggaattgtttcattgaaggcccaaagaaccgcatctgcgattggggcttgattcggccttggggaggaggttgacttttaaaaccctttgttttttgggcaaggggcccctgtggtacccttataaaaccg

SEQ ID NO: 130031 - DNA, 749 bp, Arabidopsis thaliana columbia
ctatgacgtcgcatgcacgcgtacgtaagcttggatcctctagagcggccgcccttttttttttttttttttttttttcttatttggttcttactgaaaaaagaaaacttaattgttttataaagcaaagaggacagagctgcaagtttttctttcaccatctaaacattttacaattcactttctccattcaaagggctttcgcgagagattgtggacttttaaaaagataaaaagaaagaccctttttaatcacccccgttaacatttcaagtaaagataaaatcagagagatttttgccgccatctatactaatgctaccaacattcagtttcttagtcatagtcctgcttctcttcactaccatccttagcatcttcctcgtcattgacctctgacactgacttgtaagattcctcatcttcctttggaccttcctccaggttcttgttggaagctttaatgttcttctaatattcaaccttgggtttcttagccttaacaacatatggggctttctcataatgagacaaggactttcacttgtctcctgcagcttttcccacagttgctaccgacttggttcttgggggttttcccttttttgaaaagttttcacggggatatctttcctattgaaccccgcaagaaaaggcccttggcctgggcctccttttggggttttgtttgggggggctcctttccacacgccgggtttttttgccccacgctcccctgggctaccttt

SEQ ID NO: 130032 - DNA, 214 bp, Arabidopsis thaliana columbia
tctgccacatgggagccggcgactagcgtattttgacatggtctttactctgagtcggtagctacagaataccaatgaacggcgtcctaaacgtagtctttctacttccttctcatttggctgtgcacagtttttgactactctttccggtttcaccttactgatcacgtggatcaggcgtcatgctgggagttactgcaggatttaccatctg

SEQ ID NO: 130033 - DNA, 740 bp, Arabidopsis thaliana columbia
gaccatagacgagctatgacgtcgcatgcacgcgtacgtaagcttggatcctctagagcggccgccctttttttttttttttttttaagaacgaattacgtgaaataaaattagaagatttctcacatgaaaccacattctgatgcacaagggagaagaagaagaagctaataacatcaacaaaacaatgttcataatgggtatcttttttcttttcttggttatagaggaagataaaaagccttcttcgcctataatacacactatattccgggggtgggcactaagttgaattttaaacagagcaacctgaacacaatgcataggaccagaatcttgagttagccaactgtgacttttcacttgtgggtgcctgcagctgctgattgagatgagtctgtgtccactgatcacaggaaatagtctggagtccttcgggtgacgtctggttctcctctcctcggtgctggttcaaactggatgaaggtgtggttcctgcagtcgtcgacctcaagaatcgaggccatgttcccacaacggtaacaatagtttggtgcactgaaaatagtaaccactttttgctcgtgagcccagttgggtgcatccattaccaactggtgagctggggcgatccattttttaaaaagaaagggcgggcggggcccgttttgattttatcggggaccctatggaaatagggccgttgcccccgggggaggatattttttcccctggcctta

SEQ ID NO: 130034 - DNA, 664 bp, Arabidopsis thaliana columbia
cttagaacagctatgacgtcgcatgcacgcgtacgtaagcttggatcctctagagcggccgcccttttttttttttttttttttttttttttaagttactctactgaaaaaagaaaactctgtctttttttaaagcgaccagtacaaagctgcaagattgtcttttaccatctaaccattgccctattcactttctccatttatagggttttcgagagagattggggaactgttaaagagacaacacgatcccccctttttaaacgaccccgtttacttcatacggaaagaggaaggcaaaatgcttttcgcgcccgtctattctaatggtcccaacattggccttattaaagatcgtacttcccctcttcaataccatcgcaaggatgagcctcgtcatatgacctctgacacatgacttgagaaattgctcagcttcctttggaccttccgccgggttactggggcgagctaaaaggtgcttgtcatagtcaccctggcgtttatccccccttgccccatatggagctttctctaaggagacaaggacttccacttggatccgggggtttacaacagaactcacacttgtgtggggtttcttttaaagttgcgggattcctgacaaaaaagcagcgcccttgttggggactgacggttgccg

SEQ ID NO: 130035 - DNA, 788 bp, Arabidopsis thaliana columbia
agaccagctatgacgtcgcatgcacgcgtacgtaagcttggatcctctagagcggccgcccttttttttttttttttttttttttttttttttttttttactgaaaaaagaaaactaaatcgttttataaagcaaagagtacagagctgcaagtttttctttcaccatctaaacattctacaattcactttctccattcaaagggctttcgtgagagattggggaaatttaaaaagataaaaagaaagaccctttttaatcagccccgttaacatttcaggtaaagataaaaacagagagatttttgcagccatctatactaatgctaccaacattcagcttcttagtcatcgtcctcctccttttcactaccatccttagcatcatcctcggcattgacctctgacactgacttggcagattcctcatcttcctttggaccttcctccaggttcttgttggaagctttaatgttcttctcatattcaaccttgcgtttctcacccttagcaacatatggggctttctcaaaatcagacaaggacttccgcttgggtccttgcaggttttcccacaggaagcttccagactttgtttcttgggggggttttcctttttttgaaaagttttccacgggggaaattttttccctttggaaccccccgaagagaaaagccacctgggccttgtgccccttctttttggggtttttgggtgggggggtccccttttcctgcaaagacgggcttcttttgtgcccaccaggagcccctgggtcttcccttttt

SEQ ID NO: 130036 - DNA, 399 bp, Arabidopsis thaliana columbia
accaatcctgaagcatacatctcttggtcatatgaccctcctgacacctgagcttgtccaagattcctccatctttctctcttggaaccctttcctcccaagtttcctgtggctggaaagcttttaatggggtcttctccataatacaacactctgcgtgttctccatgcctttagacaaccatattgggggccttttttcagaaatacaaaccaagggacctttccactttggtctccctgcgagctttttccaacatgtagcttacagactttgttacttgggggttcttccttctttgaaaaggcttcaccggaaattctttccttgtaacccccaaagaaaagccccctggctgggccttcttttggatttgggtgagggggccctttcccagag

SEQ ID NO: 130037 - DNA, 730 bp, Arabidopsis thaliana columbia
agaccagctatgacgtcgcatgcacgcgtacgtaagcttggatcctctagagcggccgcccttttttttttttttttttttttttttttaagttaatcaactgaaaaaagaaaactcagtcgttttataaagcgacgagtacagagctgcaagtctgtctttcaccatctaaacattgtccaattcactttctccattcatagggctttcgtgagagattggggaaatgtaaaaggataaaaagaacgcccctttttaatcaaccccgttaacattttacgggaagatgaaggcaaaaagattttcgcggccgtctattctaatggtaccaacattgagcttcttagagatcgtccttctcctcttcactaccatccttaggatcatcctcgtcatatgacctctgacactgacttgagagattcctcatcttcctttggaccttcctccagtttcttgttgcgagctactatgtgacttgtatattcaaccttgcgtttctcagcctttgcaacatatggagctttctcagaagcagacaaggacttccacttgtctgcggcaggttttccaacagaagctacagacttgttcttggggttttccttcttgaaagttttacggagaattttccatgaacaccaaaaaaaaggcccgcgctggcccctttggggcttggccgggggaaactctcctaaggggtgttttggcaacgtccatggaccccttt

SEQ ID NO: 130038 - DNA, 459 bp, Arabidopsis thaliana columbia
tctaccaaatgatcagccacgatgacaaggggctatgatttttaaaataaaatcggagggtaacaatagggtcgatgcatgtacatgtaagcattaatagagaaaggttacaaggaaaagaacatatcagatcacaagacaaacctaagggacgggaaaaaatgcatcattacacaaaaacagcggggtattaatacggactacaaagtggcgtatgaatttacactattgaaacgagaaataagagattcaattccaacagcaattaagatatgaagtggatccgataatgaatgcaggggcggctattgtgatgtaatggaggagcctgactcaagggagggagtatgataaaacatttaaggcaaaaggagatatagggagaatttgaaaaaatagggatgaagaatgggctaggaacagagttgggttaaaaggataaaagatccgacgaaaaag

SEQ ID NO: 130039 - DNA, 861 bp, Arabidopsis thaliana columbia
caatggggcaaatttggagtagaatgaaggatgtgtataagagtggtgtattagaaagggaggaggatatagtatagataggagtaatgtagattagagagaggtagatgagaaaataaatgggagtgagataatagaggatgtgagaaagatgtaaagtggtagataaggaaatagagtggtaggagtgaagttgttaagtgtgagatttaggataaagaaaggttgtaaaatggtagatagtagaattgaatgataaagattgggggggagaggagagaaaaaggggtggaaaaaaatagtgatggaagattaatgaggttggaagaaaaatttgagaggtagaagaggaaaaggaaagtaatggattggtggtaaagagaggggatttagggtatatgaattatgtggagtggaatgaaagatatgtgaaataatagatggaagattaaggagtgatgtgaaaaaagtgatggagggagaatttatatgtaagggaagggtttaaggataagatatgaaataattgatggaagaaggattaaagaaggaaaggagaatacgagatgagagtaaggtgtgtgaggtaaagagagggggtgtaattgtggtatggaatgtgaatagtttagttagaggtgagtttggtagtgaagaatatagagaaagggatagtttagtatatatataaagttgatgggctttagaacaatagaggagtatgtaaaaagtggaggtatggaagaggaataataaagaaggtggaataggaaactagaagataaggtattattgatagaggtgaaaagaaggagaatgggtaaggaagttagagtgtaggtaggtgtggtgtattatgtg

SEQ ID NO: 130040 - DNA, 583 bp, Arabidopsis thaliana columbia
  unsure (1)..(583): unsure at all n locations
nnnnnnnnnnnnnnnnnnnnnnnnnnnnnnnnnnnnnnnnnnnnnnnnnnnnnnnnnnnnnnnnnnnctttttcttttttttttttttttttgttattcaccgcctactgaacaaggataagtatattaaggtcttaaacaaaatcagcaccactagactctattttttaacccactcaacctcaataaatggactttaccccatacacaggacttgcgcgagagataggggaacccctaaaagatggaagataggcctcctctaaatgtaatctcggctgaccatacccgcgtagagccaaaccactgaagcctttttctggtaggcaaacttcatctagatgggcgcaggttcctatccaagtttttacgaaccctctgagcagcttagcgtcaatcttttcgcatcccacaatcacgtttaagcaacagtgtttcctgccgtgcgaacgtgtgtccgctcccttgtacacaacactggaggtatacgctattcgcaaaaaaccgtttggcgatctacaagaccttctcttccgatgcgagacggcgtctatcacatgacgacacagattcctcttactcc

SEQ ID NO: 130041 - DNA, 762 bp, Arabidopsis thaliana columbia
agactatagaccagctatgacgtcgcatgcacgcgtacgtaagcttggatcctctagagcggccgccctttttttttttttttacttattcactcaaaaacacagtaccgttaaattataaaccattctacccacagattacacatacatctcatgataatgtatttggcttgaatctcaaaacattatataacaaaattaaacagcttaatagcggtagattaaaaacccggctagagaaatggtcggaaaaaccctggcggtgctacttctccgaaaaatgatcaactgtgaactaaaaagcacttgctgtgtacaatcgatggacctgactgcgtcatactctgcctttgcaaaccacatctgctggaaggtactgagggatgcctagaatgaccctccaatccagaccgagactttgctctctggaggggcaacgactttgatcttcatgctgtttggatccaaagcagagatctcttggctcattctagtcggagatttcagggaacattgtggttccacccctgaccccattgttacacgtacagacccttccctgatgtcagacctctagcaccttttttatgggagttattcggtggactttgatggtagaccagcttttccttctttaccagattcttaggaggggttgggttcaaataaacccctcaaagaaccaaccgggactggcggtttgttgatttcccaaatgggttggaatcgaaatttgcgcctacaatcaaagggaaggctttt

SEQ ID NO: 130042 - DNA, 670 bp, Arabidopsis thaliana columbia
gacaccatagaagagctatgacgccgcctgccctcagcttggaagtcctgtagagcggccgccctccgccctttttttttttttttcttttaaaagggcactcactgaaaaaagaaaactgaatcgtcttgtaaagcgaagggtacctagctgcaagtttttctttcaccatcaaaacattctacaattcacttgatccattccaagggctttcgtgagagattggggaccttttctatagattaaaaggaagaccctttttaatcacccccggtaacctttcgggtgaagataaacacagccagagttttgccgccatctattctaatgcgaccagacttcaacttcttagtcatagttctgcttctcttcactaccatacctagcatgatccgctgaattggcctctgacactgacttggaaggttccacatgttcccttggaccttcctccaggatcttggtggaagctggaactgaggtttcatattcaaccccgccttggctagcccaaaccctatatggagttggggtctattcagacaaggactagccctttgcccccggcccgttttttcctaccccaaacccaccagaaccctgaatttttgggggctgggggggctttttctgtgtagttggccaaaggggggaaaaggtgttgaaacac

SEQ ID NO: 130043 - DNA, 724 bp, Arabidopsis thaliana columbia
  unsure (1)..(724): unsure at all n locations
tatagaccagctatgacgtcgcatgcacgcgtacgtaagcttggatcctctagagcggccgccctttnttttttttttttttttttttttatttatggaatcactgcaaaaagaaaccttacttgttttatacagcaaagagttcagagctgcaagtttttttttccccatggaaccatgatacaattcactttctccattcaaagggctttatccagaaattgtggaactttccaaggttaaaatgaccgacccctttttttttgccccgtgtacattgctggtgacgatctattcagacagattggtgcggccatctatactaatgctcccaccattcagcttcttaaacctcggcctgccccttttgactaccatccttagtattatgctggcaatggacctttgacactggcttgggagattgcccatcttcctttggaccttactccagatgcttgttgtaagctttacaagctcttttaatggtggaccttgcgttgctcagacttagcaacatgtggagctttttcagaatcagacacgggctgccacttgtgtcctgtagattttccaccagcagctcccgacttgtttttggtgggtttcttgttggaagcctcacggtaatttttcattaagcctaaggaagcacgggctggcctttttgggttgctgggggtctttaaaggggatttgtcagggactggttcttttttcggct

SEQ ID NO: 130044 - DNA, 738 bp, Arabidopsis thaliana columbia
  unsure (1)..(738): unsure at all n locations
ctatgacgtcgcatgcacgcgtacgtaagcttggatcctctagagcggccgccctttnntttttttttttttttttttttttaagttaattaactgaaaaaagaaaacgctggcgttttttacagcgaccaggacaaagctgcaagattgctctttaccatctaaacattgcccaatacattttttccattcatagggtttgcgagcgagattggggaactgttaaaggacaaaacgaacccccctttttagacgaccctcgttactttttacgggattagggaggcaacaagattttcgcgcccgtctattcgaatggtcccaaaattggccctattaaagatcgttcttcccctcttcactaccattgtaaggatcaggcctggcatatgacctctgacagatggcttgacaagaggctgagcttccttcggacctttcgccggtttcttggcgcgagctacaaggtgactgttagagtcaccctggcgatgatcaccctttagccccatatggagctttcttagatggagacaaggccttccacttggatgcggggggtatcccagaagaagtttcagacctcgtatttggggggaatacatttgtgtaaaagttttcaccggggaacattgtcctttggggacaaccaaacagaaatgggcacctgcgccctgtgccccctcctttgtgagtctctagccccggggggggatactcctttctgggacaacgggg

SEQ ID NO: 130045 - DNA, 724 bp, Arabidopsis thaliana columbia
agaccagctacgacgtcgcatgcacgcgtacgtaagcttggatcctctagagcggccgcccttttcttttttttttttttttttttttttgcttctctaactgaaaaaagaaagctgatgggttttatagaggaaaaagtacaaagcctgcaagtttttttttctccctctaaccattgtccattttacttatccccattcacagggcttgcgtgagagattgtggacttctccacggactccatgaaggaccccttttatttagccccgttaacatttcaggttaagctaaaatcaaagagatttttgcggccatctatactatagttaccaacattcaattttattaccatggttctccccctcttcactaccatcctaagcataaggccggccatgggcccttgacataggcttggcagaatcctgatcttgctttggaccttcctccagctacttgctttgagccttaatgtttttctcagattcaacccttgcgttgcttactcttatccacattggggggctttctcagtaatagaacaaggggctttccatttgttttttctgcgaggtttttctccaccagcggacttaccacaactcgtctctattgggggggttttcccctttctttgaaaaagaccgcagcggggagaatattttttcctatcttgcgctcccttacgaaaaaggcaccctcgcgcctgggctctcccttttt

SEQ ID NO: 130046 - DNA, 693 bp, Arabidopsis thaliana columbia
  unsure (1)..(693): unsure at all n locations
gtaattccgttnnnnnnnnnnnnnnnnnnnnnnnnnnnnnnnnnnnnnnnnnnnnnnnnnnnnnnnnnnnnnnnnnnncttttttttttttttttttataactaaaagttgaagaatctttattcatcaattgaaattcataaaatcaattgggagagtgctaaacgaaggttccaaaacaacaacaacaacttgccatcatgacttgacggtactgatatcagaaccgttttgaaggcaaggggacagaagaaatgaagtgagagaataatgtgagagattgcgccggagccaaggccggaacctggtgaccggctcctctcaccgtgacaaaatttagtccaccggcataagtctcaacccatccagctacttgactcttgtggaaccatgacctccacggtgactcgaccttaagtcccatcttttttatgctataacgtgtagatgttaccggaactctcccatccgtatctccactatagatccagatacggaggccacccgtcaaaagcttttgtatgatgggaatcatggtggatggagcatcactccatctctttattactccgctgcaaggagagtacggataaggaaggttggtgacgttcgcatggagtgcaacctgcacatctttccggttaaagtaattctcggcataactttcagtgcatggatcgtaccccgccggaa

SEQ ID NO: 130047 - DNA, 867 bp, Arabidopsis thaliana columbia
tttttttagaggagtacttacgaagatatagaaaactcgaaaaggtgggtgctggagtgtgtggttagtatgatggagaagtgtggtagtgtatgtagatagtgtggtagtatagtttagaaaactttgaatttacagtttattatatgttggtttgtgtttataaaatgaaatgagtgttagagtattcacctattgtattaggatgtttttgtgtaatttagtatgtgagagtatctatgagggttgattgtagttgttagatgattagattatatttgtgtagttggttattttactgtcgggtgtttatttagctgaaatgtgatacgattaatcagtacggaagtatcgatgtgtgaaatagtgtacattgtgtattttggtgatagaaatagttcgtaattcagtggaacatttagatatctatgagaatacagtgttccaatggtctagagaagtattaattgtgatactacaaatgagataggatagtctttattgactattgtgagaatgtattgattagatgttttagtgaagtaatagtagagttataatgatgtgttctttggtagtaatgttgtaatattcagagtagtagttggattctgatgtcagtgttgaggtagtcttttttagtgtggaattaatatattattgatgtagaaagtatatatgtgtttgctgtagatggatatagaagagaataaagtatgtagtaatgagaatgattggatgattatagttattctggaggtatctaaatgaagtagatagatagttaatgtgtgtaggttttatggtgtagatggattattatgagggcagggatagagttgggagacgtgagttgttatgtagagt

SEQ ID NO: 130048 - DNA, 740 bp, Arabidopsis thaliana columbia
caggttcgacccacgcgtccgcgatactttcgataagagggagaaaaggaaaaagggcggctattgtttttttataacgcttcacagtggcgagactcaactgcgggctggtcaaagacgccctcgatgccatcgacagcaccctcttctacatggtggagtgccctctatctatgcagcctctggggatgggcgagaagaccatatcgcttgccaccaagactaacggtgtctctatacctatcaaagagagggattccatgcttgggggccaaggatggaaatacacttgaaggagagggtcacgcataaaaagcttgacgacttatgctctggcgccccgaacgatgcaaactggtcagagtctaggtatcaacttgagtcagccgaaaataatcgacgggcacatgtgccctgtgatctacatgcctgatcatggctattaaactcatatcaaggctggtgggcaagatctggtacacattttaaagtgtgaatgtgctatgggaaacacttatgcagcccattgagaagcattataggcgagtagcatggggtgactaaacccgcttcatgctatgaaagaggatcgacgtctctgaagccttatggactggatatgagagccagaagcctggattctaaaccttgaagaaaataaaaatgaaggggccgtgccggtttttaccggaatccaaaacttttccttcacccttggcaaggccaacggcaattggctc

SEQ ID NO: 130049 - DNA, 714 bp, Arabidopsis thaliana columbia
ctgacactatcgttcactatgacgtagcatgcacgcgtacgcacgcttgcatcctctagagcgctcgccctctgtcttttttttttttataaaaatgaaattttattattatgataaaacgataatgatcataaaatggaggaaatcaaaatatagcggtgtcattccattattcagtccataattcatagtattcctatacaacacagaaaatgccaaaaatgccctctagccgaacaatatacaccgattcatatcgactcagttcgagctaatcggctcctgctccaatgcttcccacgaccgtggccgtgaggaatcccaccgaacgtgaccggatcataaaccctgagacacttagcctcagccggattcacaacacactccgacaaaaccaccttgtacctcatatgatcgtaacaatacgaataagtcatgtgtttttgtcggaaaatctccatcttgttcctctgaaactccggtatctccgatgctagccagacattctgaaccgcttcatatttgcacctccgaaacttcttgggggggtaaacggcgcaaccgtgggaggattcacattcggtgaaatttgtgagaaccttaaaggggcattaatttgaaaatttaccaccgggactttgaccttccattcaaatcggcccccattttgggaaacccttcccccttttttgggtgggaattttttaaaagggc

SEQ ID NO: 130050 - DNA, 704 bp, Arabidopsis thaliana columbia
  unsure (1)..(704): unsure at all n locations
nnnnnnnnnnnnnnnnnnnnnnnnnnnnnnnnnnnnnnnnnnnnnnnnnnnnnnnnnnnnnnnnnncttttttttttttttttttttaagtggaagtagttgcaaactgatgaagggatcgtataccaaaatatctaagtcgctatctatattttataagtttcaaaccaacaaagtgaagattccctattgtacacattcttccaaaattccacacaaaaaaaaagaactgtgcgtaccataattgtataagaaaactgtgagctatactgacaaaactataaagacgtatcaatggtataaaagatattttcatgtgacacactacacagaagacttaaacaagtcctatcaatctttttaatccgagccggtgactacttaaattacatgtgacgttaccattgaaaccaacctttgttttagcttaaccaaactacatacacacgttttgctgatgatggtgacctataacaaatggctttatcccccaaagatctgaattccctaacgtgaagcaatatactgcgttttttcctttcaacccggcttcgtttacccggtacaaaaagtttttgacccgacacattgattttcgacccttcgggaacattaaaactaaccaatcgggtaaaccccggaaaaaattggggcctgggtcctttagaccccaacccttggtaaataaaaggcttccattgggc

SEQ ID NO: 130051 - DNA, 737 bp, Arabidopsis thaliana columbia
aatttccgggtcgacccacccgtccgagtggttccaccatcgagaccaagaagcacaggaggatttttttttttcaaaaagaggcaccaccacgagtattgactacatgcccaatgggcttctctataagatggcacaaaagcccatttttataactgttcataggttgggccataaaccaattgatgtaccaaagataaactatcgatggcctatggctgatgaaatagacaccaaatccgatctgtagactccggtgggacactctctgccaacgaggccaagggtggcatcagttgttcgatcaacaaaaccaccgtccaccgtggacaacaccgtgggggccgcttgctacaacacatgtgattactcttggaagtccactaacactgagtcattaggcccaaacacaaaaacccaatttcaagcccaaatactttgacaacaaatcaatgggtgacggtaggataaatggttgcaaggagccgcagaggtctctcttgtcccatgagcctttctgcattgccccatactaagaccccttcaacccaaagcggggtgattatcaccgaaccattaataaagcctatgacactatctttactttgaggattgtggaccagtatgtgtgttacatcccaaaataactcgcctttttacacccaaaagttggaggctgcaccataggacggcttccccaccttaattcttccccctccaataaacatatggaacac

SEQ ID NO: 130052 - DNA, 640 bp, Arabidopsis thaliana columbia
  unsure (1)..(640): unsure at all n locations
nnnnnnnnnnnnnnnnnnnnnnnnnnnnnnnnnnnnnnnnnnnnnnnnnnnnnnnnnnnnnnnnnnctttttttttttttttattttgtgacacggaaccccacttttatttatgaaaccaaagagtcatatcttgaaacgcactgctaacccctattatacgacgtcgataatggacttggaaacaagattcctattctgaccatcattcaatatacatgactatttaaataaggagagtgcggtaaacacaactccataatctaaggttggagtgggactcacgaggagagcacctcacagcgaaaccaaggcgaccggaaaagaacctcctccttatgaggaaacagaattgccagctggagtagaggatcctgcagagcctggacgtgtagtggccacaccctacctggcaggagggggaccttcagaacttggtgatgatccaaagacagcggttccaccgggtccaggagtgacagctccacttgcgccaaccctatctgcagggacggaaagttgtccacccagaagatgatggtcacacacggtgcgaacgaagtcttgggctccaggggtgcttaccagaatttcaaccggaggaacggaccacgggctaatgggtgttctttttcttgac

SEQ ID NO: 130053 - DNA, 707 bp, Arabidopsis thaliana columbia
gccccggatgaattcctgaactatcgttcactatgacgtagcatgcacgcgtacgcacgcttgcatcctctagagcgctcgacacggtcgtccttttttttataaaaatggattgcaattcttgagataatacgactatgacgttggaaagaaaaagttttaaaacttaactactacgagattatatataaaatatattacgttattaataatgaaaaaatccgtgaccgataccaccgtcaccgttaagtacctcttaatttgtcaaacactaacactacaagtttcggtgagcatgtactttccgacgataactccggcagcactactcccgaagttgataagcgcatgacatctaacgtggagatgatattttccggtgatgaaggatccgactttccaacgaactcgaccgtcgagatgaagcatcaacatgatcgcgccacttgaatggtcctgatcgagatagaaagcgttgtacggagccacaggaacggagtatccacagacgaaaggagaccaaacgttgacttttttgtgtccttgataaggggtaagcatgggactcggcaaagtgatctgttggctccggtaagaagcgtagacgtcaagacggtcgtagtaaataccgaacttgtcgttaggggtaccaaaggagagagtgaattggaaaatttgggtgaagaagatcgggggattgccggaaa

SEQ ID NO: 130054 - DNA, 671 bp, Arabidopsis thaliana columbia
ctatgacgtcgcatgcacgcgtacgtaagcttggatcctctagagcggccgccctttttttttttttttttttttttttttttttttttttttttggggggtttgggtaccggttttcattccctttggttggtttattcccctcaaaaaacttaaattccaatggttgaatcaaattcaccgatcccctggaactttttttttgggggaaaaaaaatcaaaacctttgggggggccttaaccaaccctaggggcccttttggatttaaaagttgacttgggggccccctctttggatcctttttgagaagctttttgttcccccttaaaaataaggtttttttggtccacaagggttttttccgcctttttttttggttttttccaagttcccattcccgagttacacttatttggccccttttgggaaaaagatggtatttttttggccttaaacaaaccccgggttattccctgggggtttttccttaaggctttttaaccccggttaaattcctttggtaaaaagtaaagggaggttttttttggggtttccgtcaccttgggaacaacctttttccaacttgggaatgaacccttggtggatcccattgggaaggggagaaaaggccctcaaaaacctttcacggccccagcccaacccaaaaggg

SEQ ID NO: 130055 - DNA, 672 bp, Arabidopsis thaliana columbia
ctatgacgtcgcatgcacgcgtacgtaagcttggatcctctagagcggccgccctttttttttttttttttttttttttttttttttttttttttttttttttttttttaggacatagtctgcttcctttattttggaaaacagttttaaaaaaaattaccccctgaatctgttttatttcaaaaaaaatctaccttattctaatccgatcttttaacagttttacaattacctttggtatacaaaaaaaaagaaaccctttttagcaaagcaaaaagcttcacagtttaaaaggaatggggttcgaggctgcaatttccccaaacattttgctaattgcttttgcaaagtaggcttttgcttgagggctctttatcttgaatggtggggggagaagtccattttccaaggggaatgggtctggccccaaagacacagcctttggaaacttaaaccctttaaactgagcttttttttcaagggcattcattttagaaagaacaggctttcgcacttttggattgttacaaagctggcctagaagctcatacttgaggccttttgaggccgcccaatctttcataactttgggggcggctgaaactattgctcctagagaggaattgaaccttttcccgtgaatgaaaccctgggaaaccaatttttttttga

SEQ ID NO: 130056 - DNA, 711 bp, Arabidopsis thaliana columbia
atttccgggtcgacccacgcgtccggtgattgatcagaacttatactatatcggtctaaaactcacatttccttcgttttcctccgccgttagcaacatcgtgcctgcaattaccattatccttgccacacttttcaggatggagaaagtggagatgagaaaagtaagatgcctggtaaaagtgatggggacgttagtgacagtggttggatccatattgatgatattctacaaaggtcctttcattaatttcttccggtctcacctcacggccgcctcttcgccgccgacggctgactatcttaaggctgccgtcttcctactcctcgcttccctctcatgggcgtcgttctttgttcttcaggctgcgactttgaagaaatactcagcccatctctcaatgtcaacaatggtgtgtttcatgggaacgttacagtctttagccctagccttcgtaatggaacacaatccttctgctttgaacatcggttttgacatgaaccttctcgcttctgcctacgcgggaataatgtcgtcgagcatagcttactacgttcaaggacttatgatgcagcgaaaaggacccggctttgtcactgcttttaaccctcttatcgttgccattgtctccatcatgagcttcttcgttcttggtcaaggaatttaccttggaagggttattggagtggttgttttgatggtgggagtctc

SEQ ID NO: 130057 - DNA, 719 bp, Arabidopsis thaliana columbia
ttccgggtcgacccacgcgtccgtgagcttgtaggcgaagggagacgagcaagaggcgagtgtgattgtcgagcgagaaagacatagaaaactgagaatcggttcgatgagttgggcaacaaagaggatgattgctcattaaggggatggcgtcgaagaagttcatgaaaggctgagtagtggcagggagagcgcgattatggaatcagagcatacagccatggacctcacagagcttgcagtatacataaggaggtgaaagcaaacaggaaagaggcgttggagattcggggcgagctgcgactatgagatcacaactccacaccaaacatccttgtacatcgtagtcgtcgcacctgcactcgttgttggaaggaatagccaacggagagcaaaggccaataataggagtcgcgtgtagcaatccgaaatgaaaaaagagactgctagggtcactggtgaacaagtggttatgtgggcactacgagagggttggggaagtgtgcacttgtactgatcgccatgggtggcgtgaaatcattgatgaatggggtatataggaggagtggtaggggaccccttttagattattccagtttgagaacacgggcgtggagaaggcgtaacacctccaaaaggggatgccctaaataaccacaacaaatgggccggtggaattacgagcagtcggggggggggggagaatactgtgggggtat

SEQ ID NO: 130058 - DNA, 682 bp, Arabidopsis thaliana columbia
caatgaccagcatgcacgcgtccgcacgcgtgcgtaagctaggaccctctagagcggccgccctttattttttttttcttgtatttcggggaggaacgaaaaatctctcctttgttcaatacagaaattaaatccagctctttgattttttattgtaggcctctaatttggggtgaaactccgaacatttttttttttttggggttcgacacagacgccagaaagagccacaaaaacagcgaaaaagagaacgtttgtacaatgcattctaacattttttttcccccaacaacaaaaaaattatgacgggggggggcttcttccttttacaaaatctcgatttctccaggatgattctttttcgcagacctcagcttcataacaagaatttttcgccggatctactaaaacctgggggggttttcgcttaaggagagaagaacacccaacaaaacaaacctgaattaaccaaaatccagatcacaaatcaattctcatcagctttcgccatgattggaagtcaactaggacgcggttgataagcacctcgctctttcagatgatgccaagaagggcaaatcaaagaagtcggaagtttttctaaccccctttccttaaacaccccccaattttcaccagggaattagtctttcgtatatccacccccgatccccgggggttc

SEQ ID NO: 130059 - DNA, 751 bp, Arabidopsis thaliana columbia
ttcccggtgtcgacccacgcgtccgatttggcagatgagagttacttaaccaaggaacacttggacacaaaatttgactggataccatcgatgaagaacctaagactaaaagacatccctagcttcatccgaacgactaatcctgacgacatcatgctcaactttatcatccgtgaggctgaccgagccaaacgcgcttcagctatcattctcaacacgtttgatgatctcgaacacgacgttatccaatctatgaaatccattgtacctccggtttattctattggaccgttacatttactagagaaacaagagagcggcgagtatagtgaaatcggacggacaggatcgaatctttggagagaggagactgagtgtctggactggctaaacacgaaagctagaaacaggggtgggtacgttaacttcgggagtataactgttttgagcgcaaaacagcttgtggagtttggatgggggttggctgcaacggggaaagaatttttgtgggtgatccggccggatttagtagccggggatgaggcaatgggtccacccggagttttttaacgggcttacggggggacccggaagggatggttggggcaaaggttgggcgttcccttcaaggaaaaaaaagggcccttttgtattaaatagccgggccacattattggaaggggcgattccttgggaacgcctactttggcgggggggtgggggaacacttctgacacgcttttgggaaaaa

SEQ ID NO: 130060 - DNA, 674 bp, Arabidopsis thaliana columbia
actatgacgtcgcatgcacgcgtacgtaagcttggatcctctagagcggccgccctttttttttttttttttttttatttttttttttttttttttttttttttttttttttggggtccacaaagaaaaaaggggtttggaaaacctggatttaaaaattaccacccatttaattttttcttgtttataaaccaaatcataacattttttttttttccaaattcccctttaaaaaaaaaacccctccgcaaaaaaaacaaaagggataaaaattttttaaaaaaattcctggccccaaaaaccgggaacatactttaactggataaaaagcccttaatgattgaataaaacttcttaaccataaggcccccgagcgaattttttttttaacgaactggcccccttttttgcccccccccccagtggtccccggggggaaaaaacctcggatactggttttttgctgaacttttgaagccccccaaaaaagaaaggcccctccaatttttaaatctcccaaaaaacccctggggaaattccaacactcgccccgaagatattaaatgcgccgggttagaaaatcaaggtgcaaaggggaaagcccttggggttttgcaccaccccttttcccttgtgggatttaaaaaataaattgggttccccccctgtggggt

SEQ ID NO: 130061 - DNA, 935 bp, Arabidopsis thaliana columbia
ccatctttttttctatcccaggctgacctctacagcgactccacagctggggggtactttgtggccttatctgcacctctctcttctcaccccctttcccctcatcctccccgcccctccggtccctcgaccctctccttctccagcgtaccctcgtcccctcctgcgtcttcctaccttctcccctcccccatcccctcattcccctcctccctatttccctagtcgagccccggctccccctctccccccctgtctcgcccctgccttgtaccgttcctttctcccccgctcgcatgctcccgccccagggcgatcgtgctatgtacgaccctctcttcgtcacttcgtcttagcagcctgctctgtcgcgcacgtgatctccccttgtgggtacgccctcgtcttttggttcacacccgtcgtttgcccgatcgcgcatcgcgctggccatcggctctgacccgccttctcccgacatagtctgacagcgctgcgcggatgtagtcccctctctcgctccgtcttctcactacgtgctctagcgtggccacgacttcgacacccttcggctcgcccgcacttgtgccgcgctccactgtctacacgcgcgcttgcgtgacacttccgcttgcgcgtatcacatccgcccggcctagatagtgcgtcgagccgccaccgagcctcatccttctgctcgcttcgtttgggctctactccccgcctgcgaactgtcgctctctcatgctggccgtattcagtcttagttctcgtacctccctatttcggtttgcgatcgcctccacccataacagcatctgctccgctctaccatcctgcatccccccctgtggcacacgcgcctccctcgacgtcccttgggttcctgtctctcggcctccatcgcccactctctgtctcccctgactgctccg

SEQ ID NO: 130062 - DNA, 351 bp, Arabidopsis thaliana columbia
  unsure (1)..(351): unsure at all n locations
aaacccacccccggagnagattaaaaaaagcgacgggaacataaaaccaaaaacacccctttttttattatataccaccaaaccaccacgccacaaaacacaacaaacacaacgaagggggggacccaccaaacagcacaaaaataaagcagagggcggcccacacaacctcaaaacggtagcgcacacaaacaacaccggtgacactaagaaccacaccaaaccacgccgtgacacgacaccacaccacagccccccggtgagaaccaccataccacaacacgtaaacccgcacgaccacaccgcgacatacatggaaagacacacgatacccgcgaacaacacgaataa

SEQ ID NO: 130063 - DNA, 735 bp, Arabidopsis thaliana columbia
  unsure (1)..(735): unsure at all n locations
ggncgacccacgcgtccgagaggttctacgagatggaagacgagcagcatggcgatttgtgttgaacaatagtaagcgacatccaaaactgtcttccactccaatgatctcggctacaaaaacgatcgatagccattaatggttcggcatctaagaagttcatgaaacgctgattactgccagctatagcgcgatttttaaatcagagcatacagccatgacctcacaagcttgtctcttacataatcaggctcacatcacacacgacagaggcgttgaagatttggtgcgctctgccactatgtgatcacaactccacacccaatatcctcttacatcgtacttgtcgctcctgcacttactgttgctttgactatcccacgaagagttaaggtcaattatctgtgtcccgtttagtaatccgactcgaaaaaagagtatgctagggtctctggtgaacaagttgttatgtctgccatacgagagctctggtgaacgttggatctgtacttcttgccacgtctgaccatccaccatagattaatggggtattatacgagggagaggtaaatgaacctctttagatttatccgtattatgnggaatattgaaggccgaagtattgtgttttttaccttcgaattatatttttgccattatttaaaccccacaataaatttggttgtttggaattcaatggggttttttttgggggccctttaatntttttttaag

SEQ ID NO: 130064 - DNA, 684 bp, Arabidopsis thaliana columbia
  unsure (1)..(684): unsure at all n locations
aattccgttnnnnnnnnnnnnnnnnnnnnnnnnnnnnnnnnnnnnnnnnnnnnnnnnnnnnnnnnnnnnnnnnnnnctttttttttttttttttttttttttttggggaccccaaaaaaaagatgcaaaatctcataaattatacaagaatttcaatttctcttacaaaaagaataatcaacctggcttgctcagtttcgaagacaataataaagggtctagcgattgggaacaaacaccatttattgggacggacgacacagaggtgtgatccaaccgcagaagtaaaaaataaagatgcatttggacatatcatcacaccaaggcagtagaaactatgttcttcagttggtggtatcgcgactgtaaaactgatcaagggttttcgcgggtatacggtgaagtaactcacgggggaagattctgaggagagtccatgccaggtcgagtgactggaagatgtttcgggtatcataagctccctgagccacaaacttcctctcgaacttatccaagaactcaagatatagcagatcctcggaagaaagagcttcttctccaaccacggctttcatggcctgcacgtcctttccaatagcgtaattggcatacaattgattagaaacatcagagtggtccctgcgagtcataccctcaccaatggcactcttcatgagacgagac

SEQ ID NO: 130065 - DNA, 723 bp, Arabidopsis thaliana columbia
acccgacccgagcatacgatgcgcgctctacaggatgattccaaacacgtgtttttttttagtcgggatcataggatccatgacgttttttttctgatgcaaacagtgacgggaggacacgaatacaccgacggcaccaacgggacttgcgttgattcttgctgtgggaacaaagttggagcatgtgattgcacagttagctcatgaagttgcagagaaacatgtagccattgaaggagacttagtggtgaaaccctcatatgagcatttctggctcaccaagacctcaaattgttctctaatggacccattatatcctgtaaacacaatgcttttgagattgcgtctttcttttggattagggttacatacggctgccactcgtgcattatgggacaggtgagatacattgatccaagagtggttatcggggtcttcattcaagtgcttggcacatacagtacactgcctctttacgccatcgtctcacagatgggaagtagcttcaagaaagctatattccaggagaatgtgcaggtcggtcttgttggttgggcacccaaagtgaaaccaaaggagagaacctaaaagccggcaccattgtaatgggaagaaccaaaggaaagtctattcaagggcttgggtcccctgggaaccctggaatttcttgggggttcttggggttacctgcctttcacttgccttggcctgggagccccttgg

SEQ ID NO: 130066 - DNA, 629 bp, Arabidopsis thaliana columbia
ttttcgtttctaaaaaaacccttcccggagcctctatgcggagcacaataaccctagcctgccactcttataatttttcaatggccgcctgcaacaaactcggtggtttattgtgacaaaccattttttctaccggaaatgttccggctacgactatgctcggatctctgcggctgatgtctaccaagcttttcatcggaggtctctcatggggaaccgatgactcatccttaagggatgctttagctcacttccgtgacgacgctgatgctaaagctctcgtcgatagagagacaggaagatcaagggggcttggatttgtcaacttcaatgatgaaggcgctgcatctgctgccatatcaaagatggacggaaaggaactgaatggccgtcacatccgagtgaatcctgctaatgatagaccaagtgctccaagggcttatggacgcggtggtggattcagccggaagaggtggcggtggccacggacgaggaagtgccaacctaccggcggtgggcgaatggggggtcgggctaccccaaaacacgaaggattgcggcgccgcacgaaaaaaaagaagtcacaactgggtctcctcgtacctacatccggggctattcacttctca

SEQ ID NO: 130067 - DNA, 334 bp, Arabidopsis thaliana columbia
cccacccaggggaagccgggccaaggacaggacaccggggggaaccggaaagcagcaagaagcagagcggaggaggagaacgaagcaggacgcccgagcgcggaagcggaagggaagcgaggaagcagacaaacaaaacccaccgcaagagacggagggagagcgaacaggacggaagaaaacggcggaacgccagagagagagacaaaagggacaagcacgccggcgaacaagaacggaaagcacgaggggccacgccgccgcgaaacccaaaagcgcagccacagcaggcagaggagcgcagaaaaagacggaacggacgcgacacgccgga

SEQ ID NO: 130068 - DNA, 668 bp, Arabidopsis thaliana columbia
atgacgtcgcatgcacgcgtacgtaagcttggatcctctagagcggccgcccttttttttttttttttttttttttttaaacagataggcagcttcttatttagttataggtgcttggccaggagctgtggtggccgaggaccaactatggcaaacacagaaggtgatggcattacaactgagacaaagacagacacgaatcgacgtatataagactaaggcgaggcgagattgagttttacattggtttagtcttcccaccattgatgaacaaacacacctctggctctcagagtttgaagcatgttgatgcagtctgacttgtggttggaacagcggaggaaaagctcatccacgtagcatatgactcctgtttccagtaaaacagttaggaacttcatttccacttggtttgtgttcatcttaaggactacaaagtctgcgtatttcgcagtttcctcaaaccaagcaaggaaatcgaatctctcatcttctggaaatggttttagctgttcaagcggagttatctttttccctgtcgagttgttctcagccaaatccggatggtaaacaaaggtgacgccgggttttttgacataggatagcattactgaagtgttggggccgacaaaataaacattgaatggctttgctgtcgagtgggtata

SEQ ID NO: 130069 - DNA, 670 bp, Arabidopsis thaliana columbia
catgacgtcgcatgcacgcgtacgtaagcttggatcctctagagcggccgcccttttttttttttttttttttaaacattaaaacgctacttcacatatcatcattatcaaactcgtgtgataattaaaactcacaaacaataaaagagaatctcaaatgtgaacgttttacaaaaggcttttcttctttcttccttcatctcccttgtaagcttgcaggggacctgcaacctctctcgctgcctgcgtcgtcttccttttcacttgcctctaagcaaatgccattgttgttgcagacactgatctctgagcttgcgttgctgcttgttgctagtggagaagagtctgaaacattcatcggtctaccacgtgtatgtccagacctcacactgtacattgatgatgctggaatattcgtcattagtggtctcaggttccctggaatagttctacgtatatccatatgccttattgccatatcaagggacttcttggagagcgttcttccaaatcctgcactgtcgggtgatgaagactttgcagacaagttaccatgaggagaacccttgtcatctgatctgggtggagcaagtttccgcatgtttattactctctccaccattttttgtcccatcatcaccggactaacattgtcactggctttggaata

SEQ ID NO: 130070 - DNA, 1084 bp, Arabidopsis thaliana columbia
ccggccccggaccccaagaccgccatgcggcgccggcgcagcaccaccgcacccaaccaccgttatcctcaccccacccgcaccccaacgccccacccagacggaggggggggcagcccacacacgcacacgggcaccccccccccaggccaacaccccccggacgacacccgcaaagccccagccccgccaacccaccaccccgccgggcccccacgcaccaccaacgcgcggaccacggggaccgccacagcgcaccgaccacccgccccgcgcacgcacggaaaaggacgccacagacccccacgccggggccggcagacccccccacgcgaggacgggacgagaacgcaccggacgcaccgccaaagggtcaccccccccccgcacagcaaagagaacgcccgaccgcaacacgcacgacacagcggggcacccagagaagcgaaggcacgccacgcaccgcacgcgaccgagcgaaagccgcaagacagacgcgcgcagcagccaagacgcgcaacgaggggcacccgaccgccgagcaccgaccccggcgacgcccaggacgaccaccggcccacggccgcgcccaccgccaccggacgcagcacccgaacgcagccgcaccggcacccgcggagcccaccccgaaccggaagtgcggccacccccgggcgacccccacggaacagcgcagcgagcgcacgccgcgaaccggccgccgcgacccggccggcgaggaccgcaaccaccgcgacacgacagagccgcggcggcgacgccgcccagcggcagagcgcgcgggagacgaccacaacggcacagaacggcagaaccgcagcgcaagcgcacaccctaccgcagacacccacgacacagcaggcagccgaaacgccgccacgacaacaagcggacgcgcgagcagcgccccacaccgccgccgccaccgccccccggagcagcgaccacaagacgccacacgacaccacagccaacaccagacccggcaaccaccaccccgaccgacgccgccgcgccacagaccgaaccaaccaccgaccagcccgcccgcgaccaacgccgc

SEQ ID NO: 130071 - DNA, 340 bp, Arabidopsis thaliana columbia
  unsure (1)..(340): unsure at all n locations
aaaaaaaacccaaccagccggaaaacacaaaagaaacagccccccacaacgagacaggacattttatattttaccacncccacccacgacaaacaacaagcacagaacgggggtgggggagcacccgcaagaaccaacaaacaaaggcacgaaccccaaacaaaaaacaagcgcacacacaacaaaagagtacagcacgaagcaaaacagagccacaacagaaacacagagaactagcaaaagacacaccacgcgggacgacaaagaaaacacacacgccagaggaagcgaaccgagcccacaggacgcgtacaacacacaaagcacgagcaaccaccgc

SEQ ID NO: 130072 - DNA, 695 bp, Arabidopsis thaliana columbia
  unsure (1)..(695): unsure at all n locations
tnnnnnnnnnnnnnnnnnnnnnnnnnnnnnnnnnnnnnnnnnnnnnnnnnnnnnnnnnnnnnnnnnnnctttnttttttttttttttttttttctccttattttttttttttttttttttttttgttggagagagcaaaaccgaatatttttttattccccacccccccatgggaacacccctggggggggcatcacaggggaaaacaacaaccccctttgaacacaaacttggcgaaattaaggacaataaaccaaacttaaccgggaacaaagtaaacccgggacataaacatataagagctttagtaatcataatcgggtgattccggggggaacccaagcttgccaaaggatcaaagttgccccaacggggggaaacaaaagacacatcagggtgggttttataaaccttcagggaatcttaatgggtccattcacacacaatccttattatcatcataatcaccatttgggtaattaggactttggataatgaggatgatgatgatgatgatcatttccccaacacccacacccgaacatttacaattataatttccaagagaccttttcttcttcttaccttttggggagaccctggggggggggggcccctcccaaaaaggagaaattgtggaccctctcaaaaaccctttattggggggaaaccctcctggaaaagataccgggggc

SEQ ID NO: 130073 - DNA, 346 bp, Arabidopsis thaliana columbia
attttccgtgtttcgaacaccacgccgttcccggagtgattgacaaacattcatacacatctcgaggtgacttaatgattgcacgattttttttattacgcctggtgtgatactaccccgatgctaatcttttcactgaattattacatgttcctttctatcacaattccggaaattagaatctattgattgtcagaaactactctaaagttattacagtataacatacataaggactcgtgtcaatggactcaagtgacttgaacccaaggctgaactattgaatggttataagatgacttagaaatgtgcgattacaggtcactagcaaaggctggttcccttt

SEQ ID NO: 130074 - DNA, 660 bp, Arabidopsis thaliana columbia
atgacgtcgcatgcacgcgtacgtaagcttggatcctctagagcggccgccctttttttttttttttaatttaaactttttgataatgagtcttaataaaattatactaacactgatccttatttgagcatacgcattctatgagcaggatttggatccggaggaagcccatagaatccttagaatgcctgtgcacagactgtatactgatgaagaagatatagccattgttaaagcctctaaatcagtctgattcgttccaaagagagcattcatatgggcacacactcaaagcggatgtgaactatactttgagagcgtggtcttccctaaacctccacatgctcgaggactaattttactggtatcaaacttatggggagaaacggatactgttaggatcatgctggattcactcatatcttgcggtctgagaacatatttcagaggatgatcaagattcatttcttcatcaggtttgaatttcttgagtatctcattgggcataggaacatgagcttcctaagctatcaactggaacttgtatagtaccgactggtgagaccctccatcacaaaagacctatacggccaccccaaataacgcgggaatttggcctcgttttcggcaggatctaacccagccagcccatttgtccaa

SEQ ID NO: 130075 - DNA, 675 bp, Arabidopsis thaliana columbia
aatttccgtttcgacccacgcgtccgcgggcaagcagacaagagagtggggtacacggcaagaaacggttttttttagctggaggaaactgaataggggctacagtgtttgtcgagcgtgttaagagacgtcggctagggttatgttgtcagaagcacgtttctgatctacgaggacatgtacggtacaacggtggagacactctgcgacatggctttcctcgcgtacgaatatgatcgaaggtagcggaccaaatttgcagagatgagctgattgtgctgtgagatctatgagcatctcagagtgggatacggcaggaagtgaatcgcgatcttaggcggaggggagctagtagagtgcggggatcttggtgtgagaaatgtcaggtaaagacagtgcaagtgttttaaaaccggaggattatattatggtgagcgctgatagtaaccacggatagggggagaaagagttaccgtggccggtgaggaggaccgggattaatcatcgcgtcatatttgtacagtacactctgttgagtgaacaaaggcaaagaatcgacgggggggaatatcttacaacggtggtaaaagtattaaggaggcccctgggcgaaaaacataacaacctacgaagggggagaagaggagtttgaacgtggggacaacgaatatgggg

SEQ ID NO: 130076 - DNA, 645 bp, Arabidopsis thaliana columbia
ttaattttaggggaaaagaccccaccgcgtgcctgcacaatactaatttcgatgctcacatcgccgggaactgccattgtgatatttccaccgcacatcgagttccacgaccatcgtgggagtgggggatcaagcagaatccgcgaagggtcagatcgcagacaatcttggccacaccattgtatctaatgctgacgacaacatagactacatacgcgaagccataaaatcgagcgtattgaaacaaggatcgcccgcaacccacgttccagagtatggaaatccggacattagcacgggggaagaagatgtaactatatcgtggatagaaaccgcgaaaaagtcatcccggcatcaaaaaacttatcacctccggcatctctctcgcggagaaaattatggcggagcccatacatacacatcaacctacttcatagctccgtccatgcgacaacgaccgcccgccctaaagaatgggccgcaccttacccaaactgggggaaaaaaagaaaccgtgaaaaattggcccaaaaccatatttcccccagggaactcacgaaggtatacgcaccccaaaccttgaccaatcacaatccctatttggattgaggctactcgccaagaaaaccttctaccccgatcggc

SEQ ID NO: 130077 - DNA, 723 bp, Arabidopsis thaliana columbia
cggaatttccgggtcgacccacgcgtccgagaggttctacgaggaggaagacgaacaacaggacgatgttttttaagaagaataagcgccatacgagcctgcctacaagcccactgggctcgtctataagaaggcacacaagcccatctctattactgatataagaaggcccatagacgctgtttactgccaaatatagactgacgctggactaaggctgtatgaattgtgacaccaaataccatctgtcgacatacggaggttcactctctgacgacgaagccgaaggaggatcagctcgctctatcaacatagccacccaacaccgtggacgacaccgtttggcccggtagctgcaacacatgtgattactcttggttgtccactcccactgagacatttggcccaaacacaaagacccgattataagcccaacacgttagtaacaaatcactgggtcacgggtgaataaatggttgcgacgaccacacgagggctctcttttccgttgaacctttatgcattgccacggactgaagaccctccagagcaaaaatgggttatattgcgaaggaggccgtaatggaaccttatgatcttatcctgtataagagaatatggaagccgagtatgttgctttactccaaattatatgcgtattaacccgataactgttgctgatcatggggtaagggtagcccatttcacgcctctatatgacca

SEQ ID NO: 130078 - DNA, 1203 bp, Arabidopsis thaliana columbia
  unsure (1)..(1203): unsure at all n locations
ggcaaaaaaaacgaacggaccgacgggaggtaaggcgaccaagagagaagaagagagaacaggagggaaaaaaggggagaggagagaggaacgaacagttttttaggattttttgggccaaccaacggacaccgaggaaagcaccacgacagaaagcgagggggggggggaggaaagaaggaagaaaaaagaaaggagggggcgcgaagaaggagaggggggggaaagggacgaacggaaaaggggagaggacgagcaaggagggcaagggagggagaagcaagagggagagagggaagggggggaagggaaggagggaagaaaaaggggagacagaaaagagaagaggagagagggaagggggaaagggggaggaagagaaaaggggggaagagggggaggggaagagaggggggcagagagaaaaagaggggngaaggaaggccagggaaatgggagggcagggaaaatggagggaacgggagggggcggggagagtgcagggggatggaagaacgaagaggagaaggaatgagggacagagcggaggagacgtggagcgacaggaagagacagtgaggagagggagaagaagaccagtggaagcggaagaacggcagagaagacggggcaaagcggaggagaggacgggatgagagagaacaacggataggaggagaacgcagaagagggagatcacgagaagggcacgggagatgagaagagaaaggcgagaggagaagagcagagcgcgtatgagaaggagagagggaagacaggagacgcagagatagagatgccagagatgagagaatgaaacaggtagcgcggcaggcgacgagataacgcaagagaagaaacaggacgactaggcaaggatcgatgagcgagagagtagagtagtgcagagtgagagaaaagtaggagcatatgaggaaggggacggacagtaagatggggagagagcggaaggcggaagatcagacgacggagacgggagaagagggtcacgaaggagcagaaaagaagaagcgaggcacaggacgcgaagatgcagcgatgagaaaaaacggagcaagcgagaggggagggaagcaggaagagacagagatgggaaggagaacggggagaggagacgagagggggacgaagaaggagaaagagcagagaggaagcgacgaacaggcaggagatgacgaggga

SEQ ID NO: 130079 - DNA, 682 bp, Arabidopsis thaliana columbia
  unsure (1)..(682): unsure at all n locations
nnnnnnnnnnnnnnnnnnnnnnnnnnnnnnnnnnnnnnnnnnnnnnnnnnnnnnnnnnnnnnnnnnncttttttttttttttttgtttttatagaaaactttcattgtaaaacaacgtaccacacagctcagttgacccagtcttagaaaccaaagagacactgtaagtttgcttcacacaaccttgaaacaaaagcttaactgaaactggttcatctccttatgccttcttgcaaacgaatcattagttttgcttctcataaacctcggttgcatttttgcggttggtcacttgccatacattctttagaaacggacgcctgacattattgtactgcaagtagctggcgagctcccaaacatatatacccaccagaggtaccgcgctttctccttaaggcactaaaggaagctgattggcccaggtgttaggctctagctacatcagttttttgtctagaatgatccacacccatactgagccttgcactgcaggaccctcagtactcaattttcccaccaaaccttcctgggagcctaagtgagcgtctctggcgctaccaacagaagcttttggtggctctccaccaccttcactggaaggagcatgggtcttccagtaggattaatggttgacatgaccttccccggggaaattgatggcgctgagcaactaaacaac

SEQ ID NO: 130080 - DNA, 701 bp, Arabidopsis thaliana columbia
  unsure (1)..(701): unsure at all n locations
ttgaaagctgtaattccgttcnnnnnnnnnnnnnnnnnnnnnnnnnnnnnnnnnnnnnnnnnnnnnnnnnnnnnnnnnnnnnnnnnnncttttttttttttttttttttaatatacttctttgtgctatcttattaaatgtaaaccaagaacgcagttttattctccaattgtgttcataaaacaacaaaagaacagaatcacaaatttagttaggcgatgcgagtaacaacagcatgtatagcatcagcgagttgaggcactgtcgtcgaacttagacttgccatgcttatcctcccatcataagtcatgtaaatgtgatattctttggccatcaagcgaacttgctcctcactcaatccggtaaaagtaaacatcccaatatgtttaataatgtgactccaatcaccaggtgttcctctagcttctagagctgcatataactgttgacgcatgctaattatgcggtcagccattcctttcagctcaatggtccagtcattgtacatatcactgttttttagaattgtggcaacaatagatgcaccatgaataggtggtgtaagatacataggcctcacaacaagtagcacttggttctcaactttcttagcgacatcttctgatgtgcatacgatcgtaagagagccaatacgctcgccataaaggcccatatttttggcataactttgagctatcaac

SEQ ID NO: 130081 - DNA, 686 bp, Arabidopsis thaliana columbia
  unsure (1)..(686): unsure at all n locations
aattccnnnnnnnnnnnnnnnnnnnnnnnnnnnnnnnnnnnnnnnnnnnnnnnnnnnnnnnnnnnnnnnnnnnnnncttttttttttttttttttttttttttttttttttttttttttttttttttttttttttttttttttttggggccccaaaaacaagtcctttaaaagcttggaaaaaaaaaaagctccccaagggcatttatacattacatttttcaaattttaaaaaaagggtttttaaaaaagcccccaggtttttaaattaaaaacctttttttgccataatttatttaggggcccaagcaaaaaaaaaaaaaaaccccccccctttgttttttttttttaaccaaccggggaaaaattttcctgctcctccaaggaaagagttggggggccccttcccccatttaaccccgggacgtttcctttagggttaacgtccaaaattaccgggttttcttttttgattttttttgaaaggattttttttgccatacttttctttaaaagccctatgaggggttttttaaaagggtttgttcccggacccgggggtcaacccgggaatttcggaccgggaccttggggggtacccattttccctttagggaggcgttttaaaacttgggggaaacatgggcaaaggtgtttcctgggggaaatatgtttccccccccaatt

SEQ ID NO: 130082 - DNA, 406 bp, Arabidopsis thaliana columbia
aaaaacccgagagagttaatgcgtcaaccaagtatttgcaataaagacagacaggtatgatatgacctgaatatccatctggtgttacttctgataaccggagaactgagttcaacattttatcaggcactacgaaggcgtgccctcatgattctggactaactgctgtggttaaagcggcttatacggattggaaccccgagacgaaaagaatagcattgatgaacacggcgtacactggtggaaaaaggggggagcccctcatggaagaacaccacaggcagaccctagaccgaaaccagatagggaccaggggcaagggaaaaaccaagccagcgtgaacgaaagtaccgggacgctaagcaaataagggagaaattaacggtttatccataggaagccacgg

SEQ ID NO: 130083 - DNA, 664 bp, Arabidopsis thaliana columbia
  unsure (1)..(664): unsure at all n locations
nnnnnnnnnnnnnnnnnnnnnnnnnnnnnnnnnnnnnnnnnnnnnnnnnnnnnnnnnnnnnnnnnnnnctttttttttttttttttaaagaaagctttatattattgatatgagattttgagttcaagaaaaacattgtcggaaacacattctccatcattatggcttttgagagaaatatatggtgtgaatttaacaaaacccaacttatcaaatatggggctcccccttttaaacaggggtatatagccctaattttaaatgactaacaggaagatgctcaaacggattttctatgagacccataaacacgggagccaccacctcaccattctttggtagggccttctgaagactgtccactaaatttaattaggatggggttgaacaaaacgggctggtccctctataaaattctttgactggattaaacgacatggacttctctgaaacccacgctaactactctagtggagaaatcttccgtatttgatataacacaagaggtgcaccaacgttacccccgcctggctggtgcaactggggacaagggcctccaccttggggaccaagaaaatcacgggttggatcattttgtttgtgcagccgaggccgccaccaatgcattcaaccacccttggagatggtactgtcttacccggac

SEQ ID NO: 130084 - DNA, 368 bp, Arabidopsis thaliana columbia
aattcccgtgtcgacccacgcgtccgcgtgacggcagactcccaaagagagaaccccgccagacaaggcttacttttccacaacggatggacccatctcgaactggagatgggccggctcgggagcacgtcggtctcgtgcaaagatcaaccatacctacggcgattgcaacaactgatcgactgtgcaccgctgcgaggattatatgcagacacatagagcgtgacgaccacttgactaactaccctggatggataccgaccatacttgtgaggggggctggtggtactgtggctctgatgaatatctgtatggatatggatgacgtgggtcgccagctatatgacgtgggtatttattgtttggag

SEQ ID NO: 130085 - DNA, 1242 bp, Arabidopsis thaliana columbia
gaggagccaattttttttttttttgtggaagccttgaatatagattcatatgtaggaagcattggtgggggtggggtaaaaccgtggtgagagaaataggaagagggtgataaggaggggaggagttatggtaatgaaaagagggagggtaagggatatatggattgattggagtgaaaagaggtaatacgtagggtgggtaggtgagagatattggaaaatgggagggggaggaaaataagaggaagggaatgaggtagtaacgaaactgtgaaagggtaggggatgtgtgggaaaagatgcttgatagacgagatgggttgtaagattgatgagtaagaaggagtaatatgaaggggagatagttgtggatacaggagcgagaaataagcatgatactagaagagagagaatggttgtagtatagatgtgtaagcatgtaggtggggtgataggatgaagatagagtgagatagagacgtgaatacatctgagataagactatttataggacgaatgttagtgtgataatgcgagacgcgaatggagagctgtctgagagtgtcgtagtgatgtatggttatccgtatagtgtgcggcgtaaggcagagtagagatattatttagagagagaagacagtttagatgtgttcatgtgattatgttatgagaaatagacgtatatgtaggtgtgaggagagaagagagagtatatgatggaaagtgaacgaggtatgtagtgagatatagatggatatctgaagtgcaatggtaagtaatattagtatgatcgtttgtgataggatgagtagaggagtgagctgacatttaagcagtgaacatgcgaagagagtagtgagtaatggcataagggatgtttatgtgacggagagagaggatatgacgatcaataagctatttagtggattggagaatatgagagaggatatgtgcacgaaagaagaggaatgaggaacgaagaggtagagagaagtaagagcaagtgtaaggaaatgaaagatgagtagttagacgtgagagttatatgatgtgataagaggagggactatgacagtaggtgaggggcattattcgagtgaatagcgtgtcttatgagaaaggagagaagattgagtataatgtatagaataagatatagagcaagacagaactagatggttgaaatgttagaataggaacatatatatacagaggagtgagtgtgtacgagtggctttgtag

SEQ ID NO: 130086 - DNA, 289 bp, Arabidopsis thaliana columbia
tagtaactcagcgggccgaggactgggcctatcggttcttatggcggggggcgacgcaaggtaatacgaagggcatgaataaggtaagccgtgctattggactagttactcaaaatgggatggaactgtgagggacgaacagcgggcgtcggagctttaagaggagggaccgaggcgggagagagggccatattcgccctgccgtcgggcaaagacagaggtagtgggatgttggtgcgagggcagcgtccaacccaagccagcaggggctgaggagtccaggaggggc

SEQ ID NO: 130087 - DNA, 299 bp, Arabidopsis thaliana columbia
ttggggaaaaaaacggcccaccggcaaagaacggacaacacacgaaagaaacggaacagaggcgaagcgcaccttttattttttcagaaaaccaacaacgcaacacaacaacacaaaggaggggggggggcgaacgaagcaacaaagcacacgacgcccccacgcgaagaaaaccaacaaaagcgcaaccggcagacacgagcgacaacgccgcgcaacaggaagacaaagcgcgacaacaacacagcgcggaaagaaaaaccgcgaccggacaggaagacgaggcgagaggaccacca

SEQ ID NO: 130088 - DNA, 645 bp, Arabidopsis thaliana columbia
  unsure (1)..(645): unsure at all n locations
gttcagggacagacccacccggnccgaagacaaanaaaacggccggcaggcccggaacgggacgaagggtttagtttctcaaccccgccaggaaaagaaccaacgaaggacggggggaggacaaccagcggcgagcggaacaacacaagcagcccccaaagaacacaaacgagagcagcaacaaacgagcaggccgagaagagcagaaaatcgaacaccgcgcgaaaggaaaggacggaagaccaacaagcccgagacgcccagagcgccacgaaaacgaccgcgcccaaaggacgcgagaaagacacgacgcacaaccagacagaaccacaagaccgcgagacggccgacaccccggaagaaagaaacaggggcccggagccaagaacaaaggaagggaagcaaagggggaaccaggaacgcaccaaaaggaaaaaaacggcaacccgagggaaccccgaaaggacgaaagcaaccgaaggacacaccccgggagacgagcccccaccaggaaaggccggcaaccgccggggagacaccggaagggaggacaccggggccagaaccgcgggcaaccaagggacccgaaacgtcaaaccccaggagagaaaaggcccggagaaacaccacacactgaaggacgcc

SEQ ID NO: 130089 - DNA, 666 bp, Arabidopsis thaliana columbia
  unsure (1)..(666): unsure at all n locations
gttcnnnnnnnnnnnnnnnnnnnnnnnnnnnnnnnnnnnnnnnnnnnnnnnnnnnnnnnnnnnnnnnnnnctttntttttttttttttttttttttttttttttttaaaaaacccaattttcgcccttggaggaatatgggggaagaccaaatgttttttccacaaaatttttgttccgggcggcttttaaatttttaatgtttccccagtacctttcacactttgggctgttactgaagctggactatcaaccttggttgttttaaacagttggtttacaatttaaaacagggttggatgggcttgaacagcaggttttatgtcctgaatacgggttcctaaagcaatcgggttggaggcttcagggataaaaccagcagcttgcattccaaatttttgaactccagggttttcccctttgccaggtttgtttataattttagggagtccttttccttctttttcggttagggcctttgggtttgccttgaaactggttttggcaatacttactttgaatccctttttttcagttttttttttcgttgggggttttgtcaatccaaccatccttatttcaggatgagtaaaccaagccgttgggatgttaaaatgattaagcacatgatctttacctggaacttgctccccccaagaaattcctt

SEQ ID NO: 130090 - DNA, 309 bp, Arabidopsis thaliana columbia
cgtttcgacccacgcgtccgggtcaaccgcttcaagtggtgggagctacacggcgagaaccatttttttttttcgtcatctgctccaaacgtgacatctggtgtggatgtcacatgccaagatggcaccggcaaaatcctggaaggtgacgacacgtaaaacgtggctcaagctctcaaggatcacagtgctttaatcaaggctgaagggatacagcggatctgggcgagtcacccaacgaaattattactttatactctgtgcactgatgtttagcgcttacttctccacttcaggaagttatcccga

SEQ ID NO: 130091 - DNA, 663 bp, Arabidopsis thaliana columbia
cggaatttcgggtcgacccacgcgtccgacgggtgctaaaggcgactgcctgactcaacttgaagccagttttgtttgtgttggtgtaaaccaggctggaggcaacctttacgatccgattaaggacgatgacatgctaggcaaacctgcttatgaacacctcaatgagccactccacatttaaggcgcggccgaattactcttcggaaatgcggctcacatcttatgcaggcccacgaaatactcgccgaaactacttgcttccgcggaagatacctatgattgctacaaaacacaacgactccagtaatagtaccttgataacgactcatgctgataagatagatctaccatggctgcttccatcttatcttgcaagagcctcgacgtgaatagagctaacacagggggctgataacacgactagattcatgattgttgattgtctctgtcacctttgcaccaaggtgtatgtccaccgggacaggtcccttcgcacaagaacgagttggactatctgagtccattgcattaatggtgttcctcaggctacgggtactgactctaatgcctggaatataatgtcattacgaacacggtcgaagatgagtctgtgactggtgttatttataatgtcccggtatagaggttaggacaacacaa

SEQ ID NO: 130092 - DNA, 704 bp, Arabidopsis thaliana columbia
  unsure (1)..(704): unsure at all n locations
nnnnnnnnnnnnnnnnnnnnnnnnnnnnnnnnnnnnnnnnnnnnnnnnnnnnnnnnnnnnnnnnnctttnttttttttttttttttttttttctttttttttttttttttgtttttttttttttttttttttttttttttttttttttttttttttttggggggcccacctggggggggggggggccttaaatatatccccggagggggggcggaaaagggcccccgcaaaaaaaaattttttttttttaaaaaaaaaaaaagggggttttgggggaaaaaaaaaaaccaaccgatcacccttttaaaaaaaaccactctggggaaccccccaaattaaaaagagcccgtttttgggtttttgcttcccaaaaaacccccctggggggcccccaaaaaaaagtggggttttctttgaaaaaaagggggccctttttcggaaaaaaaaaggtggttttgttttttccccaaaaaccttaaaaaagccctttttaggggtgggggccccccaaaaccgcgaacaaaaaagagggttaaaaccacctttatgttttccggagagactaaaaaaaaattatggtgggggccccaacaattttttttggggggaaaaaaaaaaaacatctggaggtctattattcctggcggtgggggaaaaaacaaaacaaagcgggggggcagaagaagaactttttctttctctcc

SEQ ID NO: 130093 - DNA, 636 bp, Arabidopsis thaliana columbia
caacgacgctagaaagggaagagacctgaaccatttttttttttctatacagcacgagaccgatacactgggtcacaatcgcagtaaaagatgggccgcaaaggacatattcgggggaaacaacgacgaggagagagaaagggaagacacaggcaaagaaatgtccgagaacgtgaactcaagggtggagaagacgtatgagacgcacggagagaagctcgttaggctacaggtcaaaaaggagaacataatggccaacgacgaaactaacgagaaagggaaaaggaactggatcgagcacaaagagaaaagggacgggaaccagagagaagcaaggaaagaaggcaaagggctcaggacatgatctagagagacgcgaagaaaaaagatctcacgaagagtatgacttacagggacgaccgagcagttcctaggagtggagaacgcagaaagaaaggagctacggcggaagataggaactatggcctatgggcaagagattgggggaagaacacgggaagagatggatagagtttgaacaagaaggtgacaggaaactggacaagagttgccaaaacaaagcacctaatagaacaggggccaccaagccgaaaaggaatagaaatgtaaaccagg

SEQ ID NO: 130094 - DNA, 398 bp, Arabidopsis thaliana columbia
gacgcgcacggcacgcggagagcagggaagccggcggagaagaccgcacgcccccgagcggcacggccgacgcgcccgacgacacaggagaacccgaggcgccgcgagcacacacgccgaaacagggacccggcccacgggcacaaacgaagagacgcagaagggcgagagggcgacgaaccaagacgagcgacagaccacgaaaaagcgcccaaccggcaccggcgagcaggaaacaggaggccaaacaagcccgagagacgaacgacgaaggcggagagaagacaacagaacacccaccgcgcgccgccgcccacggcccacgcgaacccgagcaccacgggcgacggcagggagcgcaagcgacccaacccacccggaggcggcccccgacggca

SEQ ID NO: 130095 - DNA, 662 bp, Arabidopsis thaliana columbia
aaacaaccacgggaggggggcgcgaaggaaccacccggacccaccacacaacagcgcaggggaccgggcggcgcgaggaaagcggcgaggacgggaagaaacccagacggggcggccacagcgcaccggggcggagacccccagaccaagggaaggccgaaaggaagcaaaacgcgaacacaacgggcgcgaaacaagccgcccacggaacaacgagcccgaaaggcaagagaggcaaaccccaaacaagaaaacacgcgaggcgaccgccgcgaaaacgcagccaacgggggggggggagccgccgcagaggagccgacgcgcggaggacacgacgagaaccggaacccgcgctcggacaaggcacgacccacaaagggcggagcaagggcagacgcgccacccgcagcccccacgacgacccccccccccaggaccccaaacgaaaagccacgaagaaagaacagacacggcgcggacaaccagcgcggaacaggccggggaggagaaggaggcgcgcaggcaacaccaagggcggcaacggggcgacgcgccaacccgcgccccgggacgcaccaaacgggcacaacagcgcacacggcaggacgcggagccaccggaacggaaccagcgacagacccgcccagcaccaccgccacgcc

SEQ ID NO: 130096 - DNA, 1156 bp, Arabidopsis thaliana columbia
gaaaaaaaccccggaaagatttgggagagaaaagagcacattaaggtcgctacagccttgagcgtcgagcgacgagggttttttaaccctttttgaaagcacggagggacaccttgggaaactggggagatacaagcgagaaatggaaatactctcaacaaataaaaggaatgaccaaactcttattgagatgcaaagaatgtgacttccgtagtaaacagcatgattgctcgctcacatatcgtatgcgaccagatcattatacagcaagctaatgaacgtgcatgttatacggatcaatcagatacacaagtggtatacaatcatccctaacaagaagatattcgtaacaggacataaataacaagtataaacaatgtatcactaactgattgcgtatttcaagcggcggagtgcatggatatacgaatatgatagatagcagctcgaactatacgcacataagcaacttatactcgcgaaacataagataaccagcgctaagcagggaacgacatctccggcgagacatgagtagacaacagactgttgaagtgagggtagtgacagacgaactgaacgacgcaacagccaccggacgtgcacagggctaatacagtgtatcgatcaagtaacagaagagcatcagaatggaggacggcactacgtgtgtaatctgctgtcaccaagcctccgtcgagcatatgacagctcaactgagcagagatgcgattaaatctaatatttgagatacagggtatcgagatagttcgtatattatggtagagaataagaataatgagcataacagaagtcagacacattgtactgggacaaccacctgcctcatagccgctgacgaattgtaaaaaggacgatacaaaagaggcggacactagagactcaattgtaatagagtcttggaagaaagctgcgtaccatgcaacagggggaatccaaacaccacagggctatttctcattgaggcgaaaataatattgcaagcgacatcatcccatgtccggctcattaaatagtagatcttgtcaccaacaaatgtgtacaacaaacgcaatcaagaagcctgacacgataggtagatgcagcggagatttgaggatactacgatgcggtacgagacgataaacttccgagc

SEQ ID NO: 130097 - DNA, 677 bp, Arabidopsis thaliana columbia
tgcacgcgtccgtcacctggcatcctctagagcggccgccctttttttttttttttatgttcaaagagttttttctttactcttgctcaatcttacattaaaggtaaaagaggtatttgagtcgagcacgcttatagacatagagctaaggacacgaagaaataaagggtttgggtttctaaataattgcttagacgacatcatatataaaaaaaaaagggaatcgggggggattattcttgaaaaggtccggttcactattcagaggactcggagctgagcaagagaagcagcacacagatccaacaacaagacctgaggacctctgtctctgtgccaatccagtagatacttgcctgcccgagttttatacaactgaattttaaacttgacagcattgggcgacttaacagctggtttggtctctatgatgctggactccaatccaaaggagttgttatcgggcctcgggttactgagcataccatctggcctgctgttaggaacccatgtggacttattgttgtacgtgccctatcttttttcgggcatatcttaaaaaactttggggggcttttcaaggaatttcccccacttaatttgcatcggggggatgaaacccccccacactttgaaaggacccccagggaagcccccaattttgtggttctttaaaa

SEQ ID NO: 130098 - DNA, 763 bp, Arabidopsis thaliana columbia
acactatagacgagctatgacgtcgcatgcccccgtccgtaagctgggatcctctaaagcggccgccctttttttttttttttatgtccaaagggtcttttttttactcttgctcagtcttacatttaagctaaaagaggtatttgagtagagcacgcatatagaaatagaaagaaagagaagaagaaaaaaagggttacgttttctaaataatttcttacacgaataagaaaaaaaaaaaaaaaggaataaggggggattattcttgaagaggtccggtttagtattcagaggactcggagctgagcaagaaaagcagcacacagatccaagaacaagaactgaggaccttgtactctctgcaaatccagtagatacttgtcgtcccgagttttatacaactgaatttcaaacttgacaacattgggcgacttaacagctgcttcgttctctattatgctggactcgtctccaaagtagttgctatcgagcatcgagttactgagcataccctttgccctgttgttaagaaccccatctgcacttcatgtttgagggccctaatttttttccaacatacaatttaaaattttggaggggttttcacgacttttcggtcaatattttcaccggggaatgagcccccggaacttgaaggtcccaaagaacccccattttttttttttaaacacgggggttttttggaaaaacttttaaaggccccacacttccctttggggataattttccaattacaaatacc

SEQ ID NO: 130099 - DNA, 552 bp, Arabidopsis thaliana columbia
  unsure (1)..(552): unsure at all n locations
nnnnnnnnnnnnnnnnnnnnnnnnnnnnnnnnnnnnnnnnnnnnnnnnnnnnnnnnnnnnnnnnnnnnnnctttttttttttttttactacaaaaaatctattttttgccttcaaattattccaaaaatctatcagagaaatggtacaaacacaggaaatgcaaccttatatggctacaggtaccaccagaataacatataacaggcgtaaacgctgcaacaacaggtctattcaatggcgggataaccattctgtggcatggagcgctcaaatggcacggtagtgttgattttcttggttccttctgctgtccaaagaacccagactttggttatacgaggaggaataccatctccaattggagcgataaatgccggcttcccatcatcgagtacagagccgatcaaaccatattcttttcccttccatggattcaagaagttatctcgggtctgagtcaattttgcaaactcttgatatcatggcttccccaacggatttttagaggaaagaatttctcgttaaaccatttaaatacctttggcggggga

SEQ ID NO: 130100 - DNA, 762 bp, Arabidopsis thaliana columbia
  unsure (1)..(762): unsure at all n locations
nnnnnnnnnnnnnnnnnnnnnnnnnnnnnnnnnnnnnnnnnnnnnnnnnnnnnnnnnnnnnnnnnnnnnnctttttttttttttttttttttaaaggacatttatttaataatatttccgtttgtttcaaacaaccaaagcacccctccattaaatattttacacacaacgtggcacaaaaacaccgcgaatgcgtgccaattttcaaataaaaaatgaaattaggccgaacttttccccaaccctgacacataaaaaaagactcatcctttgctttcttaaaaatctacgatctcaaaaccaacattgttgaaaaaacccaccaaaacattcccttcgataaatccgggagaaccaccccccatgggtggtcccacccatgccaccctacgcccacagaattcttcggagagctacatcttgaccaaagaaacttccttgaatgatttttccccccgaaaagggcccgcttgttaaattttttacaccaaccataagaccaactgtgggaggagtcttggcttcgaaacaaccctttttgtattcaggggagggggcaatatcagggatcccccaaaggaggggggtgaaaaaaaaccctacatctttttgtttataaaccctttccacaaccggaaatggtttggggtgtggaaaccctccatattgcacaccggctttttgtttttttttaggggaagggttaatacaacagcccccttggggggcgttctccccacaaaaaatacccacgttttttta

SEQ ID NO: 130101 - DNA, 784 bp, Arabidopsis thaliana columbia
  unsure (1)..(784): unsure at all n locations
agaaaaccgtcnnnnnnnnnnnnnnnnnnnnnnnnnnnnnnnnnnnnnnnnnnnnnnnnnnnnnnnnnnnnnnnnnnnnctttttttttttttttttttttattcttttttttttttatttttttttttttttttggggccaaaaggggacgttttttattcaacccttagcgattaacgggggtctcatccaaaagactaaaagggggaaacaaaaccccgggaacctttctaaaaaaaaaaaaaaaaccgggctccccgttaaagaaaccccggccctggcccggattaaaaatgggaaacccgatttggggggggagattttctcccaacacccaaaaaacatgtaaaacccccgaaatacaaaaatctgtgaacaaaacaccccggggggaaattttacccccgggggcctcatttggggaaaacctcaacagggggcttgatccgttcccaacaccaaaaacccgccgccggggaatcccccaccccctcccacaaagcttggggaaacaattgcccggaaaatgcgggggggaacccaaaagagggggcaacaccggcccgggggggtaaaaaaaacccggggaggtttatttttggcattggaaaaaaccccctctccccactttgtcaccccgcaaacaggggtttaaaacccgcaccctcgggggctccccccccgcgggaatattctcgccgccccgggtaccccctggagcggggagaaaaacccagcatctttctctctatattttgaggggagggtcatcacaattaaaac

SEQ ID NO: 130102 - DNA, 682 bp, Arabidopsis thaliana columbia
  unsure (1)..(682): unsure at all n locations
nnnnnnnnnnnnnnnnnnnnnnnnnnnnnnnnnnnnnnnnnnnnnnnnnnnnnnnnnnnnnnnnnnnctttttttttttttttttttttaaaggacatcgagtcaagaataataccggatgatacagccatatgatgttacttctgaattacttatgtcacacagaacattacacggacacagtgttaatgtatatgatattgaatctgtcaactgtttttagacctaacttctccacaagtattacacagaaaaagagccgaaccaagaccgttcagcacctctaggctctgagaacctggaaagaagatgacaagatcctgaagagaccatccgggttatccgtgtgaacccaatgaccggcatcttccaagacatgcatttctacaccaccgccttcttcagaggctagctcttcagcggggtggattcgctgaaggtcttctagggcccaacggtgcaagctttttttcgctttcagaaaaatcacatgtactccttcttggaagatttcttaacaaagctccatagattttgtctcttccaaagaactgggtaaagtttcaagcgaatccccgttctagggttcaaaatggtcccaccgaagaaagcctagaaaagccttgatggggtccccaagtaaggggtcctgggagaatttggggttaaattgaagaccccc

SEQ ID NO: 130103 - DNA, 884 bp, Arabidopsis thaliana columbia
cgtcgcatgcacgcgttacgttaagcttgggatcctcttaaaacgtgccgcccttttttttttaaccccattttttacaactttttctcaactccactctctaatagcgtgaaaattattaaaatatttattaaggcaattatatctcttcatctccctactacctcagatatttctttccttctatattcccattttttcttatttcctctctctaacctctatatattttataaaattcctattttgtatttatttaaattttcttatattcaatgttttagttaattctctcaatctactttcttgttaacttctatattgacagcatttatgattatattctgtttactatattccattacaagtttacatgatatgtgattgactctctttaatcttttttctcttcttttatactcctgattccacatacaacttcattccttccctctttcagtatatatcacgttttttatgagagttatcaagtatacatgacacctcatcaaagtggattacgattaagtgatgattatacttatccttgacactaccgtttcgctaaatgatgatatgatcacatttcgtccttctactttccttctctctcatatatttgtcaaacattattagaattctcgtcattctacgatacttgttcaactctacccatgtataccctgtctaatttctctctcattctgatgcttgaccattattatattcccctcctacttctcacattaccacgtgatatctattatctgatacttacgatcttactctttatactccttactattaccttaaaatttcatgtgctattattaattgtttttactaagtctccatagtttagacatcaatcactatgtctcaca

SEQ ID NO: 130104 - DNA, 700 bp, Arabidopsis thaliana columbia
ggccttgcacgcacgcggccataagcttggatcctctagagcggccgccctttctttttttttttgcttttaacaagcgctcaaaaacacacaaggggacttttaccatccatttgccggcaaccaatcacatctatcattcctacaaaaacatggacaaaccccatcaataatccttggatgaacccaagccccattaattgccgtctgtgaagccagcgccaatcacatcaccgccgctgacaccaccttcggctgaggatgatgtgccaaaccaacaggaagctcaacctccagggggaaaaccagccctccctgattggggttggcagaacacagactggccactttgcatacttcttgggtaatacctgcgatggccgctacgaaccaccacgtagatccgaagcgctatgtactcctccagctctcggaacttacgcccgaacattcgcctctaactgcgacctggaatttcctcaaccgaccctccaagctggctcgtcgccctgaaaactgccgggagccggcactggtccttttggtgccaaccccctcacaatccactgttctcattgggagatcccgcgcggggcaagacgcctctctccggcgttattttagaaccacaccactatggggatggtgtctaaacgccatcatttactccatatttaggatcaagagcggtcgcacctca

SEQ ID NO: 130105 - DNA, 778 bp, Arabidopsis thaliana columbia
ctatagaccagctatcacgtcgcatgcacgcgtacgtaagcttggatcctctagagcggccgccctttttttttttttttgttttaaacatgtgttttaaaacaaaaaggagatttcttattaaaattgacccaggaaaggtaaatatgatcagcaccaccaaacttttccgctacctagcaaacaaaaatgactcaacaagaagcaattaaattttaagactcaatagaaagaagaaatgactgccctgacgatgacaaatgctaaagatacagaaagacgggacgcatcagaactcctcggggactaaactggggttgccggatttgcaccactggacaacgcgggtgctactgctccggccgtaggagataaaccaggggcagaatcgggaggatttccaaaaacagaagggccacaacgagcagaaggaggagcttcaactttacaaacaaaaggaaaaaaagcatcttttaaaggatcaggagtttacccaagagaaccccttgtcttgaaagcctgacatagacattatggtcctggcctaaccacaggcttaagcccttaacaacaatgttccttccgggttggcaactgggccaccgctagtccaacacacgaaacaaaccgcccatgttttagtattaaaccaagaagcaggcccattggttgcattgagcttttttttccccgggaaatttaatgggccaaccacccccggggaccccccttgggggttcaacccccggggaaattttccggggcccggggtacccct

SEQ ID NO: 130106 - DNA, 886 bp, Arabidopsis thaliana columbia
  unsure (1)..(886): unsure at all n locations
cacttcaatcggcaaggacctcgcatgcactcgtcctgacgcttgcatcctctagagtgctctacagcggccgccctttattttttttattgaatttacagaaccttctcggtatgagaagggataccttctttacctatcgccagggaaaggagatatagtcacaatcacggatatttgtgttatctcggcgaaaacggtgtcaccctataataccacgcaacatgcaagccggaaccataaagtgacaagcctgcggtgcctaatgagagcgctcacgtacatgaattgcggagcactcacagcccgtttggcagtcgagaaagctgcctggccaggtccattagtgaatctggcatcgcgctgggaggaggaggcctgcgtatagcgcgccagggtggtgattattttcaccagggaaacggccaacaccatgagtgccgcttagccactgctcatgagagaattgaagaaaccggtctcctcttgtttgccccaggaagcccaaaaaaactgtttggttcgggaaatcactgtccgaaaaactctataaggaaacttggccttttgggtagtacggtctgtgaaatctcccacctaaacccggaaaaattgtttctcctttaacccccagattggttggtcacaagcaccgggggtactctccgcgcgttaaattggggcccacccgacaaatattggcggatctcccgaaacgtccccccttacttggtttaacgtgtttgggaaaacccccagggccgccttganccccaaaggggaatacccaatgacaccttttctttttggaaatttcagcaaaggggtttggtaaaaaaaagccctgcccattgggaactacccaacgaggaatttcccgggacgg

SEQ ID NO: 130107 - DNA, 767 bp, Arabidopsis thaliana columbia
gcactatcgtacagctatgacgtcgcatgcacgcgtacgtaagcttggatcctctagagcggccgcccttttttttttttttttttttttaacgggaaaaaggaaacctttctttctctgataacggatcagcctgagtacggaacacacaggccaaaacagaagatgtgaggggcacaatactaaacacaagcggttagagtatggaggatcttcctgtttacgagggttgtgtctgaacaaacattagtgcagctcctgatttttctggattacatacaaaccaaaggacgtttaagccagcaacattgtccagtataacacccgaggttgttgatgatgaggatttccccttctggtcattgcgcagaactctacctagttgattctaccatcgctctcggagtcgacatctgacaaaacctggccgattgttgcatcatggcccattccatatgcctttaagggggataccagttcgtctattgcaatgtatccgctgcttgttttgaggaaaagctggagagctttgggctgattctcattactttcaagcctgtgcctaagcattgcggatgcaatgaactctctgtgatttatggaccggttcccgtgagcagtcaccggtttccctgagctgagtccacttgtggcctttggggagtttaaaaagcccaaatgcggggttaaccggcttcgatacaaggttctttccataaaccgaaatggcggccacctggttgaccaagcccctctaatggttaaaa

SEQ ID NO: 130108 - DNA, 632 bp, Arabidopsis thaliana columbia
gacactatcgtatcagctatgacctcgcctggaccccgaccgtagcctggaatcctttaaagcggccgccctttttttttttttttttttttttttattaaccaaaaggctttctttactccaatttggacaccgtggaattttcaaaggcaaacctgaaataaattaaacggcttccaaaacaggggggttttgtgtaacaagccattgaagaccttcccttaagccataatggcctggtaatcctgtatgatctcctagggattcttcaaacacagggggtttgtgacactatacacgggggataaagtgacattcaaacttgcctcatcgatctttttgacaaccttccaaggtgctgtttcgatctctattgctatctccctttgggcggacataatatttgccgggacctgtcgaacacgagacttcagatttccccttatagggacggacatttttggaaaacttgtggaccccctggggagcttctcgccccggaggaggaggaacttctgcctgccctaagaggccccactttcccaaacgaaaataggaagcgcctatctggtcattcaagggaactccgccctggttaaaagggacctttggccaaatggaccccccctgaa

SEQ ID NO: 130109 - DNA, 618 bp, Arabidopsis thaliana columbia
caactgcaggccgggccgcgaacgcactagggcggacgggacaaaatttggtttcaagggcacacgagggcaggggagaggaagcacagaccaccacactggagaggccaaaacagacgcgcgagagacaaagcaaaaaggagcccaagaagccaagaccgcaaggcagcaacacaagcgcaaaaagcccaacccacatggcaccaacgcgaggaacgccgtcccagcaccgggcaaaccgatgagcaacaccaccgcaaggaacaccaagccaaagacaccgacccacgcaacaagaaacagcgaaaaacgcaaaagcaaggaagggaacccaaacacaagacaaaggcaccgcagtaaccagaagaaagcagcaaacgacggacaaaaggaggcgggcgaaagaaaaatcggagacacacaggcagacaccacaggaacagcacacgggaacaaaacgaaaacgacagaaacgacaggcagagaaagaacccggaggccaaaagcgaggacacaaggcacaaaacccaaaaggaaccagcaaaccagaaaccaaatacagacatccacacacgcaaggacgaaacgaaaccccaacaatagaacaaccagccagaa

SEQ ID NO: 130110 - DNA, 799 bp, Arabidopsis thaliana columbia
  unsure (1)..(799): unsure at all n locations
nnnnnnnnnnnnnnnnnnnnnnnnnnnnnnnnnnnnnnnnnnnnnnnnnnnnnnnnnnnnnnnnnnnnncttttttttttttttttttacaaaaaatgtttttcactcataaaggagatgccttattatacaaaccacagtctacacagccacattctcagaagtatttacccacaaaggtttacttatgttttccttgaggcccacaacgacgtcaacaagggctccgcctaaagaagaggaggggatcttcgggattccacccacagacacgagcggttagttggattggcagatacacgctttggaggaaaagttttaaggtttccgacgacaacaagagccataggagctacatatgccggggaagagaattcctccccgaatatatgtaccttagcttctttagccgcttcacgcgatgctacacggatgaatcgattggatataagagaaatcgattgggataaacccatgtttggtttagccccacctttttgcgaaactaattggagctccctagatttaacagttctggggcatctgaacttccggccggaagagtcttaatttttgcaactctagttaccagactgcgagagtctttgtaaaccaaacatatccaaggggaggagcctgataaaaaaaacaccccctcaaacctagccgaaccttttttaataaacactttccccccaaagcaggaataaaccccaagggaaaactttctttggaagacaaacggggtgaaggaaaatccgtaccggtaatttaccgcgcggggggagaaaacccccac

SEQ ID NO: 130111 - DNA, 973 bp, Arabidopsis thaliana columbia
  unsure (1)..(973): unsure at all n locations
ttagtgcacactatagtaangactatnacgtcgcatgcacgcgtacgtaagcttggatcctctagacggccgccctttttttttttttttnttttttnnccattttcctcttttcttttcccctctgtctctcccctctcatcaacttcccccactcttctttaaatcacctaaccctctcatcaaaccactctactccctctccaccctatttccttcattaatttacaacacctaccctctatgccaaaccatacttcttctggtgcaacctatctcccccctccaaataccttcacgacagtattacacatcaatagtcatctcatccctgtcaattatacacctatatctgtctctctttagcctccctttcatctattctaaagccttctgcctactatttctttagatgtttcgatctcattccatgatacattggctttctttactctcaattggttcatctcgcatcattcccaacatacaatcctgagactgcatcatccctgaatcacatacctccttcctgatatcccatcattcttaacatttcacctcttcatatctgtctccaaaacatacagaacctccatctacttcctctatatgctctctatataacacactcatcacccctatccactcatccccgccatttcaatctctacttacttatcctattctgaccttatcatatacctaacctccccattatactttacctcccatacttacctaaattttgttctatccacatttcatgatcacacccttcgaccatcacccatctcacatacccattatggttacgtccgacatacgatactacaccacctcatattttacatacttcactattcctactatccgaatttcatcctccgtacacttagcactcttgccagtcatcgtatttctccttcctctattatcctcacatacctttctccatgtctcccaaccctcctta

SEQ ID NO: 130112 - DNA, 750 bp, Arabidopsis thaliana columbia
  unsure (1)..(750): unsure at all n locations
gatttcnnnnnnnnnnnnnnnnnnnnnnnnnnnnnnnnnnnnnnnnnnnnnnnnnnnnnnnnnnnnnnnnnnnnnnncttttttttttttttttttttgacatttgatggataaatttaagtacacaatgtgtatgtaagacaagaaaataataataattggacatttctgtaaaggcacaagcctctgcgcacttgagcggcacttaagaagaaaaaaagagacttcaatgaagattttctctatacaaaaagtttctactcggaatttactctgagacatctcttccaaatagggtgctgattgccttcccgggatcgctttgtttaataagagattcgccgactaaaactgctttgacaccggcttcttgaacaaaggcgatatcttcgggagtgaataacccaaattctccaaccacaaggatgtctttttgaccgaacatatctactcccacctctactcaagcagcctctttttgtaataccaacagacctacctcaacatgtttttaaaaggctcaccggtctctttgatcgcccacttgagtcactccactttactcaatattcacattaataaccaataatacttactaactcccctactactaaaaataggatcacctgtctcacacatgattgacttgcacctatctcatcccaaatacctatttctttgtgacaaatatcctactgtacatactcaatacgtatattactcgtaacgaccatcgatacgatgatatca

SEQ ID NO: 130113 - DNA, 739 bp, Arabidopsis thaliana columbia
  unsure (1)..(739): unsure at all n locations
tgacactatagacgagctagtgacgccgtccgcaggctggaatcttcatgagcggccgccctggncgtcctttttttttttttttggtgaatcaatttttttttttgagcaaccccccaaacctttagatttgagtttcggataacaaacggtcaaaatgagcccagtacttggggccctggggacaaaatcaaagtggaatcgggaacgggtgaaatctgaggggttcacaagccttgttttagcgcacacctcacaactgttgacggagggactaagtggggaataaggcaaagggttagggtggaaaataaaaaaaaatttcagttgaccaaaggggaaagggtgtgggctgttgaccatttggcctttgggtttgaattttccggtgggccttgagcgcaccaggggcttagggccaagggggagggaaaataacttttacctggggccgaggaacgcccaaagaagcttctcgggaaaagggaaccttggcccttggagaaacgtttacccaattgcccgcgccagctcctttagcttttaagagggcctgggggcctgcccaaaagggggggattcccccccctcccccccttttaggaatccctttattttttttggaaacggattgcccgcctttttttccgagggcttgaatccctccccaggncccttttgggcgggggggaacccgcggagcggcgggaaaaacccggggggaaaaaatggcggggcc

SEQ ID NO: 130114 - DNA, 218 bp, Arabidopsis thaliana columbia
ccagatgtacatgaaaaaacagacttatagcggtttttatttgacccggaccaggggagtgcaaggcacacggcgcttagtgcgggacgcaaagcgagtggacaggagcaaggtgcctacgtggtgcacccggccaaattgttgagagacgggtggaggtcaactccacgctaaaaaagtcggagagtgagccgaggcgcatacgcagggaagagaga

SEQ ID NO: 130115 - DNA, 876 bp, Arabidopsis thaliana columbia
cgcccgtgatcggacgcccagtacacacgtcgagttctaccaagggcaggcttccaaagtgagacgcgcatccacatttttttaaacgcctttgacagatcccgacacaattaaagtggtggagaaagagcgataaactgcaagaaacaaagcgaagaacggcccgacaacacgcagcgggaaccccgagactgaccaaaaccagtatgaccaaaaaacaacaaaaggaacaacgcagctaatacgacatcccaccaccgtagaacaaatacgaaaacttacgagcgccaaaattactgcacaactactcatacaaacttcatctgtcaaacgcatgagcaacgcgaccgaccctatacagcactctgttaacgaaacaaaagcaaccactcaaaagactaataggcacggaacatatacaggacagaaagcacctgacactgaaccacgctcacagcgcaaacacctacgaagaaataacgccagtgcacggaatagtcatacataaaagtacaaaacagaactacggcgttaaaagcgaacatgttaaacaaattgctttacttaacacatcatacacggtcacagcatgggatcaagcacgtgacacaaccactcaaccagtgacactaacacgtcacgcatccacacgcacacgtcgagtaacaccacagtaacaatttaatcattgtgccagcgcgacgctgcctactctgcacagtagcaagcgtgtctacgcactaatcctaatacaacgctcagtcgagaccactaaagtcactaagaacacacaaaacggaggaaagagaccctcacgcaaagactgtcggacacccctaaggcattagtgacgatgaaacgggctacaacctcaaa

SEQ ID NO: 130116 - DNA, 778 bp, Arabidopsis thaliana columbia
  unsure (1)..(778): unsure at all n locations
cccccccccggatggatttcnnnnnnnnnnnnnnnnnnnnnnnnnnnnnnnnnnnnnnnnnnnnnnnnnnnnnnnnnnnnnnnnnnnnnnctttttttttttttttttttttttttttttggaacccatgattctcaaaacaacaaacaaatccaagtttgataagaaaattaatatagtaactcatttgataaaatgagaacaaacaaaaaaaaaaagtgaaagaattataccctttttgatcgatctaggaagggatcatatgatcttcttctcctcctcctccatctcgctccgccgctgcttctgctaatctcttccatgtatattgccgttgttcttctacttctttggatttcgcttgtttctcttcatactgtctctgacattcttcaaacagttcaggatccatttccatgaacattttcttgatatttggggttagaccatgaactgcttggttccagtgagactggatgttcttctccagggtgggatatatgattggaaggatcacgcttcggttttgcgcgattagacccacaatgtgcttgttgttccacaagaacagtgctcgttctgcaacctgaaagtgggagctagtgagacagcgaccaatttgttggaataatggaaccctgcaacgcttggaactccacaggcttgggttgccctaaagaactttttttaagtttttccagggaaagaaaaatccttcttttgaccaagttttggcccccgggcccatatacttttaaacaaatccccctggatttac

SEQ ID NO: 130117 - DNA, 780 bp, Arabidopsis thaliana columbia
  unsure (1)..(780): unsure at all n locations
nnnnnnnnnnnnnnnnnnnnnnnnnnnnnnnnnnnnnnnnnnnnnnnnnnnnnnnnnnnnnnnnnnncttttttttttttttttgttttttaatttttattttttttttttttccctcgaaaccccagttttattattgaaaccattttcgggcatttgcataaataccacataacggaagtaaagactgaaactttaaaggctaataccttattcccttataaaaactcccaaatgctatacctatggacaatataacccccaaagataaacggaatacgacccataacctttgcatcatcactcaaagcagagtaagtgggggctattgactatcctttgctgttgctgaaaatcgaacctagagttcccaaaccggggaatgcaagcaaagggctaacgtcaagcgtatcaaaaactggagggataatgttcctgaggagattaagagagggatcacacagatctttaatggctgacaaaggctgaccatcccatggaatgttggggaaccaactgagcaaaactctgaccatcaaaacaccactgtatatattcggccattttgatagcccggttgcaaataccggaaagggggtgttcaaaatacccggggggtcctacccccggggccaccccaaaaaacaacggaccttgcttgtttccgaaaaaaaggctctgaaattttgggggggaaaagggttccaaaaaattggcaaacaaaaaagagccttttttggaaaaaataagaagaattttggaatttaaccccaccccccg

SEQ ID NO: 130118 - DNA, 615 bp, Arabidopsis thaliana columbia
  unsure (1)..(615): unsure at all n locations
nnnnnnnnnnnnnnnnnnnnnnnnnnnnnnnnnnnnnnnnnnnnnnnnnnnnnnnnnnnnnnnnnnnncttttttttttttttttttttagaaattcaattctaatgataatgaaacacaaggcccgaacaaaattggtagcatcctttaaggcgccactacatttatccgacaaagagaatcaccagcaggaacctttgaggtcctacactcatcccgtttgaccttctacccaaggctctgactttgaacatagcacccgccaggaattgatggaagccggcccatatccgttggataatgccccaacaacgagaaaggggtggccaatagtctctccacgtggagggccgtaaacaggccctgggattagcaagaccggcaaggcccgctaaggggctccgctacaccgttgaatgcatggccggaaactgaccctgtggagacgaccatatcggccggacttgttccttaggggtgagacaaaggcttgctcatcgccaaggacattttggggcctgcacgcgtgtagaacggagaacgtgcaccgtttcgaaaacttcggcaaagggggccaaaaagtctgggtcccaaatgacccaaacaaggcccccg

SEQ ID NO: 130119 - DNA, 679 bp, Arabidopsis thaliana columbia
cactatcgattagctttgacgtcgcatgcacgcttactgcagcttgaatcctttaaagcggccgccctttttttttttttttttgatcaacgatttaaacagtttatttaccaagacttacagtaaaatgtacaatgttcaagagtgtccccaacttatgtagtatgtactgtagtccatatgctgaagtcagacatgtcaatccttaaggaaaggaagacgagtacccgtagtccccatgctaccatctgctgatttttggggggatgaagatgtcaacgtcttcttggatgatcggcgaggaagaatctgaaggcgcggattaatgtgagtgctcccgttttcaagtgtgagttggtaattctccaccagttatagctgccaaactattatatttgatggtttaagaagaggctccactggttcactttctttgaatgccattaatgctactgttaaagtgacatcctcaaggagctcgtcctcatgtaaactgggcatgtgctcctgagtaatgtctttgatcataaaataatagggcgactgcttggcaccttgaattaggaaccggttcttggcatgcatcccaacttttccctataggggagttcatattaaaaaaccttaggctttgagggatgggacctttttttttttcccacgtgttgggaaaaaaatt

SEQ ID NO: 130120 - DNA, 586 bp, Arabidopsis thaliana columbia
acactatacagagcttgacgtcgcatggcacgcttacctgcacccggcagcctctagagagctcgacagcggccgcctttttttttttcaaggaaagaaccattctacttccccagaatttttgtcaaatcaacaaagttctttagagaccgcaacttatgaaaccttatctggtatccctatgcagcagtcagacttgaaaatacttctggaaaggaaaaccattgccctaagaatacatgctcccattcacttgatacaagcgggatggaagacttctaatacacccacttcgttatattaggaatacgatgttatagacaagaagaaactcgatcaaacgacgcaaagctcttatataagccttaaaactcgaggaggcgcctcatgacgccaagcaggtccaaatgtgatgtcatctgtggaaaatgcccgatcgcgtcctcgatgatctccactggcgatttccctttaatcttctcctgcatgaagtatgcaacggagacaggcactacaaacgccgtttcttgtatatacaaccttggcaagggcacttgccactttgttctcaaaaatattgtctttt

SEQ ID NO: 130121 - DNA, 718 bp, Arabidopsis thaliana columbia
aactatcagacagctatgacgtcgcatgcacgcgtacgtaagcttggatcctctagagcggccgccctttttttttttttttttttttttttaatcaatcaaaacttttctatacaccaatttgaacaacaaggaattataactgccaacccagaaatttcttaaacgcattcagatactgggatatttcatgacatatgcctatctttaccttcttatttggcatcatccatatgtaaagacgtatgtatagagacgtatactttcaacctcatgttcttctgggagaaaacactcaggattaattctcatccagaactgatttgatgatcatgatgacaactattctaatatccgttttggttcctcatgttctccaagtttatcaggacaagatatttgtctgtgccaagcgatttccgggcttttttcatgcattttgaggacatactatattgtattttggaactggcgggatctctgatctgaaactgatacctaacagcctcatagccacttttcacgacatagagaccactgcatcatgaattgctggaatgaagaccaaagacacgctctttctccaagcaagaatttgcttatattgaactgggccactaacgcattggcaatattgtttcccgccaattgcaaacgagacaatcttggggttctaactgatctgcccttgtataataatgcccgaattcatggtgct

SEQ ID NO: 130122 - DNA, 679 bp, Arabidopsis thaliana columbia
  unsure (1)..(679): unsure at all n locations
nnnnnnnnnnnnnnnnnnnnnnnnnnnnnnnnnnnnnnnnnnnnnnnnnnnnnnnnnnnnnnnnnnnnnncttttttttttttttttttttttttttttngatatttaaaccaaggaaaaaccgtttttaattgttattaaggggggggtttggggggcaacccaaacaattttttaaacgtttttaaagccacaaaataaaaaacgccccatcaatcaaattttcccaaggggcccaagggaaatgagaaaactcctttgcaattagaaaaaggttttgcccttgggaaaaaacacccttgttggaaaaggcttttcacatcttaattttccagtttaaaggaatttttaaaatagggtaaccttttctcctaattggagggggggcaaacctttgaagggtcttttcccgaagggaaaggatttaccgacccacaagttgccgcaaagtgaaggggaatccaaaatttgagcctttgggaggccaaattcccaagtttttttctaattttcaactttaccacaaacccggttttggcaagcttttttgggggtcctcacaacccgtttggaaacaaagaaaagattggggggttttaataaaaaacctcttcctcttgtgttaaaaagaaaaagaaattttttttttttcaatttaaaaaaatctcccggtgttttt

SEQ ID NO: 130123 - DNA, 1143 bp, Arabidopsis thaliana columbia
actatataatataaatatataaatgatttggtatacaaataagaagtataaatatataaatgtttaggaaaatttaaattatatatagacaagatcaaaacaaacattgaaggttaaaagtttggcaacaaaagaatcctttgagtggcaaacagattagaaaatattagcaagaaaagaaattttttaaaaaagggtacatcaataaacaagagacataataactagaaagatataaataaaccataggaaaccaaaatacagacagaaccatctgagataggtagaaatagtaagctagacaatagtttataataatcaagtagtcattacaatctgaattataggagtacacaataaggacgagaagagttattaatatgttgtaaactctctatacaggaatgataatttacaactaatatacaaaatatatatgggagattatagagcaaaatagatcctggcaataaataattgatgtaccattggcaaaaaataaggtgcatattacttgttacaacataaatataatacgacaaatgtagatttgaaataggatcaattccgagtgacaaatatttgagcatacagacagtagctcatacataaaagactaatgtcattatcgaatgcagtacaagaacacatatcaaggtagtctcaataatagatgaatgagggttaaattcaatagaattattgaatgtattatagacaaacatatacatatgagtaataggacactcgctatataataacagcaaagtcgaatataatcataaatcaaaaatgctcaaacatattacgacttacatgagaattctgcagctgaggcatgctattgaaatcctcacgaaaaaatgaatacaaacaggaggcaatatgcgaggtatccttaatataacgacatcgaatgaggtgaatgcaaaaataaaaacaatcatataataatcattatgaaagaactattgatatagatctaattacaacgtcataacattagctatcgtttctagatgaacagtaaaaataaaaaacttcacagattacattaacaaagatagtacgataagaggagaacgaaactactaataaaaaaatcacttttggatatcatgaaaaaaacgaataaactgtttt

SEQ ID NO: 130124 - DNA, 560 bp, Arabidopsis thaliana columbia
  unsure (1)..(560): unsure at all n locations
ttcnnnnnnnnnnnnnnnnnnnnnnnnnnnnnnnnnnnnnnnnnnnnnnnnnnnnnnnnnnnnnnnnnnnnnnctttttttttttttttttttttttgnnatcacaccaaagcctacctaaattttctctaaacaaaccgggatttttgaaagcaaccttgaaattaattcatcacctttcccaaaaggggggtttcgtttaacaagacatggaagagcttcccagagtcatttctaacctgtttcttgtgtaccctatacttgggccttcaacaaaccaatggctctctctctttttttgggggtaatcaaatgaacttcgtccttggggctgagagcatcttcaaaacctgcgcgggggctccatcctcctggggtgctatttccctcttcaaggccatagcaagtgactgcagctgcaaagacagatctgcatttgttaccttcttgaccggaaataatgccaattactcagccatgtggttttttgcccagagaggaggacacgtggtgccctgatgcccagtttccaaatagaaacaatgaaaatctccactttt

SEQ ID NO: 130125 - DNA, 467 bp, Arabidopsis thaliana columbia
cactatagaacactatgacgtcgcatgcacgcgtacgtaagcttggatcctctagagcggccgccctttttttttttttttttttttataaatttgataatctttttattgaaatggtaataaaagtttttattgaaaacaacaaaagaagaggtaaaaggagacacaattcaagtgtcccaaaaagaaccaagaccaacacacaagtttgttcacaatttgaccaattatcttctggtaaccggaattgaccaaacttggttgggcgattatataaaagccctttcataaaatatatacccgcgctccctcatcttacttcaccgtcgcgtagacaaactccggtacccctacgccacctacccctaacaacggttcacctccacacatattcgcaccaaaccccatacccttcccacacatccatcatctccaaggctattctctaccatcgagcccctttttac

SEQ ID NO: 130126 - DNA, 703 bp, Arabidopsis thaliana columbia
tgacactatacaagagctgtcacgcgtcatgcacgcggacgtcatctagagagccgagagcggccgccctttttttttttaaacaaacaaatgggacaattttattgacaaccaaacaaagtggaccatataagatctctccaaaatcaactcatataaatgctaaatcaatggagatgtaatgtgtttacatgtgtgtatctttacgtgatcaactgatttgggcagagttcatgctccaagcatttaagtttaagacatcaacactttgatatccataattaatagcaaagagatgtgaactttttcctattgccaattttggatacactcttgaggtaatgcatgctcttccctttccaccgaaactctccactactgaatgatcaatcaaggctctgagggatagtggttggtgaggattaatatccacaaaagctccgtatgtcgttttgtcattatcttccttcagcgaagatctgctttggtcactgcacatgagcacaacgtacttattgctgttttgacgggctttgaagattctaaaataaacagatgtgtactctttcaattcttagatgccaaaccattaaaccgaatggcctaaaccagacttaccgatcattcatcttgtacaataactgcgatcagccacttgttctatacatcgtcgacgcgggtcacccgaatccgaccgactgag

SEQ ID NO: 130127 - DNA, 733 bp, Arabidopsis thaliana columbia
  unsure (1)..(733): unsure at all n locations
nnnnnnnnnnnnnnnnnnnnnnnnnnnnnnnnnnnnnnnnnnnnnnnnnnnnnnnnnnnnnnnnnncttttttttttttttttttcgggataaataatcctttacagaaccagaagtatatacatacatacaaggacgagtaaatacaatccatcgttacactgtggtttctgccttatggaagattatcaaacgtataaaagtgttgcgcctaccatttgacatcgagtgttaaagcttcttgaggaacaagtaatgatggaaactttgtgaatgacatgttagacatcaaactgctccatgcttctgtatccacttcaatgaaaggcactacttttctcagcctcactgctttcaacttatctccttcgattttcgccgttacttcaaaccaaacccgttcgatcttcggttttgttctccatgctacttttttacttatcacactctcattcttcccaatacttctctcgatctctaactgaaaccgtaccattcctgatgcctttagtttagctgttacagaactcactgtttgtcgtgttccattccctaaagagttcagaactttctccaacttgtggatctttaagccaagaagatcatttgggaaccgatgctgcctgtacgtgtgaactttataataacatttttctgcatataaaaggattgcctcatctgataagtacaaaagcttgatttgcgtaattgcatttgaagtcctaaacgcaac

SEQ ID NO: 130128 - DNA, 761 bp, Arabidopsis thaliana columbia
  unsure (1)..(761): unsure at all n locations
gccccccccggatgaattgcnnnnnnnnnnnnnnnnnnnnnnnnnnnnnnnnnnnnnnnnnnnnnnnnnnnnnnnnnnnnnnnnnnnnnnctttttttttttttttttttgcgngcgaacacattcacaaagttctaaactttgaaaaaacgaaatgacattcatgggatggcgagataaaagtattcacaatccctcctaccagtaagagggttcataaaacaagaccaaattaacataccctgagttatttcccttgggaaaaaggctagcaccactcttggcgaaactaaaagcttgatttctaactcagatcggggaggggtcgcttccttcaatccattcctgttgctgatatcagcctccaaaactgaagtctgggcacctggttcaagaggggcagaagacattatttcccaatgatcaaacccacactgggggaatgcctgctctgaggttgttgccctaacctgacttgataatcccaaatacttccccacaggcttgtttgacacgatgttggacacaggagtttctggactctgcttctcctgggacactggtacacgcttttgattcattacactgttaataccttcgagagctccctcgggtgcctggctctcaaacatgttaaccggcttccaacctcttggctttggtgacattctgagaagccgtttttgacccttcctggcgggggcgggataatcctggaccaacctctcatttgtggggatgggcaacaaagaattgaaaat

SEQ ID NO: 130129 - DNA, 533 bp, Arabidopsis thaliana columbia
  unsure (1)..(533): unsure at all n locations
nnnnnnnnnnnnnnnnnnnnnnnnnnnnnnnnnnnnnnnnnnnnnnnnnnnnnnnnnnnnnnnnnnnctttttttttttttttttgagcaagaaagttgtattattcaactttctgtgaagcttttataaaccaaaatagatttcattatgagtgatttattagactggtgtttcatggactcttaaagcttaaacatgtatctccggtgaagtgggtgcaagagcttcggtcatggctcctttgtctgacatgtgtttgtcttgtcctgatgtgaaaggtggacaatggggacagcttggggggatatagaagtgcggtgggttcggattgcagccacttcgctggcatccaatcccggcaccaggaactgggatacctggaatcacaaaaccgggaatctgcgcgcctggaacccctatcggagggatattttgggccctgggactacctccccctagggcacccccctggccgctatacccgggagccccaaaacgcctttttctcccttggaaccccacctaacccctt

SEQ ID NO: 130130 - DNA, 738 bp, Arabidopsis thaliana columbia
attcgtgaccttcatgagctttgacgtcgcatgcacgcctcctgcacccggcatcctctaggatcctctagagcggccgccttttcagcttcgatcttggccacgattgcatcaatttcagcttcttctagctggcgcagcccagtttcctcccgtgtcattacggcaacctcaatgttctttccgccactctcaactacctcaagcagagcacggatagcgagtttaatagtttcttggccagaggattctttgtagttcttctcgaggaattccctaatagagttggagtttctgccggtagcattagctttccaagcagagaaagtcccagaaggatcagtctgatatagggaagggaggcgagagtaagggtcaaagccaacgataagagtagaaagaccgaagggtctgacaccaccactttgggtatacttctgttgaaggccagcaatgtagcgagtgatgtactcaacagtgacagggtcctcaagtgtaagcctgtggctttgacactcgatccttgctttgttaatcaagactcgggcatcagccttgagccccgcgcatgccaaggcaatgtgattgtcaaggctcacaatttttctggctgatctagaatcatgaagcttgggggtggacttcttctcgacggcgaggacaacggtgtcggtaccggggacaccgacgggggggttacccttgcggacggcttcaaaggcgtattccacttgaaag

SEQ ID NO: 130131 - DNA, 824 bp, Arabidopsis thaliana columbia
  unsure (1)..(824): unsure at all n locations
tcgttacctatagacgacttgatgtcctgcacccttcctaagctggattcttttaaaccggccgcccttttttttttttttttttttttggngggnggaaaaaaaaaaaaaataaagaaacgggaaccttatccaacaaatatttaataaaggcctgtcattggccccaaaacataacccaccaaagtcctagatgaaaacgatccatgaacctttgggttcaggtaccccttcagaagaagagaaaaccagggttttagaaaaaccccccacgggaagaccgaagggaccccaagttgaaagaaggtagaacttccctttctgggaatgtttggtaagtccggcacaaagagtacggtcccaatccctcaaagcttgcttttcccagccgaaagatgaagcacggcttgctgggtctcgggaggaaatgccctttcctttgttcctgggatcattaagccctctcaaccgttgatcaattgggtgtccggggagcttcttcaactttcaaggaggtgatgggtctttttcccggtcaaaagttcttttaacgaaagaattctgcacggnaccgccgttgggttcagaccccggggaatttctcgggaaccggtaactctgcaggggcgtacccagctttttcccttataagtgagatgcgtattatgagcttttggcgtaaatcatgggtcataagctgtttccctgtgtgaaaattgttatcccgctcaacaatttccacacaacattacgagcccggaagcattaaagtgtaaaagccttgggggtgccctaatgaggggaactaacttcacattttattg

SEQ ID NO: 130132 - DNA, 760 bp, Arabidopsis thaliana columbia
taacctgggatcctctaaagcggccgcccttttttttttttttggcattttaataaaagggaaaatattattaataccaatatgcaaataaggtgccaaaaaacattaattattggcatggcaacggacaccaaaaaataaatttaatctttttcccaaccaaagttaatagttttttacattttaacggggctttaaggaggtccccgaaagcaaacctggaaattcttccaaggatggtccttgggtttccggtccgagcatccaaataaaaaggaaggacattcctccgacagccgcaaatatgtaaaaggttccttgtgcgctccattcaaacataaagttgaaagcgtaactcacgaaccacccactagtccatgatgttaaggctacaatggttcctgctgaaacttttatatttaatgggaaagatctcagacatattgaccccagggtagccctcctataccgaaggcaaaacatccgaagttgaccaagaatgtttacaaagacaaaaattggatcaactcaggaaacacattcatttggttgaaccgggaagctcacctccataagcaaggatcccatgggacttattcaagcaccagaaacccactcacgagtggttcggttatcccccttcttatcccacatcgatttactcacccacccataacaccttttgtgcaatcatcaacaacaaccacctccacatgatgcactttttatgtcaacatagcctctctcactcgtgaaaagc

SEQ ID NO: 130133 - DNA, 506 bp, Arabidopsis thaliana columbia
  unsure (1)..(506): unsure at all n locations
gttnnnnnnnnnnnnnnnnnnnnnnnnnnnnnnnnnnnnnnnnnnnnnnnnnnnnnnnnnnnnnnnnnnncttttttttttgtatttttttttggttggtttatttggtncaaagcacacaaatcgttagtgttcataaatgagagacgaatttgaaatatttgctggttccttacggcgacaattggtactcaaacccacggggaaattacccggggaagcttggaagggggcttttaattttatctttgtgcacggaagagtggacataaatgtggaaaaaactatccaaccggtggggcgcttcttttggaccccacagggaggaaggcgcggacccggtcgggggatatgccattccagattgccggctgaggagaccggaagtaccatgtgaggttttaggaacggaacttctccattgagaggaatagccccaattaaggttgttggagggcttttgcttaggaggaccattatttgcttttatcttaggtaagcatttc

SEQ ID NO: 130134 - DNA, 634 bp, Arabidopsis thaliana columbia
  unsure (1)..(634): unsure at all n locations
ccgcgccggtggttggatttcnnnnnnnnnnnnnnnnnnnnnnnnnnnnnnnnnnnnnnnnnnnnnnnnnnnnnnnnnnnnnnnnnnnnnncttttttttttttttttgtgacaaacacaaaaaggctttgccacgtcaactaacgaggatgccgtcgatttcccgccgcttaacaagatggctactatatgctattggcatcagagtaagagggagccctgcttcgatctttattgggaggatatattgtaggattgggcccgaaatttagccagaacactctgccagctctggagtatatgatagagctggctcccgtgtcaggctaatcattcttaacacgcgaaacgagactctatagctgagcactgggcctctagcgccatcgaggcttcttggctggacgaacaggtgcactcgtggcttgcgctataaagaaatgtctctccttgagtctcatgcatgcaccagaaggtgagctgtctggacttccggatctgcttggtcctggagagaacatcacgtctaacccttgtcttgcaaggttgctcaattgattaagactcgcccggcctatagatccttgaagcttgagtatgagtacaagccatgtgactatcggtgccattgaga

SEQ ID NO: 130135 - DNA, 711 bp, Arabidopsis thaliana columbia
tgaccttccttgcccccgtccgtaacctggaatcctctaaagcggccgccctttttttttttttttttttttttttgaccaaaaaaaaagaataacttcaatttaatagaacttattaaaaggggtagctaacccaaagtaagccaaaaaaataatgatttgacctgattaataacaagcaaactcaaaaacaaaggggattaaaacattgggttcattttttttttcacaacatcattttttcaatagggggaccctttgacgaacatgcccttcttaacctttttggactcacccttaccgggggattttccgagctgaaccaaccaattggccttggcccgggccaaaaaagggggctgaactgggttcaccttctcgggtctgcccccccatggtttcaaacaagtgttctgcaacccacctgcctaggaaaaggacccctgccatgggtttggggcctggttcattgggttcaaggtgaggggtgccttcaccttcgactggccttcggacaaaaacatgaatccggggactgggggagggacttttgtgccgaagaacttgaaggtgtaggccgcaacttggtcaagaatagctttggctttaaacttaactccgggagtcaccatgctcgggtttaagaaggagaccttcaaacctgacattggtcttaaccagggaaaagaaaaccttaagccaaaccttttt

SEQ ID NO: 130136 - DNA, 806 bp, Arabidopsis thaliana columbia
  unsure (1)..(806): unsure at all n locations
cttatagacagcctgacgtcgcatgcacgcgtacgtaagcttggatcctctagagcggccgcccttnnnttttnnntnttttttttttttttaaatcgcaaaaaataaccatccaacggccaattttttttttttaatgggtaaaccaaatcacacccattgaaaaaaacgatatcctggtttagaaacagaccagggacaatactcatcaaagagaccaaagaggttataaaacagtgtttggagatctttcaaacacacttcttattcggacaaagccctgaaaggctttaactgatctcacaccttatagatgaaaattttgctccaaaagggtttaagagaggcatgagtaccccaagtccttctcttccttgagctcctctgcagtcaaatccatcttcttccttgatacttcatcaatcggaaggccttggacaatactccagtctccattgcgacaagttacagggaaggagtagataagtcctgatggaacgctgtaagagccatcggagtatactcccatggaaacgaacgtaccctctggagttccaaggacccagtcacggatgtggtcacaagcagagctagcagcagagagcgcactaaacaacttcctcgccttgatgattgcagctccaccttgttgaactgtaaaaataaaatttccgtccaaccatgcatcgtccttgacgagcttacggacaggctttttttccaaacaaaggtctggcccttttaccatgggtggcaatctggggtccctgggagggaaaaaggggtttccccccacaataatcccc

SEQ ID NO: 130137 - DNA, 857 bp, Arabidopsis thaliana columbia
  unsure (1)..(857): unsure at all n locations
tgacagcttgacgtcgcatgcacgcgtacgtaagcttggatcctctagagcggccgcccttnnnttttttttttttttttttttttttttnnnttttttttttttttttttttttgttttgttatttttttttattgttttttgttttgtggggtccctcaaaaaaattaatatttctcatttctctttttttatttcaacaggggggnggccccacaaaccctcaaagagtttttcctccccaaccccgcccgcttatatattttttctaaaaaattcccacaaaaaactctttttcccccccgaagaaacactttcttatagaggaagaaaacaccccacccccacagnggccttctccctcatgtgtgngatacccctttacagagattactatataatttctattttatttcacttttacacaactatttttttagagaaccagtgatttttatagaaaatatatttgtcgcaccccactatctagggaatgtgtgacacaccacggcgctttataaagatatttctttcccggagagtgagaatactcaccccctctttatanatatatttcttataacaacaattttatatctcctctaaacaattgttgccacaacaccaaaattttttccattgagccacaaagtttttttctttcaaataaaaaactgggatccttttttgtttgcccccacggttgccctaaacaaaaaacccgggcctgtattttttttgataaaattcttcttttttaacctccacccctaaatagaatccccccccggacccttcccgggtgtgaaatcacctcctttgcccattaattttggaatacctcggggaaagcttgg

SEQ ID NO: 130138 - DNA, 717 bp, Arabidopsis thaliana columbia
  unsure (1)..(717): unsure at all n locations
nnnnnnnnnnnnnnnnnnnnnnnnnnnnnnnnnnnnnnnnnnnnnnnnnnnnnnnnnnnnnnnnnnncttttttttttttttttttttttttcttttgggaaataactttatttgccgtgactcttaaaagcaaaaaccaccaaccatcttaatcgaccttgatttgtcaccctcccatttaacgcctcttaggaggaatctgatgaaccaaaggaaaggctcacaacctccgggtaagggaaacacgttggtctgactcgtgaatcatcgtaactacataccaagcgcaggaccgataggccatgacccctctgaacgtcccagagagggggaacagtgacgatccctacggggcagacagcgcttggcgtattactgtgtttttagggaacccaatagaggggaattggttatcacaatttccacccaaattacggaggtttgaaaggcttgtctgagaacacataggagatcggatatgtcctaccaagctgttcaacattgtgcaaggcgacgctgctttgaattttatggctcaaaaaacgggctgattaatgtactttcacacctttgctagatgtctcgtgatcgatacaatggactgctgggcctgacttcccaagcggaggcccccgggtaccatgggaccaacatccccgggaactacttccaggggtgctagcatacgatctaaggtgaaaacctgaaacattttt

SEQ ID NO: 130139 - DNA, 1228 bp, Arabidopsis thaliana columbia
cgcctccctacccttggatcctatacagcggacgccctgccctttttttttgggcttttttttttaccagaaaaaggagaccctaacccaaacaaccttggtggattcaagtcttaccaaacagggtgaaccccaattagaaacattatccaacactggtttgcacccgaatatttttcaggaggtgccccccaccccctctagggagccttttcccccaattgccggcgtcattacaggagttgatattacattcccccatacaatctccttaaaccaacataaaaaaaactccccttctgaaagtaattagactttcctcgcaaacactgttaaccccaaatgggcgccctcccccagggaaaataaaatggagaatttcttttatatgtgcccaaccgataaatttcccctatagtcagcgggttaaaaataataaatatgtgtgtccaaattaaacctcccaaatttttttagaaaacacaccgggtctcttgaacaaagcggccttaattctttcagaaaaacagaattaacaccccaagatttcgcgtgttcaaaagaaaataaacttctaatcagatacaatatgtggtagagattatttcctttccaaacacctactaatgggggtcacacccccactaccccacatatattgtttttatttggcaaaaaagggtaccccctccaaaaaattattttggtcttctcccgcctaggcaaaagcgataaatacaatgttgtaatatacacattttagtctgggaaatataggggcaccaaaggtgattctgccatctcaaaacaaaaaaaatacacccctttcccccctatgatgaatttcccaaaagaaacaaaccttcttttctagttttaacaaacaaaaatggcctctccaataaacaatagagtataacaaattcgggtgggacaaaaacatcctccgggggaggaaaaaataaaccacccccccattgtacacctaaaaaaaacttttttattaaaaaaccctcaggggaaaaaaacaccttgggtaatttttcttggaaacgcgagaaaccttccaactacctcccttccaaagccattatgaccctctttttctattgagcaccccaaaaaaaagggcacttaggatattcctcttgtgcgcaagataaaactgttcctctgaaaggattaaccacaatattgtcccaccccattaaaataatatattaaggac

SEQ ID NO: 130140 - DNA, 734 bp, Arabidopsis thaliana columbia
  unsure (1)..(734): unsure at all n locations
tagaacagctatgacgtcgcatgcacgcgtacgcatgcttgaactcggatcctctagagcgcccgccctttttttttttttttttttagaaaaccttttttttttaccaaccgttcatcatcatttattatataacaagcgagcaaaagatttctaaatgatgtctgagattatcaccagctcggtagaaagcatacatgaagcagctcaaacatctctaaaaaccctgagaaacgcacctatctaaacttgtgattgactcgattctgcttgactctgatttcattcactcggcagaattctcgngcaacagtacgtgccttcagttggagtggccacacgatatggtggctttctttgaaagcaggtccatctttgtggctcaatgggacattaattgatatacagatagccggtgctaccaagatccattatgtcaggcttcacttgcttccccatcataccatctggggtctccttttccatttaccggtactgaatgacagcatgctgcttgctgcaagatgggtgatccgtaggaatgtctgcaatccttctttcacgtccaaagaggtagcaactttggcggtgaaggcaaagtggctattcagtggttcacatccttaaaactacagtctcatcgttcgtgggttttacctctgggctatgagagagggatcttgattgagtctacagtcctgtctaagagtctcttttctgcacttacgttattg

SEQ ID NO: 130141 - DNA, 775 bp, Arabidopsis thaliana columbia
  unsure (1)..(775): unsure at all n locations
atagcacagctatgacttcgcatgcacacgtacccgtgcgtgagactcggatcctctagagcggccgccctttttttttttttttttggcaactctatcnaaaaacgcagcaattttaacggggatcaatgtatagctattacgagctatttaaatagagttgccttaaacaaaaaataaaaagagagagagagttgccactctgtttaaaacctaaaccacatattggtttggtaggtactgcttactcaataaaatccggttgaacaaatcctctgcttttctgcttcatttatcatttttaactttgcaaggtgacccatcccactcttcatagaactccttaagatactcttccatgaacttgtgccttttctctgccctccttttacccgcctcagttttcatcagcttctttagcttgaggagtttctcatgaaagtgattaatagtagtttgctcctctctcttaatgtactgctctttgggtagctctgtccggggcttgatctcaggatcatgaagcactctggtcctgcttccaccaaatgttaagcaacgagcaattcctatggcgccaattgcatcaaggcgaacagcatcttgaactaccccaaaatctggaagagactcacagaggggtactcctgctaattcggctttaaaaaccaatccattggtgatcggtaggattcttcgcttcttgggctcttttattcccctattcattctaggaaaattcttcaacaagttttttttttccgaaggggtctct

SEQ ID NO: 130142 - DNA, 1012 bp, Arabidopsis thaliana columbia
  unsure (1)..(1012): unsure at all n locations
cgtatacaccagcctgattggctgcaccgcgttacgtaagctgggatcctttagaagcggccgcccttnntttttttttttttgtttttttttttaaaaaaaataaaattttccccaaaggtgggtatttttaaaggtttactttggggacccctaaaaaaatttccgggggtccaaattcaaagggggccaaccctaaggttttgcccattcggggatggggtggaatcttgaaaatactgccgtaaaaataaaggaagaaccctccccaggtttccctttggggcttgaggaaattagtttcttttggacacagtttttgagggagcacaaaaactgttcaaaaagccttttttggaccccacgctttttaaagatgttcttgggagggggatttacccccttgtttttttaaaaaaaaatttttaaaaaaaaactattgaggttcccgggaaaaaacaacatttgtggcaagaaaaaaacacggaaagagggtttttttaaagacaggggccggcggacaaaaatgtttttttttttagggcgcccccatttgggggaataaaccgtgggaggacaattcttctggggtggctccccacccgggggttttttggcgctcctataaaaaataaaccacggcggccaccgggtggcctttttgtaaaaaaaggaggatttgttgtttttggaaatctttgacccctctaaaaaaaaaggatgggccctcttgggagacaaaatatcggcggggaggggaaaaaaaataactcctttttaaacaaaaaaaaaaaaattggggagaaaaaaacccctggggaaaaaaacaataaaaacccctttctttaaagaggggagagcgcgttcgaccctctctttgtgaccacaaaatataaatttttttttttctcgggaactaagggagaggggctttccaaaattttttccggggggggaaatatatggggggatgggcgggcctcccaaaaaaatccccccctatggaaattac

SEQ ID NO: 130143 - DNA, 778 bp, Arabidopsis thaliana columbia
  unsure (1)..(778): unsure at all n locations
tnnnnnnnnnnnnnnnnnnnnnnnnnnnnnnnnnnnnnnnnnnnnnnnnnnnnnnnnnnnnnnnnnnncttttttttttttttttttttggaaatggaggggattagacatatcaatcgacagaaggattggtgtacgagactttctataacgatggcgtaagaactttgaaaataaccctgaatctttgaaataaggatggcttaagaaaggccatgcctaaaagactaactcatgacagactgtcctacaaagattggcttgataacggcatgacctaattaatcgcgctggtacataaacttatggctggggacgctgggtatctttgtttttggtgggaacaagaaggctttggcttactaaacattgttgttctccaatttgggtgccggtttttatagtcaccttgcctacatcctttgcttgacggaatcctctttggacaaagcggtggctggagacgcgatcagcctcggggtgtgggttcacgtatggcaaagaaggacagccatgttaaaacagggagggaacgtacccctactgatttggaaagttcaaaaagaaacgggatgtctaccgccgcctggttcacccgggaattacagaccggtaactggggcggaacagcagacctataaagattgttttagggggggcattacattgtcccaactggttccagtgaggaaattgttattccgcttcctaagtttccccactaagaaaacggggccctgaaaaactttaaaaggtttttaaagttcttggggggggg

SEQ ID NO: 130144 - DNA, 917 bp, Arabidopsis thaliana columbia
  unsure (1)..(917): unsure at all n locations
nnnnnnnnnnnnnnnnnnnnnnnnnnnnnnnnnnnnnnnnnnnnnnnnnnnnnnnnnnnnnnnnnnnctttttttttttttttttttttaatatgcatggtgttaaacttatcaacggacagaatcttaggtgtaagagactacactgaaacatggtgtaggacctttctacataacgatgcgtctcggaaaaaacactggcagtgtccgaacaatgccaattaggactaactgatgacggaaaggtctatagagctcggttggatatgaaccgagatacataataggtctgcatcaaaatcctggcttgggagactgcacataaatgcaatttgaggaaaccacacggctttgcgatactatacatttttattgtccacagggggggccgcttttttcgttagaactggatccttggtgatcttgacggacttactgagcacaaagctattggtggagaccgagaaacctttggagtgtcgagacatcgttgagcatcgaaggaaaggtgaggtgtgtcacgggagttagaattaaccacagaatggatcttgtgagaaatttcaaaaaagaattaatggggattctcgaaaacttcccccccttgggattcgaacacccgcgggaaattttccgaacacacggggaaaactctgtgcggagggccggaaaacaaccccctttggcccgtataaacaggaaatgttctctcttattgaaaggcatttggcgggatataaacaaatgtggggcccttatcatgtgacttggcccggaagaggacaaattttgtttgtttacggaaaaaaaatttttttcccccctgaacaaaaatggaaggccgaaaaaaaaataaaaaaacggggataagaacttggggggggtcctttatccggggggggggccccacccccaaa

SEQ ID NO: 130145 - DNA, 489 bp, Arabidopsis thaliana columbia
  unsure (1)..(489): unsure at all n locations
acgcgtacgtaagcttggatcctctagacggccgcccttnnnttttntntttttttttttttgggggaaataattaacgtataatattttaaagctaatcgaacggcatttttacaatcaccaaataaggaaaacaacaaattactaaaaatgtgaaggaactggtaattatctaaacttccatgtgcttaacagttgatatgccgcgacaatataaaagacctgttttttttgcccaactgaataaatgaattacatgggaaaatatattattaaaaaaaacagaaaattgtgacaagggaaacaaaaacgttaacgaaggtggccccgggggtgatttagttaacaagcaagacaacacgggaaaattatattgtgattgccaaaaaccttttttaagaaatttttaggattatttctcggaccaaaaaatgtagccaaaaagttgtgaaacttacaccaactgaacattaggttgttgtgtgtgtg

SEQ ID NO: 130146 - DNA, 269 bp, Arabidopsis thaliana columbia
cgtattcgtccttacacttgactgatgtccctctagctgacttagagcgcgcattgacttgccgtatttgacgaccgagggtccgcttgcctatgtgagtcccattaaagctgggcgcaaacattttcataactgttccctgtgtgaaatgggtagccgctcacactgccaccaccggcatatccaagctgggaagccttaccgaggttgcaagtcctggggggtggcgcttctaacgaaggtggaagccttttaccttcaaccctttt

SEQ ID NO: 130147 - DNA, 680 bp, Arabidopsis thaliana columbia
cttgactgtcgcatgcacgcgtactggagccggatcctctggagcgcccgccctttttttttgggaattttcttttgacctttgatggggaccaaaccccccccaacccggttaaagcattccgatttaaaacagattatctatctcgggaatacaggggcggagtttggggcgccctacatcatccagagatcttatctacgatgggacccatagactcatctcagtgcggcagaccaaaccataggaaactgggcgtggttccattttctgccagtttggttcttctgttggctggaggacataaccagactaagtaacgagagagagactgttcttagctgttttcagggctgcgatggcatcggagaagatggaggcttcaagtcagggtacgatgcatatctaaagagaagtggtgaatgaagtcttggtttggcttctgtatcgggtggttctgtgattacttgtgcagcgactgcagctttacatgttggcactggcactggctctggcactggctctggctcaggtactggtttatctacagagggtgttgtagctgcaactgtttctggctcaggtactggtttatcgactgtggggggtgtagctgtagctgattctgcttctgctgatactgttgctggcgctgggaagagactttggttgcttgtttg

SEQ ID NO: 130148 - DNA, 809 bp, Arabidopsis thaliana columbia
  unsure (1)..(809): unsure at all n locations
gctttcnnnnnnnnnnnnnnnnnnnnnnnnnnnnnnnnnnnnnnnnnnnnnnnnnnnnnnnnnnnnnnnnnnnnnncttttttttttttttttttgcggagattctgaggcgatgtgtgtttatatgttgacgcagcgaaaaaaatgcaagaagtagtagatgatttatagactagcattacctatttgcatgtaacatcttgtatggttatagatttgaacatggttcaattcatatgaaacagttagtcttaagattgtggtccctgtgttgagccttgttctttggaaggaagctttgtagccatggtccgtagttcgttcacgatctcagtgaagcttggcctctctgatggttctgcagaccaacatctctccatcagcaatttccagtccatgtcacaaaagtcgggaatctgcggccgtagcgtattactaactataccacctatgatcgctccatagtgcaagtcggcgtaaggttcttcaccggtgaaaagttcccagaggacaattccgaatgaaaacacatcgaccttctcagaaacaaggctactggttccatttagaagctcgggtgccatccatggaagtgttccccgaacaccacctgatattaatgtctgacatttcacctttgagagacccaaatccccaaccttgcaaattgggcgatgaggatccctgagatngacgagcaggttgtcacttttaagatcaaagtggactatcttttttcatgcaaaacttcaatccaaaagaatgtccatagcgatcaagtgacgcttgcacctataaaattcctaaca

SEQ ID NO: 130149 - DNA, 856 bp, Arabidopsis thaliana columbia
gcacgcgtacgtaagcttggatcctctagacggccgcccttttttttttttttttatttttattaagagcgttttttacgaaaagtcaattaaggaactatgggacttacaaaaactcattttcaactcgagaaaaggtggaagggagaaaatatgagtatagtccaagttaaaataacggaaattaactgcagaggcaccttacaacaattaaaaggttagaatgaacacaggaaatttataaaagagaaaggtaaataaagactgctaaactttaacagtaaagaaaagagaaggccaaaaacgggaacacaatttcacaaagagaatatggaacactaatggaggattttcttctaattaaggaagatacaaaataagtaaatggggggcttttatataagcatagatcttggctgcaataaacaattttaaaaaaaatgtaggggtttaatgatggggaaaaatatgataaacgatatatgaaaaaccagattatgttattggaaggccaactaaagggtacaactaacggtaatggaatagtggcataaaaaaatctggtgggaaaatcttggggtaaattttgggggaataatataaaaatcggggccctttgggcaaaaactggttataaagcgaaatggcttcttaaaaccccgtgtgggatattaaaatgccttccaataaattaggtaaaagggataacaaagggggacaatacaaaaatttgggcaaataatgtggttccccttaggactttttttaaaggagaaaaaacattatttttaaaatagtgttccaaggtggaggggccaaggaatggataaagcccacaactctaaaacaataccga

SEQ ID NO: 130150 - DNA, 790 bp, Arabidopsis thaliana columbia
  unsure (1)..(790): unsure at all n locations
tcgttaggacagcctgattttgcatgcacgcgtacgtaagcttggatcctctagagcggccgcccttttttttttttttttttttggtgatagcggnttcagttacttgtaccagaatctttgcacacaaaagtttacggattttaaaagacaatggagagtttaacaaacagaaatagacgtaaggaatatgaaattacaaaaagtggttaagaatagaagcaaaagagacgaagagctagtgtgtggaattgcagctttagttcttttggtacttacaaaaaataatctggagtcttgcgagtggtttcgggttcgacttgacgtggagctggatcaaactgaaggaaattctggtccatgttctcaccgatctctagaatcgcagccatgttgccacaacggtagcaatagtttggggcactaaatacagtcacaacgttcttttcttggcaccaattaaaaccttccatgacaagttgatgtgctcttgaaatcagagagagtccattggtgtggttaaactgagtagcgatatcttgtccaaaagtgtagcctgcaccacgaggagatattccccaaccgcatcggtcatctggatcagaccataagagatcacacattgggccttcatgtggaacctcttgaattccatctaaagaacggatgttgtcaagtggtttcttaaagaagggtgaaaagtcctcccttgtaaaacagaaaaaaccttgacttttttatattaaaaagcctgtaaaggtgggaaagaatttattccaaaaaaggaatc

SEQ ID NO: 130151 - DNA, 389 bp, Arabidopsis thaliana columbia
  unsure (1)..(389): unsure at all n locations
gatgttcatggccacccgtccgaaacctggaatcctatagagcggccgcccttttttttttttttttttttttncaaccccaaccacctctaaatttttaaacatatgaataggcttacccgtgttttgtcaaaccgttccaaaaccaaccacatcacagggaccaattcgaattccaaaacaattgacagctatgaaagaaagcagagactttttggctatatcatgtgtgaacatttttacataatgacatagacatatttttccaatcttagccgcagagccctgctccttgggaggttgatccatattttccacctgatggtcctggaatttcctccatatacaactttgattgcctatgaactcatttggacacaatgaaaaca

SEQ ID NO: 130152 - DNA, 738 bp, Arabidopsis thaliana columbia
  unsure (1)..(738): unsure at all n locations
acggcacccgtaccctgggatcctttaaagcggccgcccttnnttttttttttttttttttttttttgggaaaaaaccttctttggtttggcttttgaaaattaaaaaccttaacccttttaattcgcccttatttggacccccttcctggtaactcctattggggggaggcagaggattcaaaggaaacctacccgactcaggactaagggaaacccgtttttttgaaccgggaatcatcttaaatggatttaaggcaaaagaaagagatgcaaagccccgacggaaggttccagggaaagggatcagtcacgttcactaagggccgtcaagggctcgtcgatctcctttgttctcagggaacggaagagagggtcataagttttcacaactcccacctcaatttcagttgctttgaagtcttcttgaagaacagattggagagcggatatagcagtctgaactgtttcatcatatgtgaaggcagggttttctttcattttcttctccaagaaattgactgcttcttgttctttcataccagcactagttgccttgtgaccgtaaaaatgtccagctgggtcacacttgtaaagtagaggtcctctctcttcatcaatacctagaacctggcaactactccaggggtctatgaagcatgtggtgaaacctgaacttattgcatcatttacagatattgcggctctataacatatggactaactagagctattctag

SEQ ID NO: 130153 - DNA, 205 bp, Arabidopsis thaliana columbia
  unsure (1)..(205): unsure at all n locations
ttgcacttccctccttccttaacttgggatctctttaaacggccgccctgccttttttttttttttttttttttnntttaaaaccaaccccaaagctttaacctttttaaatttaccaccctccttgtttaaccccaaaattccttttctttccaattttaaaaccattgcaccaaatcccctagtctttccaaagagagtaata

SEQ ID NO: 130154 - DNA, 739 bp, Arabidopsis thaliana columbia
  unsure (1)..(739): unsure at all n locations
acactatagaagagctatgacttcgcatgcacgcgtacctgggcttggataatatagaccggccgcccttnnntttttttntattggtttaaaggcacaaaccatctggttttatttttccgggattgtatagaatcagttggacccatacatgcttaaaggaggaaccaaaacctcaaattgggtttattggtttaaggggaaaaccataactttaggtttttaacttaagctttttttttccaattttttattggtacaaatctacatactcctaaaaaaacccagggggagaaatatcctataaagaagtaggtacctgaagatgataatatgtaagggtgagatgcagtgacaagagctgagcacctgaatagagatttgatacatcggcatcgagggagacactgctgctacataagataatcatgcttcttccattttgctcaggtcaggttcatctacatcgtctaaatatggaagatgatcaaattcatatgggactgcatcataatccgtataggggtttcttggaataagatttttggcaaagatttcgaacaccccggggtgaaatgttagaaaaaggtcttcctttcaaaaaggcattcttagcctggtttctttggaaggccttgaatttggcctcctttggttttcccctggttggggtctttttggggctttccccccatattgggaagggtccttttcctctcaaaaggggggccttggcctt

SEQ ID NO: 130155 - DNA, 542 bp, Arabidopsis thaliana columbia
  unsure (1)..(542): unsure at all n locations
nnnnnnnnnnnnnnnnnnnnnnnnnnnnnnnnnnnnnnnnnnnnnnnnnnnnnnnnnnnnnnnnnnncttttttttttttttttttttcgatcacaaagaagtggacctaatgaaaggaccgggaacatgccctttaccttcgaccagatgcaagactttgcatctatcaaacaacaaaagttagtggaattgaagacccgaacttactggcagccatagcctgactcactgggccagcaccactcataaaccctaccaaatgtgtgttgcaaatgcaataacacgatcgaatgagagcccacccctttggaccatgacgatgggatcgctatgttccaagattaaagctcctaatatctataaataccttggggtcgcagctgcacccgagtcaggcgctgcgcgcgcttgaattatgttcagcggagagcgcacgtccattcaaagctggctccggatatggttaacaagaactgcggtgccgagtccttatcactgataacagtgagcacagtagaacgcttaaccatgtcaaaagcat

SEQ ID NO: 130156 - DNA, 666 bp, Arabidopsis thaliana columbia
  unsure (1)..(666): unsure at all n locations
ggatttggacagcacccgtacctaggcatggatacatggacggccgnccgagagggggtttttttatcccagaaaaaaaaagacagggggattaaaggggggaacaaaggggaatatacgggggataaatgacacaaagtggatgaaggggagagaaagctgaggagggacttaagaagccaagccaggagatcgaacttgtaaacgtgagagcagtgcgaaaagcgagatttcaatagactgcgttgaccatagggtacgataacaaccgggatgagagaccaccagaaggccgattgcaaaaaaaaggggatctaacttttgaaaaacgcattctgaaggggacggaattggattgcgaaaaggatgtagatggggtactcctccacgaggaagggccaaagtaagaaaagggcctgggggtgtaaaaaaaacccccccttaggaacagaaaggcccggcgacaaaaaggaggaaacccagcaaaaaaagcaaggggggttttttttagaggggatatagaggtcaatcgaatggaaccattggaatccgtaaaaaggggttgaaccgggaaatcccggtagggtcctgaaggttgacagattccccaaaggggggggggaaaaaaactgggggaaaatggaaaaacatgagcagggaaaaaaa

SEQ ID NO: 130157 - DNA, 656 bp, Arabidopsis thaliana columbia
  unsure (1)..(656): unsure at all n locations
tgacgtcgcattgcccccttccgtaccctggaatcctttaaagcggccgccctttttttttttttttnntttttttttttnnnnngggccaaaaccggacctgggccttttcaaaggtttccaattcccagtaaaaccttccatttttaaacccccccaaattttttggggggggggccccggggaaggaccaaaacccaaaaaaaaaaaaaggttccggccaatggggttggcctttaaaaacaaccttttccctttcctaataatggttaaaaaaaaaaaaccgaaaaaggccctttttttggttttctaagttttcactgggggggcccagggttttcataaaacaggaggtaccctgggccagtttggctcgaatcctccggaaacgacccaaaaaaggttggaacagttgatttttaaatcatttaaacattctcatcatcaaaaaaaagccatgggttatggcttttcacagggcttacgtaaggaccagggtggggtccacttcccacatgaaccaccactgcaaacagagagtactccacgtctgcgtagggttccactgtgtggctcagttttagctccaaagggaagacaactttataggagagcttctgtagcggcctacctgttcaatgtatttgaatcgtttt

SEQ ID NO: 130158 - DNA, 1132 bp, Arabidopsis thaliana columbia
  unsure (1)..(1132): unsure at all n locations
cttgactgcgcatgcacctccctggctcctatacatagacccctccccngcggggaatttttttttgggacgcaaccacaaagatcactgggggtctaatacaaaatacttctggggcccccccaaattttatttccccatctctttaaaaaaaaggggggcccccaaccccaaaggattccccccatccccaccattttcccggttttctccaaaaaactcacaaatccccccaaacccaattttatggaaaaaaaacctcctcccccctatggtcctgccccaaagagggggggccctccaaagaaaacaatctcccactcacctccaagaaaacacatattttctaaaaacgggaattttttaaaaaaatgtggggccccccccccattcgagcgtggggccccccaagggggttttaaaaaaaatcttcttcccccgaaggagggggatcccccccccccctcccaaaaaatattctttttcctggacaccacgtggtaatggaactgcattgaaataggaatggaaaaccaccccaatacgggcaagaaaaaccttttttgtcaccctaagcccttccccccctctaaaaaagggttcttagatccccggaaacaataaaaaacctcgggaaaaccccccctttttggggggtgcgccccccccacggggggttggcgcccccttaatgaaacaaaaaaataaacccggcgagccccccgggggtgggttctctcccctgagaaaaaaagagaacccctccggctttttttgaacaccatcctggaccccccattgaaaagaggaagggtcccccccctccggcgggttccccttttccccgggggtgggagaaaaaaccaccccctcccctttggcccaccaaatgaaagctttttgggaaaacacccttcccgaaaaaaaaacccgaaacacccccttgcggggggggagcagagggggggcaccacccccttggtgtttagccacgatatctcctcttattctctctaccgggaatacaaagagaggcgccccctagataaaaatttccggcggggggtttttttgggggttatagggctccgccttaaaaaatctcacccacccgaaaaaccacccggggggc

SEQ ID NO: 130159 - DNA, 667 bp, Arabidopsis thaliana columbia
cggcaatgggtaaggccactctccagtatactgttagaaagctcgtatcgaattcgcggccgccatttgaaaaacaaaagtatgactcaatgtgtgatataaacagcgatttgaaaagagaatatttagaaaaatacgtgagatcttccgaggatagaaaagccctgtccaattatggcagtggccagaatctcattggcagctttgtgatactggtgcatcaaaagctgaggtttttgttgaagatagttctgtctcttcaaaacgggattcaaaggtgcttaatctttgcgatggtaaaatagtgccctcatattgtgctagcaatgtgagttctattctttgggtccctgttcgagccttgagtgaaaaacttgctagagggtcatcattagtcactccgctgaaacaagatattttttatggaatgataacttgagctttgaaacttgaatttggggttcatcataaccagatatttgagagaaccataactgcgcattttatcgactccctttgatgtgaccacaaaggtggtaaacaaatgcaatgatcgcactttggtctttcccggtttgttacactccctcgaaaatgcgaacttgatagattttgaagaatggctttgatcttcaaagaaggatttatttcttgggacaaaaatgat

SEQ ID NO: 130160 - DNA, 728 bp, Arabidopsis thaliana columbia
  unsure (1)..(728): unsure at all n locations
gttnnnnnnnnnnnnnnnnnnnnnnnnnnnnnnnnnnnnnnnnnnnnnnnnnnnnnnnnnnnnnnnnnnnctttttttttttttttttttaagtgaaatcactactaattgcaaaaaagtcttacaaaggtttttgataataattaattggtattttttttttgaaaaatatggtctgcaattacaagtaacttgagaacagagtgcataatagcgaattgactaagcttagtcagaaaacttgtgtagactccttatttcttctcttctgttaaaggagcttgagcggctgctgactcctcctgtggtggcctcattgccgggaagaaaagaacctccttgatgttcagtgagtcggtcaaaagcatagagagtctgtctattcctaatccccagccacctgtaggagccaacccatattctaaagcattacaaaatgtttcatctaaagccatcgcttcatcgtctccagactgtcgatccttgagctgatcagcaaaacgctggcgctgtaccacaggatcgtttagctccgtgtaggcattgcagagttcatgtttgttgatgaacagctcgaatctctctgtcaatccactcttcgatctgtgccatttagccaaaggactcatgatctcgggctggttgatgatgaaagatgggttcacacatgtcggttccagaaattcngacgcgtgggtcgacccgggaattccggaccggtacctgca

SEQ ID NO: 130161 - DNA, 647 bp, Arabidopsis thaliana columbia
ctatgacgcacgcatgcacgcgtacgtaagcttggatcctctacagcggccgccctttttttgttttttttttttttccttttttttaaacaattctttttttagtttctcctcttgttctaatgatacaactttttttttttttcaatctttctcaccgcctccaaaaaaaaacctttatatgcaaaaacaaaccaaaaccccaatggattttaagagaaaacaaccacccaccttgggtccccccccaatatttttcttaaaccgaaaaaaaacaccccctcccaaaattttttggaacaaacaacccccccacctttatgatcaccagaaatgttcatgtccccccaccaagctctctttctacgaaaattgcccctaaatatccccgactctctttcaaacgaatttgacttttctgacccctggtttcccacccgggaaacccttaatggtgacctaacccccaggctcatggggataaacccgtccccagaaaacatcaccccccttgtttaacaaactttcctttgaccgggggggcccatataaacgaacctgcttcttaagcgaagaaaaaatatgggaaaaaatttttttgggaccccccccctcccttctttttagacatttcgaaaaacctttta

SEQ ID NO: 130162 - DNA, 727 bp, Arabidopsis thaliana columbia
  unsure (1)..(727): unsure at all n locations
nnnnnnnnnnnnnnnnnnnnnnnnnnnnnnnnnnnnnnnnnnnnnnnnnnnnnnnnnnnnnnnnnnnnngcggccgcgctcacaatctgatgatgtaccaagcagctcctacactcctccttctgaccagtacgagttttctgatgaacaaccatcagatcggaagctcaagttatcagcatcttgtactccagatcctgctcctccaaggatctctttctctttccctgttcctagggtttctttggctaaagtctctgtttcttcacctgcaactaacaccaagctcaggagctctgatgtcttcatagggtttcatggacaaaacccaaacttggtgagattctgcaaatggttaaagtcagagcttgagcttcagggaatcgcttgtttcgttgctgacagagctaagtattcggacacacagagtcatgagatcgccgacagagttatctgttctgttacttatgggattgtggttgtctcttgttccagcttgctcaactaccttagcttggaggaagttaggttctttgctcaaaagaagaacttgattcctattttctatggaactggtccttctgagattatgggtcttctcaactgcaatgccatagataaagagtgtaaagaagccattgatgggttgattaagtctcatgagtttaaactagaagctaatgagagtaactggagaagctgtgtgggaaagactgcaacgattcta

SEQ ID NO: 130163 - DNA, 892 bp, Arabidopsis thaliana columbia
caattgggaatccgggctcccccctagcaggtcgactgtatcgataaagcttgctatcaaaattacgcggctcgcttttttatttctgaccgaatacctatggtataagatactgctatctttgttagcttcttattacgatactatgcagcttctcgaccgatccatgtgaaatcatggaatctcgtaatacacacagggtcatgttcgcggcgtacgagcgaccactacttttactgattatcaagaggactaccgaccctaagagttgaggatgagctttgcaaaagatgcttagacatacatggtagcgcaagtaactattgacttgtgagcacggttggcaacttatatgctaaattgcgaattacttaatctcgaatgcggattactggaaggattgactgagcccaccatttgactctgatgcaatatatgatgctttatacgactatctacaacatgtgcacccagaaatctccctattattacttacaacaactttcatgacaagtaatcgtaaaacatttcgaggaaataatattatacttaaacacttttctgccctgcctttgaatgggaaaaaaacaatgaatgaagtttcatgatcttgcggggagtctctttttcaaaaaacaatggtgttcacaacccatcaaaaagttatatgggtccaagacatggctctaattcctatggttttcactacaaaccatacctcttgaaaccggattacattttaaattagctaacggataaaatccaactctacacacccaacattgaaaatggaaactccttggccccttgaacaatgactctttccgaagaaacactggcatttaaaaaaaaggaagcccttcgattataacaaaagggttcaaaaactaac

SEQ ID NO: 130164 - DNA, 693 bp, Arabidopsis thaliana columbia
actcgggcctggctagacgtcgaccgtataatgagcttgaagtcgtgtacgcggacgcatggctgctttcgattttttatgaatagaactacttctaaatcctgcttgagcgggagccgaaaccctgagctattatcccctggtcccgcgcatggagccggtccatgtgggactctccttggccgagtcgccgagtgttatgactctcttctccggctaattcggctgcaccatcttttgctcctgctaaagatgagggaaagaagacctatgattacggtggcaaaggcgcgatcgggcgtgtgtgtcaaaggtaattggttgctcactgtgtgaatgttgagattctgaagatcaccgagaggattcgcctaccgaatctatagacgattcttctccgatggtttccaaggatgcagtctcaatcaacggtatagagcactttgacggtagtcatccatcctatcttgggggtccaaaaatggtcattttaggcacacatatgcttatgggatgagtactagaggggtctttgtctcgtaggaaaggaaaggtttcttcaacaactaggtggctcccaaatcacctgtgtccctgcttggaaagggaccaccccctttgggacagtatacatggaaacgtgttcttttgggagaaacccttattgttacgaagaaggaaggcgcgaaaaat

SEQ ID NO: 130165 - DNA, 717 bp, Arabidopsis thaliana columbia
  unsure (1)..(717): unsure at all n locations
gttacaccatcnaagagctgtgacgtcgcatgcacgcgttcgtaagcttgtatactgtacagcggccgcccttttttttataatttgttttctgcaagaaaaaaaatggctttcttttaaaaatatacgtcatcgacactgaactggtataggaccgacccttgatttttttggatctcacccattaacaccatataaagggcttatttcaaaacgcccaacattaatttttgttcagatatcacaaccaagcgattataaaacattgagattggatagacatagaggtcaactgccctcatattgagatagctccttaaacttctggcctcacctcctgaagcatggggagcttctttgcccatgcccgaggcacctggaacacccggctagaccacacactccttggtacatcttggcaataattgggttgcatatactctccaaccacttcatattgaatttgaactgcttagcctgagcccactggttgcccttgagcccttgaatcgcctggtcaatataatcctcgatcttcttcttggctgcagcccggagcttcgtaccaatcttgttgtgtaggatggggttcctcatggttgggagcgaaacttctcgagaaccggtcttgggtttcaaccctttttttttgagcccccttcggactttagggacctttgttcgtttatttaaanccttctttgaaacccacttttt

SEQ ID NO: 130166 - DNA, 726 bp, Arabidopsis thaliana columbia
  unsure (1)..(726): unsure at all n locations
nnnnnnnnnnnnnnnnnnnnnnnnnnnnnnnnnnnnnnnnnnnnnnnnnnnnnnnnnnnnnnnnnnnnnnngcggccgcctctgcttcttcttcttcacatcactgtgtgcgtctctctatctctctattctatcatttcgaaatcctctctatccgaatttgaactcgtctcttcttcgtaaagagttcttaatctccgtctctgtgatttcggaatctggaggttttgaatttcttgttcgtatcaatcaaatggtggatcgatttagtgagattgctttacctcattagcaatgacttctgcttcttccatgtccgtgtctgtggaatgtgtgaacatatgtaatctaacgaaaggagatgggaatgcaagaagcgattgcagtgctctctcctgtgcttggaaagctccaagagcgttaactgggtttctagctagcactgctcatccacctgtgtgttctgtgtattcatgtggcagaaatggaagaaagagcagaatgaaagcttgcgcctggcagaagtatgaatatgaagtaggcttttctgaggctccttactttgtaaatgtgagaaatatcttgaagtccaaattatcttgtgggggtcataaaagatgggaactgtattgcgtatcaactgaatcttcttctggggcatccagtgatgttaccgtcgaaacattgtgggaggaccttttcccatcaatatcttatctaccccgt

SEQ ID NO: 130167 - DNA, 705 bp, Arabidopsis thaliana columbia
  unsure (1)..(705): unsure at all n locations
ctggatcctntaagcggccgcccttttctatttcttgtcttttttttatttccaaaacccacggccattgggttttggggaaaaaaattcgggtatctgcctaaacccaaaaaaccaacctgggttccttcacaaagggccttcccggtattttttacccccaacgggttgtcaactttaatttgcgccccagccaaagaaaaaggaaaaccagcttccaggtttcaccttaaaaaacccttgtccagccagccttagtgcgggaccccgcattttcttcacccccctttttttgggggagttaaacccctcccaaaaaccggttttttggccgggagggggaacccttttgggccggtcccctggggtttccccggaccgcattaaaccggtatttggagaaccctcctcgttgggggccggatttccgggttggttcaaattgcccccccggggcttttcctgttggacaaaggagatttttccctattttgactcaaaaaaaacccccttatttttggcttaacccccccgggggaaaacacccccgcttttttttaaagcccggtaaaaaccttgggcctccccttttatatcgggacaagaaaccttttttttcccttaagggaaacacaaaaaccccccttttctcccttttggggagaattttctcttatgagcggaaagaacacttctcccaaagaa

SEQ ID NO: 130168 - DNA, 606 bp, Arabidopsis thaliana columbia
actatagaccagcttgacgtctttgcacgcgtgctcacctcgatgcttggacctgtcgacggccgccctttttttataattttaagacggctgcaaaaaacataagtgttccttaaaaccttgtttcaaaaacaacattgttttgaggtaagcaccaaaactgtggggggatacatactttgaaaagctcttgacagatacacccactcttcgatattctttttctccggggctcactcacagccttattaaactttgaccaatgttttgcccaacaataactctgcctatatgtggagatggcccccgacacaccgggctctcttatttatacgggttcttaaggtctctgtcccaggggctttactcccctgatcaccattaaaaccccacccgcccctgattttaacgtgtgacacgggtcctatataaagtgtcctcccctattctcaaacacaccgttgctgtatgcgtgacccgatagtttcatcgctctcgcaccctgtgtagagttgtatatcttgtttactacatttgtgatcactccaactgcttagcccttgtgggaagggaaaattttttaagagctgggtctatacttgaaag

SEQ ID NO: 130169 - DNA, 737 bp, Arabidopsis thaliana columbia
  unsure (1)..(737): unsure at all n locations
nnnnnnnnnnnnnnnnnnnnnnnnnnnnnnnnnnnnnnnnnnnnnnnnnnnnnnnnnnnnnnnnnnnnnncttttttttttttttttttttttttttttttttttttttttttttttttttttttttttttttttttttaggggttaaagggaattttaagaccaaagcaaaaagacttttttttttaaaaaaaaaaaaagggcccccctaaaaaaaaattaaaaactttggatttaatactccgattacaaataaaaaacgggcaaattttaaacccttcactcagtgggtaaatgggcccaactcgggggaaaaaaagtttggtttaggggggccaaaaatttcaacggggggcctgaactgggcccaaacctataaggggccctggggcgggataaaaaaaaaagttccgggttggggctttggggatgggtggaccattgtccaaaacaacaaaaacttgtggggtaaggatgtaataaaacgggggggcccattttttaaaacccaattttggtggggttgaacagttgtaaaccataaaggaaactcccctggggggcaaaaaggggtttaaagagtccacccggacccgggggtcaacccgggaattccggaccggtacctggagggggaccattttttcctataggggagcgtattaaagctgggggaaaaaatggaaaaagctgtttccggggggaaaatgttttcccctcacaattccacacaaaat

SEQ ID NO: 130170 - DNA, 726 bp, Arabidopsis thaliana columbia
  unsure (1)..(726): unsure at all n locations
nnnnnnnnnnnnnnnnnnnnnnnnnnnnnnnnnnnnnnnnnnnnnnnnnnnnnnnnnnnnnnnnnnnnngcggccgcgctcaacgaacgacttcgctttcgcagtttgcattgaattgaagcataagcaacctccaaattccgacaacaaccgatttcctgcagagagagtctctctttgtttgccctggataggaaacctacactactctttgtgatttgattttgttatctgaattcagagtcttgcttctgggttttggtctgggttttggaggtttagtgcttgaatctgatgttggttcaagatcgtgtggctcctaagccaccaaaatctcggatcagagaacttcctagtcgggaccgattcgctgaacccaaaatcctagatttctcttcatgggtttccgacaatgtctacagaatcgtaatcatcttcctcttcatcgtcaccgtcgctgctttcttcttcctctacaacaccaccgacactgcttctctcctctgtttccaatcccaatcaactcaatctcttcaatctctcactcgccctcaaatcaactggaactcgatccaaatcgtctccgacaaaacctcaccttacgctagtttccgtacagagaaatggatcgttgtgtcggtgacaaagcacccaacagaggagctcaaaggtttgttcaagattaaaggatggcaagttctagcgatcggaaactctttaacacct

SEQ ID NO: 130171 - DNA, 732 bp, Arabidopsis thaliana columbia
  unsure (1)..(732): unsure at all n locations
gttnnnnnnnnnnnnnnnnnnnnnnnnnnnnnnnnnnnnnnnnnnnnnnnnnnnnnnnnnnnnnnnnnnnctttttttttttttttttttttagttgaacaaagaaaccatcttatattcattctggatatggcgtttagttatactacaaatggggaatagcgtgaaaagctgaacaaatacaagtaaaagcattctcagaatcaccaaagttaagctcatgaatgtttatccttggataagctccatgagagtctgcttataacattttcgtgtactattttgtggtggtgaaacaaccgcctgtgaatcgtcccgcaacacttgtctactatgctttgatatttactgtacaaagccggtattggtacacataggatggccccgatgtgaagattagtgcaaagagatatatagctaccaatggcagacagaagccacagacaaatcaccaccttgaataagagttcaaaatggttgccaactgtgacatcatgagccattacaagcaggtgattgagttttatacggaaagaagctgcggcactattcaccatttactctgatagaacaaggtctggcagcgaatgcaactgtctattcctaaaagcagaaaccctggcatgaacgaatgatatcttgatcacgatgagttagacatgcgaagaaacaaataacaaaggcagcccggaaaactctgaattttatccaagcttcagttgatttaatgat

SEQ ID NO: 130172 - DNA, 701 bp, Arabidopsis thaliana columbia
  unsure (1)..(701): unsure at all n locations
aggccaaactgggacccggcccccccctcgacgtcgacggggacgataagcaggagaccgaattcgcggccgcttgttcaggaagtgaaagagaaagcgatgatgaggctgggaagagaagtgaaagccagtaaagatacgatactggatccggcacgagtcccaatcgccccattgggggtttcggtgcgagagcgaaccgattcatagtggcttcatttaagcagacactgcagctgcaggcggttcttcgtaagccggatggagagtgcacaccagaggacggactccatacacggtgtccactcgccctgcagggggccagaacttggaggagcggagccatggagcggggaaggctgcgtattcccgtgaatacggcttttaacatgtatcagccattagcaacgaccgaggatggggagcacccttcaaaacgttggcgcttggaacagcgtttcctttctcagtctgagaagacccttccctgaccgacatgagagcatcacagaacctatctaactcaaccttgcgttcgctttcagatggctcgagcataaacgtcncagggcaggccaagacattgtcggccatggaaaccaacccccaccaacgtggggccatcctcgggtcagtccgcagtgtccagaaacctacaaggcacgagaaccggagcgaagcccattgacccccgaaagacc

SEQ ID NO: 130173 - DNA, 663 bp, Arabidopsis thaliana columbia
ccctatagacgagctgtgacgtggcatgcacgcgtacgtaagctgggatcctctacagcggccgcccttcgcggtcgtttttttttttttttttttggtccttcttttttgttccttttttgtttgatctctttttgcgtcttttctttttctggggaaaaaaatttgggggcttccaaaagacaaaccgcccccccggccccacttttaaacagggggaaaaaaaaaccccccccttgtcctaacgttaaaaagtgggaaaaaaaaggaagttttttctactcgggagaggggggggaaaaccccccctgaaaaaattctaacaatggccatgttcgttagaaccccgggcaaaaaccaaatataagggtgccctgcaaaaaaaaaaaacctttttttttcggggattctgggcgcgggggtcaaacccggggccggaaccccttttttttcccccttaacaggaaaacccccccttgggaagggaaggtttttacaaccccacttggtgaaaatggtgggaaaaaaaaaaaaaacccccctctatttttttgagggggggctaaaaaaattttgttttgaacgcccctcttttttttcggaaaaaccttttctaaccttttttttctcccaatatcccgagtgggagggggggggtgggtc

SEQ ID NO: 130174 - DNA, 750 bp, Arabidopsis thaliana columbia
ctgaaccggtatggacaagcatccgcgcaccaagcaaaattacttacagacgtcaaacagggagaaaagaaaaaagagccagacggacgaaagtaaaactcgaccgaatcgtacgcggcataaacgaaacgtgctttccgacaacactcaactagctaaaagcagaaaagtgaagcaatgcatcatgctgtcagagacccatgccagagttccgagtcatgcccctggtaccacaccagtcggtccaataaagagacgccctacaacttccagccccagccactgcctaaagtccgcccgcaggagcaacgacgacctcgggaagaggcccaccgatacacgctcggcttctgggatctattctgcgcgcggaacctccagcagcacagaacaccgggaataacggcaggtaatccagcgggaagacgagaacgacactagggagaaaccgaacaagagggagtacgcgaccgacgcccccgcgagttcgcgcaatcaaatgggcaggaggcaaagacccggataggactacggacggcagctagcgcgacgggcggaggctcgagagctgccataaaacacgagagacagcgatgtaatgcatacagccggacggagggaacgttcacacctgtgatatcgcacaaccccgttctccgagtcggatcagcatctacgggcttgaaacttcccagaatatggcgaggtcagcgatcgacccaaacacgatcgagccaaagaacgccaccg

SEQ ID NO: 130175 - DNA, 1033 bp, Arabidopsis thaliana columbia
tggggactaatgtaaggaacacggagtgaacgagcgtcatgagacgtgaaatggtcacgcatgagattaatgcaagacggaggatgaaagatgtttatgaatttttggtgcgagaaaacacgcatgtggacgagtcgaaagcggcacgagaggcgtaggagagcgaaacgtcagagacggaaagacaacgtgtgacgtatgatacgcgaggcggagagtgacaagcgtagacgatgagacgtcgtagcaccgagaataccgataaggctgaggaagagcgtccgggaccaagagtgctagagaaagcgtcgatgacgacacttacgaggatgtgcgtgaggtgacatcggacaatagaagagcaggctgcagttcgactcgcggagaaattgcacggactcaatcgtggagagaggtgacgagacagagttcgcgtaagcgaacgtgaggtcgggtaggacagggaaaagtaaagaggagatgaatgtgggacaatctggcccggtgcaaaatgacgagtagggcccatgaggtggctagggcacaagttgctcggcggatataaccagaactcatggagagtgccagaagatgttgccggcgagagaacgcggggctcgtgatagattagaaagggaagatctccggaatcgaggcgaagtgtgatctgtagtcatgattgaacaccagagaagccgtagtagagcatcatcggaatgaatgtagctaaagactgtacagtcgtgcgcaaagactcttatacagggacgatgaggacggttgtccatcgaacggtgtcaagtatgggcacagcagcggacggaagcgtgagcgagcgaggaagaccgactactgacatatgacgggtggggaccgtggagtattcgattagtagcgttacgcgttcacggagagagagtatgtgtgatggaagaggagatgactcgggtgggggagactgcgagataggtgtaagggtagtgacatacgtagtgtcaagtataagcgcagggagcgtacggcacaagatgag

SEQ ID NO: 130176 - DNA, 728 bp, Arabidopsis thaliana columbia
accgggccccccctcgaggtcgacggtatcgataagcttgatatcgaattcgcggccgccaaaaaactcaaagtttaccactagacaaaaaaatcgaagcttttcactttctcttttttctgctttgttgtctttggctctactctccgcactgaatctttcgacacagcgataattgtttccttcttttgggattttctccttggatggaaccagctcaattaatgagatgacatgagaatgttcagcttgcagaagatggctatggcttttactctcttgttttttgcctgtttatgctcatttgtgtctccagatgctcaaggggatgcactgtttgcgttgaggatctccttacgtgcattaccgaatcatctaagtgactggaatcagaaccaagttaatccttgcacttggcccccagttatttgtgatgacaaaaactttgtcacttctcttacattgtcagatatgaacttctcgggaaccttgtcttcaagagtaggaatcctagaaaatctcaagactcttactttcaagggaaatggaattccgggtgaaataccataagactttggaaatctgacttagccttgacttattttggttttggaggaccaaataacctaactggtcggcatcccatcccactattcgggaaatcttcaaaaaaacctttcactttcttggccctttgagtttggaaacaaaaccttaatgtggaccta

SEQ ID NO: 130177 - DNA, 1268 bp, Arabidopsis thaliana columbia
ttggtgtacgctggagtagacgggtactatacaggggcggcatacgagacggaagaagttttttttttgagagagcacccaccttttgaagagcatgtggttgaggaacagagcacaacacccaaaagacatgtagtaaatgagtctggataagagttggagtggaagagggaagtcctaaaggaactcagcatagggtgaaaggtggagggagatcacagagctatcggggagacaggaaagagaagcgtcggcaacaccgagataagtggagtcacgtcgaactcagatgacggtgtggataggaataagcaagtgatggtcgagatatgacgaaatcgttgacgaaggagaacgattttgcgaccaaggaactacaaacacaatgacgaggcagatgggtaatggccgcgttattacgaatcagcgacaagataggttatcgattgtagaaggacgatgagctagctgaggggtgaacgatgtatgagtgattatcataggaacgttgcatgaccattcatctagagaggagccatcggcgtcctacgtctaatcactaggggtaggaaaccctaagcacgaggatcactatggccacccaacaatcggaggacgatagagtatgtaagaatgagtaggacagagggcgagagaaagatatgactgtcagacgacattttacgagtgaatgctgcgggctatactcttcagagcagaaagtgcgtacgccggtcgagtcacgatgttagatctagaaagtttgaaagggacatcaccgaggggcacctctgatatatattcatgggagatcgtgaggcccgccacgaaagatggggctgacaagcacctcgcgaagtggagggagcgccgacgatgaggttatcataagatggggtggaataatggttgttgctaaatatttatggacacgataagagtacaccacgtcgacgcgttatgatcgggaatatagcccattttgttcctaagaacaggcattaggaagaccgcacgcaaagagaagcctgagactcagcaaatggtgggaaaaattcgaccgcccacaagaccgtgtatatgtgaataacctgggaccgatatgagaattagttcacgagaagcccccaaaggaacgatgaggggggggaaaatagaaaaatgtgcaaaaccatgcgcgtgactgggatccacgagtattaatacccggtaaaagcgtggacccgagtttggaaacgagatcatgacgaaatgagaactggggatgg

SEQ ID NO: 130178 - DNA, 746 bp, Arabidopsis thaliana columbia
caatcgggtaccgggccacgcctacaggtaaacagaatcgataagcttgatatccaattcgcggccgccaaatcttttatttgcaaactgaaattggtctaaaacgcaattgcgtgatttaccaaaacaacatagcgtcttctcatcaatcatcatcatccacttaaacatgaaactatccacacaagataaaatgaaagtgttacaatcatcaaattagacacatacaatggagtataccaacacttgatgagctagatactttgctccttctatcaatcggaaaccgtttttttatgagattgcatccataaatatacacactatccttatatggcttcagctgtactctcatatacactgaacttgcattcctctattataaactaaggacgaaccttcccttcaacgtaacactgtttagacaacactaaaccggcctttcacttccttaaaccgggatccgattaccgcgaaccgacaaaccgagaaaactcggtttacatgacagtatctatcggctgcctccagttaaaggatcttacacttgtataccaaacccccaatcttggatcgcctaacatgtgttaacaacggatttaaatgtaactagacacttgaagaatttcaaccttcttttttttctcccggggaaacctttctgaatttatttactaaccttcaatttcccaaatggagacatgcgcaatggtgttatattaaacgttttttcaaacacaagtttt

SEQ ID NO: 130179 - DNA, 935 bp, Arabidopsis thaliana columbia
  unsure (1)..(935): unsure at all n locations
caaaaggcgaatcgggaactcggcccaccctaaaggtcgacggaatcgataagcttgatatcgaattcgcgggcgcctctgctttttcttattcacatcaatgtgcgcgtttgtcaatctatctatactatcatccacaaagcctctctatccgagtttgaacttcgactcttcttccaaaagagttcatcaatctccgcctctgggattacggaatctggaggattcgaattccttgatcgtatcaatcaaatgggggatcgatgtactgaaagtgttttaccatgattaagcagtgacattgatgacttgctgtcctatagtccttgtgctctaggtgcgaattgttggtgagacagtatagtcaagccgtatacagacaacgtgatgatngtgggaaatcgctatagaaaaggcgtattcgcaagttgcatcatcataccatagagcgtctgtgaaaagctcccaattagcggttacacgtgagctttcttagtctatgcacatgcatcaatcacaacctgtagtgtttctcgccgtatatcattgtgagcaagaaaacggccagaaagcagccacaattgaaaaacctttgccgccctagggccattagagatatgaaacttatgcaaaggcaaccgccttaattcgtgaaggagccttccttttaccctatccgctcaacaaaccgggtgggaagaaaaaaaataaccctctttggtaaatttccccgaaaatctctaattcctatataatggcngctgggagttaccacttacaattaaagggaatggtggtgaaaaccatggtaaccttggatgattttcctacccacttgatagggcatttctcttcctcggatgcccattcccaagcggaatgcttacccgggcctataatcagttgtaggtgaagggaccatttcttccgaatta

SEQ ID NO: 130180 - DNA, 315 bp, Arabidopsis thaliana columbia
ccgtcgacgggttccttgacgcttgatatctgaatctctcggtacgcgactccactttttttatttttcacccttaatgatcaagcatgcatgatttgttctctggtatgctaaagattctgatatgccatcggctataccacctacatattcgcaagtattaggattgccgacgcattagtcccgcgtgttgttgacggactatccacagtagtgctgaccgatacatgtaatgcccgtccacagcgtccttattagtgaggtcgttggatatggacctggttgacaacgcagcacaaccttcgccacctagtc

SEQ ID NO: 130181 - DNA, 723 bp, Arabidopsis thaliana columbia
ctatgactgtcgcatgcacgcgtccgtaagcttggatcctctagagcggccgccctttttttttttttttttttttttttttttttaaaccacgggcctttggttattttttaaaaaaatttggttaagtggttaaaccaaaattaccaacttgggttcttttaccaagggccctcccggaattttttacctccaaaggtttttaaacctttattttaaccccattcaagaaaaatggaaaaccaggtttaaggtttaaccctaaaaaaccctcaaccaccgtgcttaaatcagggccaccgaatttttttcacccttttttttttggtggatttaaaccctttccaaaaaccggttttttggccgggagggggacccctttgggaccggtcccttgggtttcacccgaaccacctgaaacctgtttttggagaaccctacctggtgggggccggattcccgggttggattaatttgcccagcagggttttacctgttgaacaagggaggtttttctttttttggtcctccaaaaaaccccctttttttggcctaaccccccgatgtgaaaacctccggctttttttaaggccggtaaaacttgggcctggttttaattggaaaaacctttttccttagaaaccaaacacctatcctttggaacctttagaaaaccttccaaaccaaaggacctaccgggggttggttttggaagtcctctgg

SEQ ID NO: 130182 - DNA, 241 bp, Arabidopsis thaliana columbia
tcttcgctcttccgcggggcgttgtgtttttcacctcgtcccgcttccacacgtggtccccgcctccgggtcgcctgtccccctcctacatcttccctggccgtttacaccccgcattgccggccgaccgccccgccccccgacctctcgtctggcttcggttcactcgcgccgttgcccccgtcctcgtggttcgaccatctcccgcctcgctactcgccgttcctcccccctctttgcc

SEQ ID NO: 130183 - DNA, 696 bp, Arabidopsis thaliana columbia
catgacgtcgcatgcacgcgtacgtaagcttggatcctctagagcggccgcccttttgtttttttttttaattttttttcagagctttgaaattttgattgtcaactaaaaaaacatttcataaagtaatcacaacttctgaatcactcttaacttagcacttcttgctctgcgattcaacctttcctcttcctctgaaggggttattggtctctttgtcaggattactcctttcgacgctattactgtctgtttgatccactcttctttctcttttaattccttctctactctttcttcgatttgcctttccggttttacactactttcctctccgttgatctcttctttttgaaaccctaagatgtcgaggaacgtttgttttacaacccgatcctccagactgtgaaaggagataactgctagtctcccacctggagcgagaacatcgaatgatgagtagagtgagttttgtagtggcttgagttcggcgttcactggaatccttaggccttgaaacacacctgttgctggctttatccaaccttggctggcctcctctgcttgcttggtgacgcaccccccgaatgaaaaaccaccccttttccccccacttaaaaaatgttaacacccccccccattttaagagtttccgaggcccctttaaaaacaaaattttctttatttttttttgga

SEQ ID NO: 130184 - DNA, 594 bp, Arabidopsis thaliana columbia
cgaactgggtccccgcctacgttaacggtatcgatatgcatgagatggaattcgcggccgcggttgatttttttgtacggacaaaattcttctcaaaattctatttgatataaaacacgaacccatcctaataggatctgaaagtgactcagataatgtaacacgcgatgctttccttcactattaggacagtcaaatatatagtgagccctatgtcaattctgggttccattctcctactgccacacagaacccggtttgtcaatcatcggatttcgatcttcaagactttttaacattctcttcattaggcccagggactttacatgtgaattacacgcgttaataaatattcttaactaaccagcgattatctattgcttgtttaaaaaggaaggcttcgtcatacgccttttgttttttttttttacctggtcaaagttctccggaaagccattgcttgaagcttcggctgtttcacacaagcgtaaatcacttgagtggtttgttgattcactagaacatatctgataatagttgatatgtgacccatttttttcttccgtagcctctttttaacccatggaaaaccct

SEQ ID NO: 130185 - DNA, 484 bp, Arabidopsis thaliana columbia
gatgcctctctaactggatcttaagggcgctttattattttttttaaaattgtataataatttgggttttttgttattttagttaaatttttgaaaagttgattattggaaaaagtagggataatgtattaacggaagaaaaattttaatagggaatagagtttaaataagaagtatataaaattatagattaggttttaaggaggtaggattaaaagagtaagatattatagagatattgtaatatattgttaaatgtaaaattttaaaaatatataaaaatagtaaatatagtaatattatgtatgaaaattgatgtaagaattgaatataaataaaataaaaagtgaatataaataagtgaaaattattaattgtggattggataaaagtatgtatgttaattagaagaagtatggaaggaagagagggataatcagaaagattgtagttatataaaaatatgggaagaaataagtaagta

SEQ ID NO: 130186 - DNA, 746 bp, Arabidopsis thaliana columbia
ttttggcgagctgtgacctggcctgcacgcgtacgtaagctgggatcctctacagcggccgcccttcgcggtcgtcttatttttttgtttttgttttgtgtaggaaagaaacgctacctattaaaatgatccttgcgacagaatttggtgttgagaaattactagaacatgaaatgtggtttcatttattcataacgaggttggtcgcgaggaatgataggaacacaaaaacttacacgcggacactcccgggaatatatgacggaagctttgtgggatgttatgtatcccttgagagtgtaattaacagcctccatggaatcttgttgggggttttacacttgttttttccagattttgcctgtatatctttctttgtataccatggggattgtggttcgtgaagatgtataataatggggcatcatctcaaatctgttttcctgtcccataatcaatccccccaagagaagatgaacaaagccatgttacttcagaaggatatccttgcttttaaggcaagaaaataataattaggctgactcctggtttcggcgcagaaattacgtgccggttcctgagatgtaaccgaatctcccttttatgagtacttatataatcttggggaacaatggaaaacactagtttcctcggatgaaattgttctacagttcaaaaattccacacaaaaataaaaacccgaaaccgtgaatttgaaaccccctggtggggactttaatagtttc

SEQ ID NO: 130187 - DNA, 772 bp, Arabidopsis thaliana columbia
gaggtgaaccgcggcagttaccgaggagaggcggacgagtcgcgcacctctttctaggttttttgcgggtaagaagctgataatgagccgcacccacggaaaataagacgggaggacgtggcgtagacacgactacgtcggagaataggatataagcaatcgtgataccgccggaaccgacacagaccgcccaagcgaccagaaatgtcgacaccaaacgacaacagagcacgacacgcagtagcgtgtgctgaaaccacgtgagacgacaacggcaggacagggctcgctacgcggagcaatgttatgacggtagagagcgaaacgaaactcgagggtgagacacaagaatggagaacaatgagacgaaatgcctatcgaacctatgcgagcatgtgcgtcaacggcgtagtgggaaagtagacgacgcggtcgacgccagaacagcaactacatggtgtgataaatatgcaaatgtaaagatcgaaaaatggcggagccacgagaacacgctgacgcgctcgatccggggcgagacggagccgcgaaggcaagaagcgaaacgatagcgagattacgcgacgcggtgccgaaagccatcttagcacggagacagagggccgaaaaacggcaatatgtaccgacgaacatgtagcgctcgataaacaggctgagacattagctgcgtcatcaccgttatgagaggatgacgtggcttgcgcgaacctgccactaccaaggcgaacgaaatagccgatgagccgccggttat

SEQ ID NO: 130188 - DNA, 713 bp, Arabidopsis thaliana columbia
ctatcacgtcgcatgcacgcgtacgtaagcttggatcctctagagcggccgcccttttttttttttttttttttttttttttttttttcatcaccctcttagctggaaaaaccagagattcagtgttttaaccgatccatatatgacatatctaactaacaattttatggaaaagtgggaaggaagatgaaactgtggggaccttaattaagtttgttatgtaccaacacatagggcatttgtgtgaatgttttgagttacattttgacaagccggacgtcattctggccaaaggcggtaccgcagcctggacatttccggtgtcggatctctaagctacgttggatgcattgctggcaaaacagatgataacatttcacaattaccacctttttaggccgatcaaaacatacaccacatttgaggatgtttttgcaattcttaacttcttcctggagcctcacaattgcagcttttacactctcagaacccaactcttcaagctctttgttcaactccataagctcttcctcaagcttcttcttctccctcctttcatcatccagttccagtttgatgtcggctggcctcctactgatctgttcatattccttttcggatgaagacacggccgacttgagcccatttgaatttccttggcaagcattaaggctccttccccatttgggtggttttcgaggcttggataaacg

SEQ ID NO: 130189 - DNA, 766 bp, Arabidopsis thaliana columbia
tgtgactttcgcatgccacgcagtacgtaaatcttgggagcctcgtaaagcgggcgccccaatagggatttttttggtttaagacgaaactaataagtactgaaccaaagttcggtgatttgtaacatcaggaaagggaatccatatgtctaatttaaatcaactaaaacccacacggggggactaatttagaaccagaaagagtgagagtggtcgctacaaatgataccgattgaaaaaagagagattaccacataaacgagggtgagaccaaaccgtaaccccagagaacagggggtgggtactctaccaacttcttttttcctttggcatcggctaatcaggagtaagcatgccgaatatggtggtggtggcgcgggttaagaaggtaaaccggaggggggggagcatccaccgggcctgcagttaggtaccactattgctagtccggatacacctgaacccgcgagaaggtctgggtaacaaacccattgaacccgtcctcgtggggatgtaatggtaatggagggccccccggtggctgtcagaaagatcaagtggaggacagtgtggtgtatacccggcaaccccgttagtttgaaagtgagggcggacctcaggggacacacaaaacatacacgagtgactgagagagggatgacatagaaataataaatgaagattctgtgatgcgggggactttgacgtgtctaaaccgggcccttttgtcttgttggtgcgcaagaaggtggggcatatactatgg

SEQ ID NO: 130190 - DNA, 1176 bp, Arabidopsis thaliana columbia
  unsure (1)..(1176): unsure at all n locations
actatagcacgagctatgactgtcgcatgcaccgcatccttaaagcttggatacctctagagcggcccgccctttattttttttttttttttttttctaacaattaaacctttttttttcttatctgggttatacttttcattaatcccacatataccataatacaatattaaccgaacagtttttttttttttttttcttattttatccaagccgcgcccgggggggtcaccccttagatacatccacccgcacactctggatatacaacacaatacgttccatactaatataaaccactactacagagaaacatgatcgcgccatcaaaaaaatacgcttcacccagattcacacactcatgctcatatacccttatcagacatacttggttacctaccccttccaccctaggataaaactcaaacaggaccccgcgaaactttatttggtatgtgtaacaaagcccccttaagccggctaaaatgctgattcacttcccttacgancacgtaatatcaccgtgcgtatgacgtgagctcctaccctcatatctacgaagatgtaacaacatagtaattcagcacaccacactccatctacaataatgctgtccaattctgttagcagttcgcatacactcttcacatatctcacttacaatcctcatcgacattgttatcacctcacaatctcactgcttctggtgagaagaacaaatatcacatgattctccagactcaagaagaactccgcgcgtctacgtctacgcctacaacatattgtgaggattagacagatttactatctcataagatcgccccattttctatcctgagagaatcacaaagtctgccacttattggtgataagaatattacaacataacgccgcacacaaaaggaataagagctttaaccccctctctctattatattctcaacctccaataatatcctgctcgtcgaaaataaagaaacccaaaaggcctcctctcagtgccaatccagaaaattggcccaacataggtgtaccacatttttcgataaaaagatgactagtgacaaaactcaccctcctcttctttgttatcctctaccatactactcacttctgtcaggaatatgccaccaacaaatttattattcttggattgaacagaatgagctccaacat

SEQ ID NO: 130191 - DNA, 708 bp, Arabidopsis thaliana columbia
gccccccccggatgaaattcataccctttgaccagctatcacgtcgcatgcacgcgtacgtaagcttggatcctctagagcggccgcccttttttttttttttttttttttttattcaaatcacattcattgatagagttacgaggagagacagatcgtacaaagcaatcactcttacatgaaaaaaaaagacaaatggaaaaagaaactgaagagttaacttaaaagataagagcccagacggggaagacgacgagacagatgatcccgacggtgttggagataccattggctttagtaaatgcatttctgaatccacctgaagctctaatgtgttcttgaagcaagtaacatccaatacctaaacatatagctaaaccaatccaactgtctctgaatgtgccagcaatcaaatttggtgccaccacggcgagaagaaccaaagccaccggtaattccaggtattctaataacacaaacaacagagataagccaaatcagaatcaaagtcttgttgcttgtaatggagagtgaatgaaaaaaagtagacaaacctctggcgtgtttaggaaagaagagttgtacaacaacagctacgaaagcaatccatttaccaatttctcctctgtcaaagtttcagacacaagttagggtttaggaacataatgataagtaaagaaaaagtctctggcttttgttgtgttatat

SEQ ID NO: 130192 - DNA, 567 bp, Arabidopsis thaliana columbia
ctatcacgtcgcatgcacgcgtacgtaagcttggatcctctagagcggccgcccttttttttttttttttttttttcattccaaacaaaggaaatgtgatttccaacaacacgtgagcacaaacaaaaacatttcgtttcgacaatctcttattcagataaataaaactttaacctgacctatcccaccggaaactcaaaaaacacacaaacaggggggggggtgagaaaataccgttttcgagatgccgcgtttctttgtgactaaaaaagttgttaacacgcccagtcaaaacgaacttgtttttaaaacgagttccactagaaaaattctcacgagacggctaacgaaccattatttctcctttacccctgggacttaaaacgctatataactgggccccacatggattagacttggcttccatcgtgcttgcaacctcgcccaaccaaaaaattcggtgtgatacccaatgcaaaacgtgttatcctccccaaaccgggcaccaccggttctatgtcggaaataccgtttctcaaccattccgcggagatgctgtgggtcggt

SEQ ID NO: 130193 - DNA, 682 bp, Arabidopsis thaliana columbia
cgcgtacgcgcgctcggatcctctagagcggccgccctttttttttttttttttttttggattttgagccccattaaacgggatataattgtgcaggggtattgcatcgaacagtgcaaggctccctataccaaaacacctaacaactgaaaaataatacgagccaaagctgagcacttacaggaacccattaatactaaaacgcataataaaatccacacctagagaatccttggcgaactacatcgaatgacctcgaccatagcggcggtcttcaagcactttctcctgtgattctcctaccgagctggagctccttagggatgatggagaccctcttagcgtgaatggctcacaggtcttagtcttgaaacaaacccgcagggcttgtctcagaatcctcttgaagaaatagcaactgggctgttctgagagctcaaatccaacttgaaagcctgacctatgttacgaccctgacggtgtcaatggagcggacggaacaaaagtctcaagggctctttctgataactaaccggccttgcctttaaaggaaaaccaggttcctggcaccggaaaggctaatagacgggttttacccccacaactccccataccgggtaaggggttggtcaacccctataaattttatttcctttggccccggcccctctagaggggtggg

SEQ ID NO: 130194 - DNA, 305 bp, Arabidopsis thaliana columbia
  unsure (1)..(305): unsure at all n locations
gcatgcacgcgcccgtaagcttggatcctctagagcggcccgaccaaanaaaacattttttccatatatttacgccaccccaaaccaccaagaacaaccaaaatcaccatatggtgggcaccccaccattcgcacaaattcaccaatacccgcaggacacccccaaaccacataaaacgatcacaacgaaacaccatacacaaccaccacacgcaacctaatctactacacacaatacatccatgatccatcaactaccaatagccaaacgaacaatctaactattcacatatcactcaatcaac

SEQ ID NO: 130195 - DNA, 252 bp, Arabidopsis thaliana columbia
gctcggaccctctagagtggacgaccttaatcctatcattgttttttctgtttatttaagacggagaaagtggcatttccaatcaggcatttgggtggcaaaaagctcgacacctattctcttggtcggcatcataatatatcacatcattgtatcgaggtatcaccaaaatcatatcactcactctgcacaatacacgtctcgttataactcatctatcatgcgatacgcacagctcgagtgatatatatc

SEQ ID NO: 130196 - DNA, 196 bp, Arabidopsis thaliana columbia
gaatgttacgcgtaccccgaccctcgttaacgctctagaacctgctagcagcgttattcaataatctgaacctttttaatgttttttaactaacatcttcactcaccacgccacacaggggtagcgtcgatttaaaccgtgacaaagcactccgggccgacacaaaaggtatctaatcttataacactcaaaccat

SEQ ID NO: 130197 - DNA, 428 bp, Arabidopsis thaliana columbia
gccggagtacgcgtacgtaagctgggatcctttagagcggccgaccttttacctattctattttttttattttctctgaacagagctcaaatcccattaccagcactattgggtcttcatgaaactagaagaaatccccctcgctttaagattatattagacaccataccttaatccattgaggctacatacatgaaactcaacctcatttgattacaaaaaatagcgtgctgtgaaccacatggggagaaaaaaaatgctcaataatactcctctttacattccgacattaccttcatgatatgagacaaactccctattaacctttacatgtgccgactttatactccaaacacatcgtacaaatatgtttatccagatgtggcgatatatatatcccaaaagtatatgacacctatatatcatgt

SEQ ID NO: 130198 - DNA, 1022 bp, Arabidopsis thaliana columbia
agcgagtcgctcgagctggaccttaagcggcgcctacccccaaaatatttttttgtttttagaaaaccatccaatgttcttagcctgacttgtggattactagccaactcatattaaaacaacaattatcagtaatgatgtttattccaatactcccgcgactgtctccattaaagcaccgagaccttttttttaaaacccaaatgttcacatctcggccggctttttaacattgatctactatacttatagaaaactccaattcttttccgcccactgtagcacctttctatttttctgtgggaggctctcggatttaaaaccaacatgctatgtagaacatctctatgtaacagtggctggcctatttaatctctcccgcctggactctcctaccgatgggtaattgatataacgattctagacccattggtgtggaacttattttacaataccaatggggaatcacaacctcttgttgatcttgatttaatcctcagcttaatgcggctcctcttttattatagcacgattttccacaccacctagtataaactcacgcacacaacacaaaaatgtgaaccataagaccggagtaataacgatacattcgtgcgtgctctatcgagggcctatattcgcataaggaaatgattaacattctgcgatttcgttttctttactctctccaattaagagacccacctcggttcattgaatccacttcctattcacaattaagacattgattaaaaacctactcatttatcacatattcttgtgtataatatctgtggaacacgttggatctatcgggtgactcacctccgcttattgaagcactattttcgcaacgaccctcttatgtgttctatattccgtacgccgagttctggatacttgtcctcttgtttcactcatttattcacaggtttgactttgacatccctctcgtgcgtggaattaatccttctgttggacgtgatcgctactcattctgcgagttaccacggtgattctct

SEQ ID NO: 130199 - DNA, 657 bp, Arabidopsis thaliana columbia
ctatgacttcgcatgcacgcgtacgtaagcttggatcctctagagcggccgcccttttttttttttttttttttaaaaagagcttgataatgtagaatttttaaaatgaaatatagctttttttttttgagatttggaaaacagaaaaaaagaattgtgaggagtatggggggtgttaaaaaagaaatagaaaagaagtttatcaagcggaaaaagaggttttgacgaaaagaaatttttgaatagaaattgaacccccctgaaaagggaggggggcacaaagaatgggcggagggtattttttcatgcctagggcaaagactttggacaccgttttttaaatttctcataaaaacgaaggtagaagccattttttggagaaggggatgaggcaggcccaaagaggagaccaattttgagggtacacagaggggcagagatcccaagggtgtgtaaaaaggcaccagtgggttgtgaataaccggggcaaaatatggataaggcaacccgggggggaggaaaggaaaggggcggaaagaagaacaaattctggggggtataccacggggggaaagaaattctctgagaaaaacaaaaaggaattattggtgggaactttggagatgtctcggcgcatccccagagggggaggggggg

SEQ ID NO: 130200 - DNA, 697 bp, Arabidopsis thaliana columbia
  unsure (1)..(697): unsure at all n locations
tcgcatggcacgccgtcaccgtaagccttggggatacctctagaagnncggccccgcccttatnnttttttatttattttccttttgtcaacgagggctacatcattatcactattatatttattgattatggcggttgaacgctctgttctatgaacgtacatgtatccataacctataatagatagcagccctcatgcagtaacacagcgtcgttgacagtcagctgatgtccacagaacggacgatatcataaacggttatatatccggtctcatatgtcttatgaagcaaacaacctctgggctcaccgatctgatgcatttaccgttgacgattctaagacacatgctcttctcactcgcagtaagtacagaatctctgtcattataccttgaacgactcgcagtatcggtgagtattagaacatatccactggacctctggctaagttataatctaccttctagtgaaagagaccgtgcactttgactcattctctgtcactagagattcctgataacacttcatgatcgtttgatacgtaatcgaggttatatactagtgacatattctattaacaccgagaacgcagctgggagacgatcctcaatcattcaacaaggtttcttcaccaattttatcaccagttatgtgatgcacctgccgaagaacagttttagaatgtcttttcaca

SEQ ID NO: 130201 - DNA, 578 bp, Arabidopsis thaliana columbia
catgcacgcgtccgtaagcttggatcctctagagcggccgcccttttttttttttttttttttgaaaaacggacacttgaaaaaatctattatattgggaaaaactcacagcggattaatccaattacacaaattcaaacgtgaaagcaatattatactggaatgcaaggaaaagttctaaacacttatgatattccacaaaactctccataaaaatagaatccaaagttgactcactgtctagacgccaaggacgtccacagtttgtctgatagacaaacctttcaggaaccaatatatctacctatggatttttctctatgaatttctgtacttacatattattttcgtaaaacaaaagatccactagttggtcattcttcttatcatagctgaatgtgattctatgggcacaaacatgattgatgtacaatccaaggcatggaggtttaaccccaactttggacggtcccctacaaagggtcctgttcccgttaattggggagagattgtagcttcatgctttaaaaaacaatagcgctttttaagtggcccggtggccagcttacaaaaacggg

SEQ ID NO: 130202 - DNA, 306 bp, Arabidopsis thaliana columbia
cgagtttggcatgacacgcgtcaccgtaagcttgtgatcctgctaggagcgggccggcccttatgtctaattttttttttatttatcgacgcaggagccaccactacaaaccaatagtgatatgggggataaaccagaaagaaggaacacgcttttcaagatagaaacacaactgaagagagatctcactggaatgcaaggacgacgtaaaagacacaaggtgtgtaccaggaatcaattacaacatctgaaaaggcgacgtgtgaccttccttattcggaaaagccaagcccgcgctcaaggggg

SEQ ID NO: 130203 - DNA, 1109 bp, Arabidopsis thaliana columbia
  unsure (1)..(1109): unsure at all n locations
ggaaaaatgggccccccacgccccccgaaccccccgcaaaacgcggcccgcaccggancgcgcccacccaccccaacattttatccccacttatccgaacccaagaaaaaacacaccccccaaaaggggggaacacgcggggggacaaacaaaacaccccaaaacgcccccctacccccacccaacccacaaacagcacaaacaccagcgcccccaccgacaccacacacaccgagaagggaagacaaaggccccaccaaccccaaaaccacggaacccggcactcccccccaaaagcaaacgcccccacgaccacacggcacccaaagcaaccccggacccaccccgacaaacccccgtcaccaaagaggagaaccccagcgagaaccaacaagcgaccagccgcccccacaacggaaacaacaccacccggcgcacccgaaagcgccgccacccggccaaagcacaaacacaccccgagcgcacccaccccacaggcacaaagccacagcgcactacagcgcccacccagcccccaagacgaagccaagacacaatcaacaacaagaacacgagcggaacgacaccaaccaccccacaatcgcccccggaaaacaaacacaacccactcgcgccgcacaggtagaacgcaaacaccagcgtcccngacgaagaccaacaccaacagcccccatgcaagagacaacaaccccagcaccataacgaaaacacccaaaccaccccgcaccagaaccccaccccacgcaactcacccagacaaaaaaaacacgcgacaacgccacaaacccccaaagatccccggcccacaccgacaacgccacaacacacccccggcgagggagccaccccatacccccccaccaaacccccaccccaaaacccgcccgccgggaccccaaggagagccccaccgaaccacccacccaccccacagcccgcaccacaaagaacccaccacggccccccggaaaccccaaccccccaggaaaaacacgccccacacccccaacaaaacccacacgaacacccgcccaccccaaaaaaaccaccaacaacccccaacacacacacccccccagccaacccac

SEQ ID NO: 130204 - DNA, 675 bp, Arabidopsis thaliana columbia
aatagacgagctatgacgtcgcatgcacgcgtacgtaagcttggatcctctagagcggccgcccttttttttttttttttttgtacacgaagtaatattctgtaatttcaggattaagatcatgcgtcatactaaacatatgaaaatgtcttattacaacctgcacagttaagtcaatatatataagcaaactcaggggaggaatttaaaacacaccacagcgagcccaggaccaatgcctaatgcagtattcatgtaaccgaagccagacttgtttgactctgacggagtagccgttttcttagaggagtttgacttatctgagacatcaagagattttgattctggaggaggcgccattgatgagatcttacgtggttcaaacatttgttacggcagcaatacgatgtccaccacgtgaaccgcaagaggacggttttgtcttaatgagtttctgagacgtgtctcaacgaggccagtgtatacagtgactagattcccttgaccggtgaaggtaaggacgtgaaccccgccaacgggttgacctgaagcctgaggtctgaccgggttacttacagagagaagatcttccagagtgtagcatttgggactgatctggaaaagagtgacgtcgacgtggttgtcctggcttagtttgtatacgggtccgggcca

SEQ ID NO: 130205 - DNA, 669 bp, Arabidopsis thaliana columbia
  unsure (1)..(669): unsure at all n locations
nnnnnnnnnnnnnnnnnnnnnnnnnnnnnnnnnnnnnnnnnnnnnnnnnnnnnnnnnnnnnnnnncttttttttttttttttttttttttttttttttttttttttttttttttacactcaaacaaaacctttttttatttttttttatccaatacccaccacattttttaaaaggccgtaatccgtataaaatcataattcaggaaaagcctttccttataaaaaaaaaattatgagggaatatatatatgtatgtatgggacaaacccatttttggccctaacctttttaggggggttggagaaaaaatctttttggatccaaagggggaggaagtggtgggtgcatttgcggaaaaaagggacccatccggctatcccctcccatcggcgtgggctgagtaaaccatgcaaaaaaggcaaacttaggatcggggataaaaggaaactgaaatcgaaagttttgggaaaaagcttcccacgggggacaattctggggcaaaaaggggttgggaatcatgttgcaatggatattaggagggcttgcaacatctgggttaatataataaaggcgggggagaccgaaaacgggcatccccctgcccatccctaaacccaggggattggaaaagaaaaacttttgtagctgtggttggggcaggaggccaa

SEQ ID NO: 130206 - DNA, 680 bp, Arabidopsis thaliana columbia
  unsure (1)..(680): unsure at all n locations
nnnnnnnnnnnnnnnnnnnnnnnnnnnnnnnnnnnnnnnnnnnnnnnnnnnnnnnnnnnnnnnnnnncttttttttttttttttttttaagaaaagactctgcctataattaattttagatgatcgagaacaccttgaacgttctaggtgagctagaattataacgagcggaacctaccacagtgagggtgtggacaaaagactggcgagacactccatgctgtctagctgtatgcttaatttatgacgtactctcttaaacactttcataagaggctttctgcctaaagatggtgggaatcgatatcttaagcctatactgagaaacaaagactcaccgccactgtattgttagatcacgccactgccgcagccatctgatactaggctatacgcttcctacgaaacatcctgggcttccactctccgtgaagaacggggatctgaagaagctcacctactcctcccttgcttgagggaacatggatgttccggcgaattgacttcgattttcccagcctgttgctatatcattcccagacggggaaggtcctgagcctaattgttggttacggaaccaaacaaggttcctagacagtgggggagacgtgggattccctaatgcctttacagggagaaggactaagccatttcccttcagccttttgtctctttaatgc

SEQ ID NO: 130207 - DNA, 379 bp, Arabidopsis thaliana columbia
acacaactccgcatgcacgcgtacgtaagctcggatcctctagacggccgcccttttttttttatattctttttacaagcaaacaccccacaaaaaagggggaaagggggaaaacaccacgcgctcccggaataaaaagaaaaacacaaaaggtacatcctccctgcacgcggagtcagaggcccgacatcgcccaccaagagtttaaaagacacgattcaccaagaaaaaaacagcgggacctcaacatcagcatgacacgcccagtgaacgcaaaaaccgcacgaaacgagaacacaaaacgcaatagcgaccccatcacgacaaccccacggaccaaataacacacccaaacgaccccccagccaactaacattta

SEQ ID NO: 130208 - DNA, 659 bp, Arabidopsis thaliana columbia
  unsure (1)..(659): unsure at all n locations
nnnnnnnnnnnnnnnnnnnnnnnnnnnnnnnnnnnnnnnnnnnnnnnnnnnnnnnnnnnnnnnnnctttttttttttttttttggaaaacatcgggactcaccctttgctttgggaattggactatgcatagcattcgaacaagcctatgaataccactagaaactagctattcatttttttttagtggacgcttttgttcaataccctccaaaccccgcttgcgaagatggggtgtactgccggcctttctttgccattttctgattctagcgcgttctaatactagaaggtgcaacctccagcaactgatcctctccaatggattcggtgcactcgcccaaactctatgttgggggagtggcaagaatcactgtgacatcttcgttggatcttatgacggccgctgccttattcgggcggatattaagaaccaaggcaccgggtctctggcggatcccaactatcagacctttgtatacattcactcgcgaacctacaaacatttgccctatctactgggcactagtcagggcatgggagggtgatgtaccctcgtgaaaggcaaccagcgaacctagatcgcgggtgctgatattaacggtccaaggggcattactgataaatacagtgttcaggatagctgacccgccagaaggt

SEQ ID NO: 130209 - DNA, 679 bp, Arabidopsis thaliana columbia
  unsure (1)..(679): unsure at all n locations
gttnnnnnnnnnnnnnnnnnnnnnnnnnnnnnnnnnnnnnnnnnnnnnnnnnnnnnnnnnnnnnnnnnnncttttttttttttttttttttaaagatagaaaagcgtacattatctagtttaatgtcaaacacaagccataggctgacgttcaaagttacaacaagttcacagataataacagagtcgaaggtacatatttcactatacacacgagaggatacacaggagaggttatagttattagagaagggatcgttgttgtgtgaagatgtaaacctcgtcgtaaccaatccctgcgtatccacagtaagtaggcttatagttgtaaatgagattgctcagcactttcttagactctggtctgttcagtgacttcctagcttcactgactagatgatttgcggcgtgctgactcacctggatcgcgtcctcagagtgtggaattttagatgatccccactcgaatgcatttttctcaggatgccactggaagccggtcactggatattttgttgattgaactgttgaaacataaaccttgccgttgtcatcaacgcatgttgtgacaattttaaagaaattagacagagcaatatttccttcaaagctttgtggtgagataccaaaccgatgattctgcataaccagacaatctgtaccgagttttttcacggaca

SEQ ID NO: 130210 - DNA, 652 bp, Arabidopsis thaliana columbia
  unsure (1)..(652): unsure at all n locations
nnnnnnnnnnnnnnnnnnnnnnnnnnnnnnnnnnnnnnnnnnnnnnnnnnnnnnnnnnnnnnnnnnnncttttttttttttttttttttaaagaaagaaaagtgtacattatccagtttaatgctaaacacaaggcgtatggtgacggaaaaagttacatcatgttgccaaataataccagcgcacaaggtacataatatactatccacacgcgtggatacacgggggaggttttggttaatcaaaaaaggatcgatgttgtgtgaaaactaaagcgctggcggatacctattcctgcgaaatcactaaccagggtgcttccactggtgaatggagattgctcagaacatgtatttaactgtgacctgaatatcgactacgaagcttcactgactagatgatttgaggcgtgctgactctcctggaggggggctctagagtgtggaagtttagttgatccccactcgaatgcatgatcttttatgacgccagtgcaagccgggctctggatgttgtgctgagcgaacgggagaatactagacctagccgttgctttcttctcatggggagaccattttaaaagagatctacccacgagacatattttcccttcaacagtgtggcggtgggggagtatatcccttttctcgaa

SEQ ID NO: 130211 - DNA, 740 bp, Arabidopsis thaliana columbia
aatagaccagctatgacgtcgcatgcacgcgtacgtaagcttggatcctctagagcggccgccctttttttttttttttttttttttcagacttggaacaaaaacatgattccttatactatattagatttcgaccacaagggttaaaagccaatcaacaaaaaccacaaaactttttttgccctcgtatacatatggccaaaaaatgtttgcatttttggtccggaactgcaattttcaggattttgcatatggtaacccacctcagaaaaataaacccaaacaatctgcgatatctcccatcaatatgtccacctgggttatactcaacccgctacaaccctctggaacccatggaacgataacggggagcttctgggtggctggttttgcatcaaacaaaaaattagtgtatgaaattctggttcgggtagtttgcgtaataaagcccaccctctcgatggttatgcacataaatatcgggagagaaacaaccaaacttagaggggctataaccccaagtattgactttagctattccgggatttgcacagctcttgcgtggtattaagcaatgccccggtcacctaacttaggatgggactttctccttaaatggagaggtggtgaagacacacccaacttcttttatgtgggaagacaaccacccccaataaaacttttgtgcggggtaaacgcctttttggtctctataaacatataccggcgaatggggcccc

SEQ ID NO: 130212 - DNA, 673 bp, Arabidopsis thaliana columbia
  unsure (1)..(673): unsure at all n locations
nnnnnnnnnnnnnnnnnnnnnnnnnnnnnnnnnnnnnnnnnnnnnnnnnnnnnnnnnnnnnnnnncttttttttttttttttttttttttttttttttttttttttttttttttttttttttttttttttttttttttttaaaaaagagccggggtttcccttaaaagcccccccctttttttccccccctaaaaaggggaccccccccttatccccccgggggtttttggaaaaattttaaaaaaacaaacaagtttgccccaaaccccggggggggaacttttcccaaaaaaaggccccaggggttttgcccaaaaacccctgggtggaaaaaaaaagggctggaacccatcccaaagagtccccggggggcattcatggtttaatctctcaccccccaaaaaatcccccccccccaaaacctttttgttataaaaattctggaaaccctttttaaaaggggccaaagttcccccggggttcccggcttgcccttttagggggggggaaaacttaccgggggtgggtccaaccccccaaaaaaggctttcccccgaaaaacccccggaaacatcccccggccttgggggcggccccccatttgaagggaaagttcccctttggaaaggtttgggccgcccccccccttacaccctttaaggaagggcccat

SEQ ID NO: 130213 - DNA, 604 bp, Arabidopsis thaliana columbia
  unsure (1)..(604): unsure at all n locations
nnnnnnnnnnnnnnnnnnnnnnnnnnnnnnnnnnnnnnnnnnnnnnnnnnnnnnnnnnnnnnnnnncttttttttttttttttttttaaaaaacggaaacttttgaaatttaagtattatgttcgaaacaatgcggttgctgacgataaaactcgtgtttatatgggaaagcgcaccaatttttattctccaaaaaaagttggaccccgattggattccctcgggtcgttgttggaaaacattacagagaagatcatatggtgaacaccaaagtgttgggggtttcttttgccgacaattgcgcaaccgttttatcgccaattcgcctatggactaaaaagagctctactaaaatcttatcgatgtaaggcacaggatcctctatttggtctttcatcttagcgctgctgattttgatacgatagagattaatattgtggatgtttagttgagcccctgtaagatggacgccaattttggcgggggtctttcctatggcttcttggaggtgtgtaacaggcgaaaagatcagaatgtgtttccccccaagggggtaaaaggttgattatttcaatggggccggggggccccacaggggaaaaaa

SEQ ID NO: 130214 - DNA, 632 bp, Arabidopsis thaliana columbia
aacagacgcagctatgagtttcgcatgcacgcgtacgtaagcttggatcctctagagcggccgcccttttttttttttttttttttttataagacatgataatgagggaacaagagctctcggctttaccagaggatagaaacggatcagtctatagtgttccataaaggggacgaaaatggttcttaacatgaaaagcgatgggaaaaacgttgattgttccctggttttatgcgcctgaacacaaagaacacacagttcttggctttcacgacttggggcgacttaaggaatcataaaggagggtgggttcccattgcggagaggtttacaagaaaaaatggggttgaggatattctaaaggactgccccaggctgtatagggtctttacgccgcagacaccctattgttcttttgcggctggtgaagcattcatgaacaaacttttgaagattttctttgacgctactgatttaaggggcgctcttgtactgatgcccttttcggagggtgctagcaaaagcgacgatactatgcccaatgtgaacatggtcactctctgggaccaaggggttaatcttcgacttgcaaaacttgttccctgaattcttttgagggagattttttttaa

SEQ ID NO: 130215 - DNA, 682 bp, Arabidopsis thaliana columbia
  unsure (1)..(682): unsure at all n locations
nnnnnnnnnnnnnnnnnnnnnnnnnnnnnnnnnnnnnnnnnnnnnnnnnnnnnnnnnnnnnnnnnnnctttttttttttttttttttaaagcaaacaccaagattgcaatcacagttatattctccaaccaccgagtatggaaaatgatagggtctaattttcttacataaaagcagacactctcaggttactagatataacagcaaattacataagatagagtctttagtcttgaagaaacagacgagcgaagagtaaaaaagagcagtcaagaggtgatgaatacctctcacctgaaattcctaaccttggatggtaccctggttgggttgattgcactgaaaagaacctatagggaaccgaattatctttcaagaggtatatatacatgcaactgcaagaaccccactgtccgttaatggggttggttcaagatgtaaagagcattctaaatactgaatcttaaaccggatcttaacataagatagctcaagtgcggctgttacttcagagcttacccagcgcgaatatacatgagtaagcgggacctttctcctcaatggaagtttatagtagaccgatatactacaagacaatcttgtacaacatggggctagatctaattgtccttataactgaacgttagaattgatatggcgtgacttattgtgctcacctttc

SEQ ID NO: 130216 - DNA, 680 bp, Arabidopsis thaliana columbia
  unsure (1)..(680): unsure at all n locations
tnnnnnnnnnnnnnnnnnnnnnnnnnnnnnnnnnnnnnnnnnnnnnnnnnnnnnnnnnnnnnnnnnnnctttttttttttttttttttttagcaatttaagctaaaacatttaccggttaatcctccaaccccgttgttggaaacccaaaccttcattttacatggacactaacacaaacgtacatcttacttgacatatcctcaaaattcatggaagattggttccagtcccccaatgtcccctaacacactagaaggtaaaagaaaccaacacgggacgtcctcaagagtcctgaaactcccatccttcggaggaaaacaggtaagggggaccgccatttaaaaaaccttaaggattccagaacatcttctatgatgcaccatggcattccctcgcccaaaccaatcttaccattggtgacctgggcacaagaggcgagaaaaactctagggaccttatctcaatatgaaaattgttctactactcttaacatgtggctttttctctcaatttcagccccgcgaaattcaccttcctaagccagttcatcattccccaaggctgggaaagttaaagacgttaacgacgggtatctgtgctttaacttggcacaccattggatccccataaacctgcccgattggttttttgccaaattgggtattcttcacaccttta

SEQ ID NO: 130217 - DNA, 596 bp, Arabidopsis thaliana columbia
  unsure (1)..(596): unsure at all n locations
nnnnnnnnnnnnnnnnnnnnnnnnnnnnnnnnnnnnnnnnnnnnnnnnnnnnnnnnnnnnnnnnnctttttttttttttttgttttttattgttttgactgacccattttttcttttttggttgaccccgggagaaaaaagacgcttaaattttaaaaccttagggaagcacgtgtaagggttatattgaagaaaagacggcccctggtgttttggcgaacgcttcttgccagtagtgaaaaacacgtttgacccgtggggaggagcaaagatacgggaaatcggaataaacttcgggcgttttttcttggagagtgagcaggtgagattgaaaaaacctgcctctgaaaagggctcttggttttgccgagggagatttgttgttccaggggggcatctgaaaccttttttcttttggaaagggggtctatgtttgcaaaccttctgctgggggcccattatgagcgggtccttttaatacagttttccgcctatttttcattcaaaccgttttctgcgggagggggggaggcccgggaaatgctgaccgggtcctttggggggacacactattgctaaatagggtgaaagtaaaa

SEQ ID NO: 130218 - DNA, 656 bp, Arabidopsis thaliana columbia
catctatgacttcgcatgcacgcgtacgtaagcttggatcctctagagcggccgccctttttttttttttttttttttttttttttttaataaaccagtttaattgaaattagattttttatttttccggccccagaaataaaacaacgggataaattcggtaatggggttttcaaaaattccagaagccgaaaccaaccgaagaccaccaaaccaaaactttttacctggtaaagaacaaattttggaaaccaaaccccaaaagggtggtccgtttaagggccccccggccccacgaatggttccggtgggttttattttaacccccacccgggccggtttgggcattgcgggtaccaaagccttggtgaaagccacaaaatttttgggcccatcgttaacggggggctttgggccacccttggggaaaaaaacttggtccgaagggaaaagacctttggcttggtgcgaattcttggaggaaatggtggccaattggcttggagggggtggggccctggtgatggggaatcttggggcaactggtttgggaccagcccactggaggtctttaacggaggctttggttaaaggtgggtcaaccggctgtgggaaggttaaattttaaaatttggtggaccctttggccccatggg

SEQ ID NO: 130219 - DNA, 667 bp, Arabidopsis thaliana columbia
gctatgacgtcgcatgcacgcgtacgtaagcttggatcctctagagcggccgcccttttttttttttttttgtaacaacgattatttttattttgaatataatttaacattagattcaaaaaacaaaatagaaagaaaaagcgttctggtttatacgataagcataccatatgtttttctccaagctcatctacaaactgatgcgaataactggcagaagctcaagaggaactttcttatcaacagtgagatcaccagcttcttccatgtccatatctttcttctcctcaggcatattccaatcaaagaagtagagcaaattcaagagccccaattcaatggttgcgatcgccatagctattcctggacaaattctccgaccagaaccaaatggtaacaactcaaagctatgtcctttgtaatccacaggacaatcaataaacctctccgggttaaactcttcaggatttttccaggattccggatctcgtcctatagaccatgcattaacaagaagagctgttttccgaggaatgtcgtagccttgaatcttgatatcagccattgtttctcgtggaagtaaaagaggagctgctgggtgtagtcttaaggtttctttcaccacaagcttcaagttttgaagcttatcaagatcttcttccatgat

SEQ ID NO: 130220 - DNA, 678 bp, Arabidopsis thaliana columbia
  unsure (1)..(678): unsure at all n locations
nnnnnnnnnnnnnnnnnnnnnnnnnnnnnnnnnnnnnnnnnnnnnnnnnnnnnnnnnnnnnnnnnnnctttttttttttttttttgttacaaagaatggtttaaacatagcatgtattaaacgttgtaaataatcaaacacatacatttcataagatatttcatagcacactttctcatgtctcaatttataaccaaaaaattaaatattggcagcacaagaccaagcaccttcttctaactggattatccgcccacgtgtgattgagaggaatctccatatttggctttagccgtcaccaataaacttgttgcctgctattcaaggggctatatcttttttccccacaagaaaactcgtttactgtgcagaagaactagctccattcatacagatagctgagaggcaacggctaatcttttcaattatctgggttaagggggggcttccggagggcaactttgtacaacccaatgttacaatcattgctgaataatctgggaaatcttaccgatcttggcctttcctaatggaatgcgccaccgatgggctcttggctaatttcactgcactgcaagcggaagactgctgtgaattagacttttacattaaaggggctaatgtggatgctacagcctccttgatgtagtgctgggacctcaccctgctttgaacagc

SEQ ID NO: 130221 - DNA, 660 bp, Arabidopsis thaliana columbia
  unsure (1)..(660): unsure at all n locations
gtcgcatgtacgcgtacgtaagcttggatcctctagagcggccgcccttttttttttttttttttttttttttttttaaaacaaacttacccgactttgatcgaatcctttattagataatatagctgaagatgtagtaggcacaccagaaaaaaacaatacacaaacttaaaaatgcaataaaaaggggagagagaccagcaattcactttcagaatttgcctcaatggggatgatcttgaacataacgaaggccgcagtacttgcagatcgcaggctcatttaggtcgaggcatatgaactcgattggatgacctagggccggattggtgtcttcttcacaagcaacaatccttccatcaactttgatagggggaacctcactaatcaggtccataggggatttcttgcttctatcctgcatccatttggcggggagattgccgactagatcgtctgttggaatgccaagctgtgtggtcgccacactgaaattcctcctggaagatggaagaatctgagatcggattagggctttcaggagattcgacgccattgttggacgcgtggnnnnnnnnnnnnnnnnnnnnnnnnnnnnnnnnnnnnnnnnnnnnnnnnnnnnnnnnnnnnnnnnnnnnnnnnnnnnnnnnnnnnnnnnnn

SEQ ID NO: 130222 - DNA, 717 bp, Arabidopsis thaliana columbia
gttacacactacacgagctatgacgtcgcatgcacgcgtacgtaagcttggatcctctagagcggccgcccttttttttttttttttttttttttacaaacccaagagactttgattaatgtttattctaacaacgggcattggacctacgaggaatgatacattttcattaaccgaaataccagaccccgggcggtgggaaataaccttcacaaatatatggtttcctattactcctaagtcgacacatatttctataaagggcctgttatttgtatctgagagaaaacacggattatgccctgccatctatcgtgccccgcttgtataaagaccgcattattccttatctgcatccacaggtagaaacgcatcactctttccctgctttggaatgatcttatcaagacgattatttgggttgggggcactcagaacacctacacgactttactgcgattgcacactgccctaccatttggaccccaagtcaccactctaagaaacctaatttgctgtagcatagacaaattcctaattgacatttagactgatcctgccgtgaacaagtcgactttattcttttttttgttaggccccaccggggttctccctttggggcggttggacacaacaaatccaatggggcccgccccttcctcttccaaaagcaacgcgcacaaacagtgttacccgcaaaaaggaaattaacctctg

SEQ ID NO: 130223 - DNA, 791 bp, Arabidopsis thaliana columbia
caacacgagctatgacttcgcatgcacgcgtacgtagagcttggatcctctgagagcggccgcccttttttttttttttttttttttctaaaaacagcatccgtttttataatttaatttttttacaaaggtaggaccaacatttgtgatctataaattttcctactacgttatatagagaccctttgacataccacttaactcggaaatatatttgttttacttgttttgcccatacacacaaaaatgaaaaagactttatatttatgatactttataatcacacggattagctccggcgaagtatggtcggggacttcatcttcttcctccatcatcagatttttccttaaatggaagaaaccaaacgaaactccgatgttctccgttctcgtgttttcctctctggcttttattgctgggattgggaatttttcaccgctctcttgctttttagttgctgattctttttgcttcgactttctatttccaatgtttcttcttctgtttgtggattaaataatcattagtgtgatttctctgtgggaaaataaaaaaagttcccctgagaagacggctgtgtaggtggcgcaaaaaaaattttcccgcgcccggtttttaagccagaccgttttctaactaggtgtgttggattcaataggaccaagacccaacctgcccttttttattggggaatttcctatgcaaaaagtgaacccatgtttttttttgtctcgggggggggggtaaaaaaacacaggcccgaaaagattatttggcctctaaaaaaa

SEQ ID NO: 130224 - DNA, 757 bp, Arabidopsis thaliana columbia
  unsure (1)..(757): unsure at all n locations
aaagggcccccgatagatgaacgtgnnnnnnnnnnnnnnnnnnnnnnnnnnnnnnnnnnnnnnnnnnnnnnnnnnnnnnnnnnnnnnnnnncttttttttttttttttttttttatacgagagaaggagcttctaatataagattagcctggtcaaaggaaaattacggaaaagggtgtatttcatgacattaccgagacaatcaacttaaggtttttttataaccaactaaacaaaccttgggatacttcaatacagaatgtgccccatgacagcctggaaaaacttttttcttgatcaggggaaaaacatggaaaaatggttatgcactcagtcgcgaggagatgctctggagacaatgtttgggccagtgaataaccagacataaatgaggtcggataggccttgcttggaaagaatctcaccaaaaaatttttggttctgaggcaaatccaatcccgaacactatttcctctcggagggaagactgcaaaaccgattccacctgggacacattgcctagatgggagcctaccacctagtgttaattaggaaaaactttcactgacattagacacaggctggcatagacatggctgcccccatatacccgaatgggagtctcccaacattgcaccctcagcattgaccacttgatttccagaaaccaaagagtatgaaattttgggaaaccaaactaaaggcgtttcaggaaacctaggttttaccttggacctacaatcgctcggtagagctc

SEQ ID NO: 130225 - DNA, 742 bp, Arabidopsis thaliana columbia
ctctgacgtcgcatgcacgcgtacgtaagcttggatcctctagagcggccgcccttttttttttttttttttttttatttgttgggcgatttctttataacggaacatcaccggttatatagtattttcataaacatagacagtcttctaccaccgagaaaaaacgcttaaaaaggttgccctttttccataaaatcaaggtgactttaccgtctcggaacatgcggcgacgtggattggtcaaaaccacgggcagcaaggattgatgattgtctttggaccaatcccatcaaacacaactaccatacgttgcgatgtgagaatcgttctagccaaggaagaaacggttttcttgaaaaataggacagatatggatcgatcaaggattcaccccaacctcagattggcagtgtagattcttgattttgccggcccgatcgtgaaggccacactgcgaaaacagctttgttctgaccaagttacattgaggagcaaactctctcgctattagcgataaaaggcaaaataatgcaatcttaaaaaaggcacatgcaatcttgccttccgacagagagggggtctcttccccgggaattgcttaggaaatccttcacaagggggtggggaattcaccaaacaacctacaaaagtccttcgttccctttgccccacaccaaatattgccatttcccaattttcacctttctacccccggataactagaaatgaattccccacccac

SEQ ID NO: 130226 - DNA, 675 bp, Arabidopsis thaliana columbia
ctctaacttgacatgcacgcgtacgtaagcttggatcctctagagcggccgcccttttttttttttttttttttttttttacaaaacaattaaacctatacattaacccagaaaatcttaaacgctaagatgcctgccaaagtcctttaggcaacctgaaataaaagaaccggaacatcttctgtaagctcatttggaagacatcgatttcctacaaacaacttgagaaaccaaaaatgatatctccaagcaacagggtaaattgagtgttgatgaataagaccataactcctacgaaagaacgttcaaacgtgtaaatcaaaggtcccccccaatgaagcttgaagctcttgacttgaaaaatacagaccgctctcaacggatgtcctcaaacacctctgtacatatcccggggataatcgttctcccacagtgcaaatttggaaaggtgatgtagaattagggcactgtactacctgaaccaaactgagaagggaatctttggcaatcaagtaacatctttcatcggtgaatctgccataagtagggtatcgaatactaactgattaacatttcaattttgtccttaaaaaacaagccaatttttttggacaaagaagcactctttgtataaatgggggggaaagaagttttaccccaatatcgggggttctt

SEQ ID NO: 130227 - DNA, 777 bp, Arabidopsis thaliana columbia
  unsure (1)..(777): unsure at all n locations
nnnnnnnnnnnnnnnnnnnnnnnnnnnnnnnnnnnnnnnnnnnnnnnnnnnnnnnnnnnnnnnnnnnnnncttttttttttttttttttttagaatcaatatataacttataacaaattagtgtgaaacatgtccatgtaaggaacaacacataaaaagtgagcttatccacaggctcagcttcatatacactcattttatcatttggttgtggaaacttaaaagtgggaattggtattctgcatctccaattaaggcattattcaggtcagggatgcgaaaaaccgtggttgatgcgaaatcatttctgcataaagccgctgcgattcttggaagcaacatctccaaagaacctttgttcactaatagtgcccccaacatgttaaaagcccagggaagaattcggaggttatcctcaaggcgacaatgctactgaaacggagaaagcaggggccccatggtcgtaaggtggatggctaccagaggaactgctacagtgaaaagaggagggttcactcctccgagaataaacataaatgacgtttggagagaaatatgtcaaaagttacgggaatgaaacaaaactgtaaccatccctattttgcagccccccgtgggaagaacaagtcacttggtggaaaaaaaacctcggggagccttttttcccgggtagaatgaggatatgacctcggctggaaggaatgggaaaatagggggcataggcccgaagttttcaagaacaccaaccactttagtttatttggacgggcggggaaa

SEQ ID NO: 130228 - DNA, 747 bp, Arabidopsis thaliana columbia
aggagcgacgaataaaataggtgagtgggcgcaagtttttgatttaaagagaaacaagagtaataggaaaaacaaaaggagggaggtgaaaatgaagcagtaaaggaaagtataaataaagaatggcgatgggatgaattagattagaaaaagaggatgaagaatgaatgtaggaaaaagaacggggataaggaattatggggctagaaggaaaaaacaataatataaagaaattaaatgaagaagataaggtgtgaagataataaaagaaaaggaaaaagtagaataaaaagtaataagaagaaagtaatagaaatatgggatacaaaataataatttcgagaggaagaaataataatgtgaaggcgcaagtgttaaagtttcgtataaagaaaaagggtaaagaagttttataatttagttagaaaaacacaatgatacacatgaggaggtaataatgaagatattaatgataaataacgttaagttgagtaggaaggaagagatcgattgataagaagatctataatatatgaaaagaatagagtggattagcgtatgatcgaataattaggataatgttcatgatatgaaaatcacgagtgtgggattaaaaataatgaaataaaaaggagaaagtagtaaagtagggataagatgcagaagaagatgtagatgggtgatgaaagatcaagatatataatggaaatgaatgaatgatcgagcatgtaagatagaggacagtaa

SEQ ID NO: 130229 - DNA, 990 bp, Arabidopsis thaliana columbia
  unsure (1)..(990): unsure at all n locations
ttccgttnnnnnnnnnnnnnnnnnnnnnnnnnnnnnnnnnnnnnnnnnnnnnnnnnnnnnnnnnnnnnnnnnnnctttttttttttttttttttttatgaaataacgttatgtgttttatcgagaaaaagaatatggaccgcgaatgcaactagcacattatatattgcgacttctgactataaacccaccaacgttctgtactaaccaatccttcctacatattgagaatttatcaaagccctttgctttctgacgacttaacgcgtacgctttgaaggagcacggctccacatgagaatttcccataaaacctgacttggtggtctgcttgcaattttaccccccaatttgcgagaacgcaacccgggacatccttggaatctattcaggaaggggtgtggaacctgctttgagtcagcatggggcctaatagagtggcgcttgtaagacctccattccacgaatattcccgcaatttcctaagggaggaagtttaattcgttattgtcctctcgcacacactatatatatttctcgcacactcttcgagcgcccgccataccacagataaacttctctggggaatattcttcggagttgttcggcctcaacttgaaactcctagttccccttttaggcgtgggtaattttggcaacacttcccgggagaccctgtaaaatctgttttttaaaaccggttcactggggggctttttggcctcatttcccccaggcctttgacaaggggcattccccttttaggaaaaagggctctaactttgtgtcccggcaattcagggagtggacttacattttcagaagacaattactctggaaacctttgagaaaaggcctggggattaattagggcacaagcctgggtcttattgctcgggaaccaaacttgccctagagcagggcaatattttccccacttcattcccttgggggtttaaccgggggaaaccctttgaaaaaataccccctt

SEQ ID NO: 130230 - DNA, 786 bp, Arabidopsis thaliana columbia
  unsure (1)..(786): unsure at all n locations
tccnnnnnnnnnnnnnnnnnnnnnnnnnnnnnnnnnnnnnnnnnnnnnnnnnnnnnnnnnnnnnnnnnnnnnncttttttttttttttttttttttaaaaaaaccaaaacgcttacattttttttagtggcgaacacagccatatgccacaacactaaagggactctctcaaaccagccaagaaaaaaagcccatatttctttttcccgttctgggcacctataggagctattcaatccaacaagtcgacggactttacttaaggagaaggctctacttaatggcggtcgcccatgcgatcactctgacctctactcaatgccgcgcggtttcacacaatgagccaagacggcgtgtcttcaatctcgcagaattatgagggcgcagcttcggttgagccgccgtgacccatctgaccccaccttggaccggaggcccgcacgtgcctataaccaagattggatttgggctaaataacatcaaggggtgaatcgaggatcgaccattcggggcaacattggcggtgaggagccttgtgcatccttgcgggagtctctttgttcgcgccagtgccctccaccaccctttatgcacacaggtgtcctacagagggaggaggctgagcccagggtgactttccgaaccgaatggcgtgtaaaattccacacaaacctggtcgccattacctgggggcccgactagagctttggggaaagaagggattctttttcatccacaaaacccgtattgtgtttgggccccccaaaaaaaaaccgcccaatgggg

SEQ ID NO: 130231 - DNA, 521 bp, Arabidopsis thaliana columbia
ctatgacgtcgcatgcacgcgtacgtaagcttggatcctctagagcggccgcccttttttttttttttttttttttttaaaggagtttatttttttcttatgcgtgtttgtcagtgaggctttacaggcgaaacacacggggaaggtttaaaaaagaaattgcccggagggcagtaaaaacctttctttttgtcccaggaaaaggaaaacccttatacactacaccaattgtcttaagcccaatgttggcccaatggacaacaccctcgtccagcgacgggggcatttaggtcaatcggcggaggcaacccgggaaaaacctaaccaacgggcacacttggggggaagcaaaaaacaattttctgcttcgataactccaaaaattttcggactggacactccccacaagccaaaacggtgagcgaaaaccaccctcccttgggaagccatacaaacaaggggggctacccccaccaaaggggggggggaatcttccaaacgtggacccttttatgcgggcc

SEQ ID NO: 130232 - DNA, 719 bp, Arabidopsis thaliana columbia
tatagaacgagctatgacgtcgcatgcacgcgtacgtaagcttggatcctctagagcggccgccctttttttttttttttttttttttaatggagggatataactataaaaagaaacttctcatgttcagtcctatatcccaaagtaagacagtcacctacttccaaggaaagaggcggcgaatatttggcatattctcaggaaatcttggcaattttgtctcacggaacatggtacaggtaactggaaaaaaaaccgtcacggtggactaatcctaggccctggatcgatttcttagatacaaactacgaggcaattccctgtaagaatcgtttgcgcccttgatgaaccgtgtcccaggcaacatctgacacccttgctcggatcaattatccccgccaacataagatctttgtatagattctttgcagctttgtccccgaacatggcggttgtgttcgattagagctcttccatgacgatattgccatttgagtctgcctttttggctctaaggactatggggtagcttactgcttttttgaacatatcacttacaatcttccgttacggggtttcaaggccctcttgggcagtgcccacttgtatatccttccccatgagggttcaccccccccgcaattccatcccttttttaaaagctgaaaaagtggctttcaaggcaaattcaacccctctgacgatgatccttcaggaaa

SEQ ID NO: 130233 - DNA, 702 bp, Arabidopsis thaliana columbia
  unsure (1)..(702): unsure at all n locations
agaacgaagctatgacgtcgcatgcacgcgtacgtaagcttggatcctctagagcggccgcccttttttttttttttttttttttttatcagacattaacactattaaaaataaaatcacggacacagtgaagtataacttataacctacggtcacaaacaaaacaatgcaaccaggccgtgggcttaaattttctgcaaaaactaactccttgaacgggaacaaactcatggtgcaagcatatgggattcctaccttttccaatggacttatgggaaaatatagaaacatcctactcagatgagccgggaggaggatactgaggaaattccatcgcgtgcattcgtgaaggtgtgatacaggggtcgctcggggagtgtgtacacaacacatgcttgtgacatcataacgtgcacctgtggctcgtggagtaangaattacggactctgtcttaagcaagggcggcgcatagaccgctggaccattctcgattaacgacgagcaatggggtaggtcattgggagtatcattatagcaccacgttggggaaattctcctcacagggccccaaacttaggtgtttaactcgtaggatctgcggtacccccggagggctcccaatgaattttggtcaggaatatgggggcctttttttgccttaggtgggggggatttaaagcaacccccatggtgataggtaa

SEQ ID NO: 130234 - DNA, 516 bp, Arabidopsis thaliana columbia
  unsure (1)..(516): unsure at all n locations
nnnnnnnnnnnnnnnnnnnnnnnnnnnnnnnnnnnnnnnnnnnnnnnnnnnnnnnnnnnnnnnnnctttttttttttttttttttttttttaaaaagaacattactcccataaattttgccagaggaaagtagaattgcatctcagagctaagggcctcaaggtattaaagaacgatggggtcgcaaaggtcaaactttaatcatctgaagaagacggccttgggcaaagacttattgggctaacaaaaagggattggcacacctctgggtggatgtttgataatcactagagcggtcctcttcgataataggtgcgagggtagactattgaaggccttttcgcctaaatttggtagcaaaaatcaggaagaatgcggctctgtgggggaatgtctgatctactaaacaacaagatccttcgtggttgtgggagcattcccaatcgggcgagttggattattgtgctgaggggtgcgacaactggcagtgtgcgaggaaacctggactgtgactct

SEQ ID NO: 130235 - DNA, 765 bp, Arabidopsis thaliana columbia
  unsure (1)..(765): unsure at all n locations
nnnnnnnnnnnnnnnnnnnnnnnnnnnnnnnnnnnnnnnnnnnnnnnnnnnnnnnnnnnnnnnnnnnnnnncttttttttttttttttttttttttttggaagaagatgaaactaataggtaaaccaagaggttgtggagatatttctaattggcaatgtctggcttcctcccagaaaaaaaaaataaacttctcgtaatgatagaagctgttgcacaccttgtttttgcacctaaaaccaaactaactacatgttatggtcacaagatcatgttggacttaatgtgagcggttggagcattttcttaggtcgggcctatcacacgtgttgatcaaagaaactttacagcactggtagaatcttttggcttggagaatgcggtattttttcagagcccgtgttttacaaccttgtgcctacgattgcaaaaatcctgatcatggatgcgtccattcctggaggatagccctggcaagacctatggtacacaccctagaccataatgtaagggggaaatcctggtggtgacccaacggaggccatgccatttttccatgctgaatgaccttggaattttcttttaccagagaccccggttatctagaccggggaaagatgaaaccgacctttatatataggggattttcgactagaccaattttggagtttttgttagctttccccagagcagggggggcatttcccggggccctcgggggtttccgtttgccagggataaaatttgccatttgggtaccccgctt

SEQ ID NO: 130236 - DNA, 653 bp, Arabidopsis thaliana columbia
  unsure (1)..(653): unsure at all n locations
nnnnnnnnnnnnnnnnnnnnnnnnnnnnnnnnnnnnnnnnnnnnnnnnnnnnnnnnnnnnnnnncttttttttttttttttttttttttttgaaagtagataactcgaacgtgtaaattgtttgggcaaaggcccaaatggccaggcgagggatgtacaaacttttcaaaccaaaagttttaaacggttgagatgacaccatcttaacatatttgtttttacacacgggatcttgtaaagagaaacaaggcttttgacattaaaaggcctaatggggattgtggcaaagaaagattcctttggattctcataggacatttggagcttaagataaagttcgggtaagaggcaaagaactgggggaccataatgagcctgcttacgcaagaataggcctgcggccaatctgccaatataggggaggtttaggatcgggcacgtgatctggggagagggcttctaagtaacccacgaagctgttaccacgttgtagccatagacatgagaggccttcccaatgattctgaagatttacggggcccgcccccagatgccgggctataatccatacggcgaaaaggctaatatgcactttgcccgagagtattaccgattaaactttctttggcctccgataaattcaaggtactccc

SEQ ID NO: 130237 - DNA, 750 bp, Arabidopsis thaliana columbia
  unsure (1)..(750): unsure at all n locations
nnnnnnnnnnnnnnnnnnnnnnnnnnnnnnnnnnnnnnnnnnnnnnnnnnnnnnnnnnnnnnnnnnnnnncttttttttttttttttttttatgaaggatctaaaactaattcattttacttgggaagcccgacaacaaaggtaacgcactgtgattactgattagccacaccaacacacacccattcaccattccaagaaccattccttaatggaaacagaacatgaaactagcgcgtcatgagagtaaattacgtggataatgaagctcatcaagcgaaaaaacctgtatacttctcaacactcgagtacttgacaccagggtgaatctaagaggcatccactccaaaggaaggctctattctgatattgggatctccattcacaaacaccgcggggtttatagaccgaacaaccttgatgggaatctggatactgttggatgcttttaagtaattgatcgtctgggaggtgagtcttcccaagagactcgcccatctttttctcccacaaggagactattttgttcatagataaaatggggttagaaggcccaatggctatgattctgttcagagtgcaaagagcatccacctccttgaacgggtaagcaacaatttcttagtctttggagaaaacagcttgggggatttttcttcccaacaaaaggcgcacttttgttctcctagggagggaaaaattgcaaaccctaacattgcacctgaaacccaatggtggcccaacggtttt

SEQ ID NO: 130238 - DNA, 778 bp, Arabidopsis thaliana columbia
  unsure (1)..(778): unsure at all n locations
nnnnnnnnnnnnnnnnnnnnnnnnnnnnnnnnnnnnnnnnnnnnnnnnnnnnnnnnnnnnnnnnnnnnnnncttttttttttttttttttttttgttaggtgatgtaccttaagaacgtattttctattgcttacgtgaaataaataaacctacaattgatttttcttcattatcccttttcacggggaaattctggactacaaaatggacagaagaaaaagaaaaaagaagaagcagaaatactatagaaactgtgttatttccttatattttgtatgataagaaataaattatatataaaaaaaaaatgaaaagtgggtcaatctatttctgtggatcattgattttaccccagctcctgattgcattagtcactgcctgtttcactgcttcagcatccatatttgctccatcttcattctcgagtcccatggcatgcaagctaaaagagtcggaacatgaagccctaccttcaagaacgttaagcccaatatccttgaaggcttttaattccgaaacaagcatccctggatgatttttttctgagaacacgtttattataaaacccttgtctagggtttccactgttaccattggggtttttggaatcccggggctcgctttgaaaattgtttttgaaaaaaggggctttggttgaaatttttttccacctttttttggttttaaagctttttggggatattattttttgggggccgttcctatttttttaagacggattttattccgggttttcccaaaataggttgaaaaatt

SEQ ID NO: 130239 - DNA, 446 bp, Arabidopsis thaliana columbia
acaccccagacacagctatgacgtcgcatgcacgcgtacgtaagcttggatcctctagagcggccgcccttttttttttttttttttttttttaatgcacagtaccttacttttttatggtcgcattctgacatgaaaaaagggcctggacaaagtctaaaaaaacattatatggttaacaaagggaatcaccttatctttcacggataagaatatatttaatactcaaacaggcctattaataacaaaagagggccccttgtcattttgtttaatagagccaaactttactctccagtattccttccaaaaccccacccctgcgtgaggattgcgtgtggaaaactgtactggcacactaccacttctccaatgacaaaaagatttttcggagcaacccataacatcaagaacggcgagttaatggcatataggaaacctacgca

SEQ ID NO: 130240 - DNA, 1038 bp, Arabidopsis thaliana columbia
agctatgacgtcgcatgcacgcgtacgtaagcttggatcctctagagcggccgccctttttttttttttttttttttaatgaacaacacaagctgtctaataaacattctggacaatacaatgacacaaaaaaacattgttgaacatacgtcccaacaaaacttcaacaggctgaaccatacccgatatggttgatatataagcgagtgcatcgttctgtttgggtatatccaccgatattgagaaatatgcttgaacgcaacaatacctccccctgtctctgccactaacctctgaatacgagttaagctatctttgatcgaaccaccgtattgcgccctttatgcccacacaaaacgcccccccgccccatacccagcctctggatatcggtggcacccataatattcactccccacaaatacgcttggccctcaagtaacgagacttgtcaacatacactggggcccccccaatattgggaccaaatgatcacgaaggtcggtctctactctacctaagtgataagacttacttctagtcagcggacacactcttttatatacctccctatgtactgccagaaggatccaaccacatgctggaactcgctctgtcgctattccgcgtccaggactcttgtgcaccacacctcagtaatcacactacgccggtccggcgaattattctccggaatatcccatcttcgcaccactcaataggtacgctccgctccagaaactaatgggacacccaagaatgcccgcggaaccatcggaattcttacattaacaaaaactccctcctactgtgaaaggcacaaggccgcttccctcctgtaacagaatggggcatgatttcacaggcggattaaatgcagcgatccatccttgaagctcccataggcaatgggggcccggctcatgaaaaaactccctcaccaacgcgcacggacgagctatgcccgctctcccacggtcagcgaccccctactttgatcagaaagctggcatttccactgggcgtatgaagactaat

SEQ ID NO: 130241 - DNA, 660 bp, Arabidopsis thaliana columbia
  unsure (1)..(660): unsure at all n locations
nnnnnnnnnnnnnnnnnnnnnnnnnnnnnnnnnnnnnnnnnnnnnnnnnnnnnnnnnnnnnnnnnnncttttttttttcttttttttttttaaaaaaacaaaactattaacccacttataatcaatctaaaaactacacccatccatggtgaggggattaatttcactactaaaccaaatgttgctcggaaaaaaatttgcagtctgacatacagatctaaattcctcggtttatgacaaaaatcaaaaaggaaacgcaattttcaataatgattcgcgattgagagaatgagattttaaaaccattgaaagcggggctattagagcttctgatcatatccggcgaggaggctctgaaacagaaccaggaccggaccctggagggcaaatctgatccatcatgtaaactcacttcttcattgaacgcctcaaatctggatgcttaaacacccatgccgttgataactgcaacattttcaccaatttattctttacgttgggttgttgtttggccaaggataaggaaaaaaactttcggggaaccataatttgtataaaccacaaggattggaaacccatttttggggagaaggcggccaactttcctttcgtgaccgccaagaagcccattggcccttggtttggctatttccccccggg

SEQ ID NO: 130242 - DNA, 748 bp, Arabidopsis thaliana columbia
gagctatgacgtcgcatgcacgcgtacgtaagcttggatcctctagagcggccgccctttttttttttttttttttttttaaaaaaataataaccttaacaaattcgtatttgaattagattttaaccatccgactactgtactaaaacaattaatgaataaaatgatcggttctaattaaactacttatttgatatttgcacgctacgcatccctttatgtggatacaacaattgatgaaatcgatgatagtgacccaggtgaaaactttatagtgcgtagactttccccaaggaagaagtgtttgagataactgagaaaaaacattgatttttgcaatgaccgaggaaaactgaaaaaaccattgttctgcttccacattcccaaaacccctcctacttgactgtgtccatggggccaacggcttaacctaactcttcgtcgcctgggagagatgactataatttttgtccactgtaacactaagcgccttatcatatttgggagggaaacccttatctaactaacctgacccttattgagaactttcttaccagaacaagcttctggaatagccctaacatcgatagggaaaatctaagaatcctgttcttttcaccgattgagaaaccggcggtttggataattaggcatctttcctattttaacaacggaaaatggaatgggaaaagcccccggaagcccctgatacactttccaaccccccttttttggcccccgggaatac

SEQ ID NO: 130243 - DNA, 508 bp, Arabidopsis thaliana columbia
  unsure (1)..(508): unsure at all n locations
nnnnnnnnnnnnnnnnnnnnnnnnnnnnnnnnnnnnnnnnnnnnnnnnnnnnnnnnnnnnnnnnnnctttttttttttttttttttttagtaaaaagtatttattttgacgaaaacaaatctctgggggaagcaccgtttcacaaaagatcatgtcaaaagaattactaacttaaaaattggcacttatggcaacgacaccccgcccaaaaccgtgggttggcgcatatatttcagagtacctgcaaatccactacataaatgagtgcgcgtgaaccatgcaaaggcaggcacgaccaatgggttattataaagtcgggggcaaagagctatacgggctattcggggtccatctctgaaagtccaagacctggtacgctcgtgtgaccgttggattctcctgcgccggaataccacggcgttgtggacctgcgtcctcgcccaatgctacagcgacggcccgggaaatcgttagagactagtccctgaagtcaaacagagtggttatc

SEQ ID NO: 130244 - DNA, 780 bp, Arabidopsis thaliana columbia
  unsure (1)..(780): unsure at all n locations
nnnnnnnnnnnnnnnnnnnnnnnnnnnnnnnnnnnnnnnnnnnnnnnnnnnnnnnnnnnnnnnnnnncttttttttttttttttttttttttttaaagttaaaagactgagacaaacctaatttgggggaactacaattgatccttggagtaaagtgacaaggagattaaaagagataaccgcggactgtgctgggggaaaccacccacaaaatatacgttttctgataactctgatgttgccagaaatttcctcataagacatgctgtttggatgaaagagatcattttagtgtcagaccctccaaattaacatgcgccgttagaatgatgacgggaaaatggcttacctgtatccaaaacaactggcagaaaacaacaactgggctgacgaatgttgtgataaagcgcatcataggggtttggggcactcagaatagccagtatacaatataccgattgcacacggtattcaaggaggaactgaagaccggctacgagagacgaattgtttctagaacgaaataattttatttactgaacggatataccttaaaagcgctgtccgtagtctggagcagggatccatgagcccttgtaaatgtcgagacagatttttccttagctggttggtgttaagaaaggtgtaatacttgggcaagaaatcctttaaaaatcggggagccggcacaataagggtttttttttaaaagccaacagaaaaacctctggaaactttgcttgggcttttaaaaacctgtttttaaagggtggaattggg

SEQ ID NO: 130245 - DNA, 645 bp, Arabidopsis thaliana columbia
  unsure (1)..(645): unsure at all n locations
nnnnnnnnnnnnnnnnnnnnnnnnnnnnnnnnnnnnnnnnnnnnnnnnnnnnnnnnnnnnnnnncttttttttttttttttttttttttttgcaatgatatttatgggaaacaacaaggttgggccaaatttaaaaacactttgatacttgtggggaagacctaaaaaaaaactttccggggcaagtttttgactaaaccattcatccattaggggatggagaggcctcccggtgcccacgtaaacgacttgttttaattctacaaaagcatccatgcttggaactaaggcctgattttaaacacgaacccaggcgggttttacttctggacactaagggactggctttgatgaccagtacttggtagagagaagcacgtgcagcaccaataaatggtcccaccaaaatgactccttggtgatcccatgcgctgcccttggtgcacattatctgagcttcccaacgtaattgctgggcttaattcacttcccgggcgggggatggatcctaagcaaagctaaaacccaagaataactggggggaactgttctaaaatccggacaagaaaggcaccaccgtttatctattgcatatgtggcacaaaagccccgttggaaaacacggaaccacaagggtctcaaaat

SEQ ID NO: 130246 - DNA, 705 bp, Arabidopsis thaliana columbia
ttgggttccccctacccgacccctgtattcatcatgctgaaatccccttcccggccgccacgattttttttttgaacaaaatccgggtgaaagagacgttcgtgaagctcatctcgctaaggctctgcattctatcacgattagtgataacgagcaaagctctgcgagccacctacaactcactcgaagggtaaaactcgctcgctgttgcgcacaacaaaattgccacgctggctgatactatacccctcccaaccttgctttctatccatacgcgactttcgatcctggtactcaacacagtcattgaccaaaagcacataacacttgccttgacagcagggttgcgtgacctggtcacaaggaagcaacctggctaacaggactactgacggctccgcacctgcatctccacccacaatattttcccgacgcgctgccacgctcatcccctcgtccttctactatcaacccttcacacacatgatgactcttctttccccctcacgaagaaccttctatcattcctaccccccgcccctgatcacagccctcactaaccttatggatcaagacgtactccccttcaaaccaacacatcgccctctgcatctcacccctgaaaaatctctaactcggtgccttgcgcaaagaatacccacttccctctttctgacaatctcctataacctcaccctccgcaat

SEQ ID NO: 130247 - DNA, 757 bp, Arabidopsis thaliana columbia
aaacaacctatgacgtcgcatgcacgcgtacgtaagcttggatcctctagagcggccgcccttttttttttttttttttttttttataaaagcacactacttttctaaaaaaccccataaaaaggatgaattgatacttatacctcctggaacaacatatacttcatacaggggccccagggacataatcactctctttttttatatataccgggtgcgtactcttatttgaaatttaaaaacaaattgggccagcttttgcagaagttttcttaccaatcctgcagaggctaaactataccgatgctgttttgtctgtaaaccaacctttggcccaattacgcgtggcaaataaccggagcgtgctgctcttttacaagagactcaactcgccccataattcccttaagtgtccagtatgaaccgctctattaaaggtttcttaccaagccatgggacccttgtacatggtgtggatacagcgcgtgcggaagcacttcctcgggcctttgtaagatcactgaatgttctacactcctttaaattatccccgagggcaagaagcttctattttcagagctgtttgctcaagagggcatcgtctttacaaggacattccggtaactctcccataaaagaactataaaccgcattttttggatcccacaccctttggggaacgggaacactgtgggcctgtgggttttaaaccctaccgcccccaagagggcctctccttttgccgtgttaaaaaaaa

SEQ ID NO: 130248 - DNA, 631 bp, Arabidopsis thaliana columbia
  unsure (1)..(631): unsure at all n locations
gttnnnnnnnnnnnnnnnnnnnnnnnnnnnnnnnnnnnnnnnnnnnnnnnnnnnnnnnnnnnnnnnnnnnctttttttttttttttttttttatatggaacccaaaatactgtctttaacatttgagaagccatctaacaaagttcagcctacagggagagagatgcggaaacaaacctttatagactgtgtgcaaatagacaaaaccaaaaggtcctaatgaaactgcttccacgcatgatgaaaatgaggtcctgggtttgcgggactttcgaaagattcaggacctttaatcaatttccttcctacaagtgggtagcctcccttataacaaccgtgagtagctcatactgagcccctgtctcgtgattgaagactgtcacacctgtatacagtacgatgactagtgacctgttcacaattgattctgcaagagaaaagtgacctcttgcttgagagcgaagagggttcaaaagatgtttgctaccaccccaatgaggagaccggccaccaaactctcgtctaagttttatgagctcagcttttggcatccggggggactgataccatgggtagggctaagttaaattgttccctgacccagttactatagactgtgtcagacttgccc

SEQ ID NO: 130249 - DNA, 420 bp, Arabidopsis thaliana columbia
  unsure (1)..(420): unsure at all n locations
nnnnnnnnnnnnnnnnnnnnnnnnnnnnnnnnnnnnnnnnnnnnnnnnnnnnnnnnnnnnnnnnnnnnnnctttttttttttttttttttttagtagaacaatgaaaccattttattaatagtctggaagcggcgtctaaaactacccccaatggagagtaacatgaaaacctatatattaacaaggtcaaatcattcacacaaaaaccaaagggaaacagatgaatccttattcatggatatgctccatgaaagcttggctacaagcatgacgtcaacgtaaaaagactggttatacatccagacagccaaaattgcgggcccacccttctaacttagataaggatcctctacgccgacaaaagcgcggaaacccgtaacagaaataggatgggcaacacctttctcaaaataaacaga

SEQ ID NO: 130250 - DNA, 691 bp, Arabidopsis thaliana columbia
aacccgagctatgacgtcgcatgcacgcgtacgtaagcttggatcctctagagcggccgccctttttttttttttttttttttatcggaccacgttaagcgttttatactcattctggatttgccgtaaaatttgctatgagggctccacagcgcgaacatgtattttaacccagccccagctgacggcaatcgcccaaacttaaggttttgtttcttaacaaggggctctggaaccagagcgtgggcgccatacttgaacgaaaaaaattcatcacgggctaaacttcctccccacgaagagcccggtaccgcggcgaaggcccgcaatcatccttggtgaaaaaaggcccggccgaaacgaaaaggatggtcgcccacgccagattgatgcatggaccatcagcaatgcctcgggccgcaagaaggcttaaattcccaccccgcttgaagacaagtctaaaatgtgggcacgctgtgccaccaggagtctatttcctcccgccgacaagagcccccatatcggagctaaaaccgcgcccccctggtcaacccaatggtccttttttgggcgagcacccccccttgggggaaactgaaagggcgcactcttgtgcacaaataccccttggaggggccgtttaaacactctgagggggacaggagaccactctcttatggggtgcgcccac

SEQ ID NO: 130251 - DNA, 406 bp, Arabidopsis thaliana columbia
ttttcttctacaccatagacggtcgcgcgccgcccaacactctctctacacacccatacatcatacatcttcttgtcctcacgaagataagaagctacccgcggctacaaaccacagcacgcgctgattacaaatcccattaagtgatgcgcttgactacatcggcacactttgaggacggtgtggcgcatgctgttccacgacggagcgcactggactatcgagagaacttaatgagccatacaggagtaggtagtcagaacagtacactcctacgtatcattatcagtaccttgaactatgtggcctggctcacctgcacaaagtcatcctctcgtgcgcagctaacaaaataaatatccgtatcgaaaacccggatattacgctcctgtcataccgcgaactg

SEQ ID NO: 130252 - DNA, 271 bp, Arabidopsis thaliana columbia
  unsure (1)..(271): unsure at all n locations
cccgacgtnggcatgcccgcgtacgttacctcgggatcctcttaagcgggccgcccctccccatgtccttattttattacttttatgacccgtcggcttcccacccaccggattcgtcagaattgttcacaaaaactttcactacccgttacgcactcccaacatccaataaccaatctccaccccccacgctaacatatgatccactatcgcctagctctacttcctcacccctctccacaccttcagatacattcttcataatccactc

SEQ ID NO: 130253 - DNA, 716 bp, Arabidopsis thaliana columbia
tgacgtcgcatgcacgcgtacgtaagcttggatcctctagagcggccgccctttttttttttttttggcttttattaatagaaacctagctattaaagtaattttaatttgcgttttacaaattactaacataactttcttaagagtacgggttcatatatgaagttacacactaagcatataacaaacgcaaacaagtaatcgaaagtagatgacaaacaaagaagcattgtgtttaactgaacaaagcaagtttcgtaggagccacatgagtttgtttcttgagatttgatctggtctgatactgacgtttggtaatacctgtctcttactagttttcagttctaacaaaatcggtcttgtacttcttacctctccaccatttactcaaggtaggtactacttgtatgtacccactcctcttgttggtcaaaaactaagaagaataaagacctaaaagctcgaagcttcttcgtcaattccaatatctccaacaatgatcctgcaacgaagacttttaagttttatgcagccggagtttcgggctcttgggtcattgtctcagactgagatggttcctcctttggttcctcctctgggggctgcaacccttcttttgcttgcaacttcacaaactgtttgcttttagctaatcggattggccttccaaaaaatcttttcttggaactaaatagcgctgcctcgcctgtttttga

SEQ ID NO: 130254 - DNA, 738 bp, Arabidopsis thaliana columbia
ctatgacgtcgcatgcacgcgtacgtaagcttggatcctctagagcggccgcccttttttttttttttttttttttttttttttttttttttttttttttttttttttttttttttttcccaccagaaccataccctttttattttataacaaaacaaccccccattttttttaaatttttcacccccttttttttttttttcccccccccaattttaaaaaatctttcaataaaaacaaacaggggaaacaattaaatccccccccttggacccccctaaaaaagggccccccccaaaaccatttaggatttttttttttgggggggcattttttaaaaaaaaaaaaaaccaaaattcggccccggaaaaaaattttttttttttggaaaaaaaaaaaacccccctttttataataaaaaaaaggggggaaaaaaaaaaatttttaaggggaattttgggggggaaaagtttctttttttcccctggggggaaccccaaaaaaaccaaggtcccattggggaaatttcctaaccccccccggaaaaaccggcgggggtttgcccccaaaatttttatcccctaaactcacattaactgggggggagggcccccccccgtttttggggattttagaaaaaaaggctttttagcttttgggcccaaaaaaattccttacaaagaaaaaaaaaccaattttccccaaccggaaaacaggaaaaccttgttttctcaaaaa

SEQ ID NO: 130255 - DNA, 726 bp, Arabidopsis thaliana columbia
gatttggattgcccccgacctaaacctaggatcctttaaagcggccccccttattttattttttttttttttttttgcccaaaatcaattttacaaaggcccaaaatggtaatacagaaggaaaaaaaatcacaacgatgatcatggtctatgcatggatcataagcatttgaattggttatataaaccataaatgaaaagagggagagagaaaaaaaagactcaagaatcagaatgaaactctgatcttattgctttgttagtaaataagatttaatcaggcgacttaatacatggagttagggagcttgaaggattttttgggaactggacaaccagagaagctgttccattgtgcacccatcactccccaaactctgtacccaaaacttgtaaaccatgtcctcaaatttgctttgtattggctcacactcttcttttaattatcttctccccttagaaggaggttagaccagctggggtaaccggtcttaaatagaatttctacggtggcagatccgagaatctcttttctagaaaaaatcaaaaaaaatcttgaaaccctttttctttcggaacctaatgggaacaaactttaaccattgtggtgggaaaacccgcttgggttgccctttgaccccgaaaatattttgcgcacaatttccctttcagaaaacacttgtggggccgagtgtttattaagaatatttggttttttcaacccat

SEQ ID NO: 130256 - DNA, 785 bp, Arabidopsis thaliana columbia
acgtgcgcatggcacgccgtacgtcaagcttggaatcctctagcagcggccgccctttatttttaattttttttctttttatatttttttttcttttttttttcgggggggagccaacacccaaactctgttttctgattgaaaaaaaaaaatttctgaaccaaaaatcccaatctttgttggttcatgcaaaaaattttattcttcaaagagagctccaaagacttgccgatgtttttttcaatacaggctgaatccaaaaaactggttgacaataattgccaatccaagtccaatggccacaaaaaaaaatgcccacgttagtttttaaatgatcctaggaactttttttttcaacgcttcgctacacaacccaaaaaaaactgggtagtttcccattgaaatccccggcccaatcaagaacttgatgagaaacgaaccaccggctttcccaaaaggaaaagccaatgccggccataccatttttaaagctttcggttgggggccatgaacaatcccaatcgcaaatggtccaaaccctattttttttttttttaagcttttttaaattgtgcccccattccccaagaaacaacacatgggtcccggctttttaaaaaactttttttgattccccaatggcccccaattcaccaaggggggaagttcaaaaccccacccaactttttttggtccccccccaaagagcttctttaataaactctcacaaacggggggggggcccctatttttttttttaagaagcgcctgataactccccttta

SEQ ID NO: 130257 - DNA, 261 bp, Arabidopsis thaliana columbia
acccgacttggtttgcacgcgttcgttagcttggaccctttagagcggacgcccttcttagaatttccttttttttttcaatcggctgaaacgtataacacctttaagaaacacttgtacgacaatagttttcctgacttaaagttagtaaaccagcattcctactctcattgcgacacatttcggaagctaacacagatccggcagggatagaaacttcacagatgtccgacgccttaataagataactcttcagtctcg

SEQ ID NO: 130258 - DNA, 508 bp, Arabidopsis thaliana columbia
gaggtgttgatgaatacagatgaagaagaagggagtatgaagaactagagtgtggcagaggaagtgagccgaggtatatttttttttgttttatgaaacggagagggaagatcgaaaggtaagatgtcagtggagagagtaattgtgggaggagtgtggaggttagtgtcatcaaggcttcgaatttgaatcatgtgtatacgtaatgctgtagagtgagtacgtcgtcagtgtgatggtagaataggtacggaggtaggtagtgtgggaggataatgggtaaaggatgtgttagagagactgagtatgtgcgaggcgggatggatttatgagtgtggtgtatggtgagagtgtgtgctgtgacgcgttgtgttgtgtgatggagtaaggttgaatgggcggatcggtaggtggaaggcagtgaagaaagtataggaagaaggatgaagagagggtatgaatgaggaagttggtatgatggaggtggatatggtatatgttgtaagga

SEQ ID NO: 130259 - DNA, 406 bp, Arabidopsis thaliana columbia
acactctacaagagctatgacgtcgcatgcacgcgtaacgtagagctcggatcctctagagcggccgccctttttttttttttttttttttgataacacccttttttcataaacaacacaaaccccaaaatttatgggctcgttcgaactatacgaaattttatccaaatggttctatacgccgacctgggtgatataaacgtaaaatttttgggcttattcgcatgaccccaggggctaaaagtcagaagagcgggggatctctcccatgaaaatgatgtttgtgtaatgacttccaaactaaggacaagcagccaagtccatctcgctccctctcttttatagcaggaatttctctcattaacacaagccgacgcacccattaaggtgtacctcgtctagcgga

SEQ ID NO: 130260 - DNA, 862 bp, Arabidopsis thaliana columbia
ctttagttctggtataatttggtgtgggctctcatttgttatttctttttttttttagccagaataccaattctaatatggggatttttaagtcatatcgagtttatatttccttttaattaagttttttatatatacttacgtaaaattagtaattcagcaatcttaaagcgtagtttgttagttggattatgtactttattaatattaagttgtttgtaaattggtctaaaattttcttaagtattttaattatgttgagaacttttcgatgtatacattttactttgggcgtatgtagatatgtagtgtggtgggttaaatcagaaatataaaacaatacctatatttttgtccatacaaacaaataacttttgggtccttttttttttaactcccagaatcttagctcttttaattgctttttgtttaaaaaaagcctttttataaacctccatatattttgctccctgcgattttaataattggaggatgaaaaacacaaaaggggggtgttttacccatcattgttgacttacagatgtatattttaggttgggttcttattgtgagaagattttgggctggagggaaatgtcttttcaaaaaagagtgctcccgcgtatgttattctacaaaagatggtgtgttaggcagtttctcccttagaagatacaaaatcctattctcaaataataatagagctattgtttatgggtactctggtgagaactttatttcgtgatagataactcttgttcttgtgcacatgataagggtatttgtaataatcatcatgatgaggcattcattcttcctagatatctatgttaataccatggggaagataaattgtacatgc

SEQ ID NO: 130261 - DNA, 774 bp, Arabidopsis thaliana columbia
aacccccccatgagggaaaagaaaaaccggaaacggaaaccacaaacggccaaacgaaacccggaaggaaggcaacgcatacttttcaccgccgccggaacgacgaacgcaaaagcgaggggagacacccagggcccacgcaccaccggcacaaacgcaggccaaccgggcaaagccgaaccaccacatcaacgcgacgacaacaaagccccgagggccaaaacccggcgaagaggacaaacagaaagcggaaagagacgagcagaccgagacgacagaagcagacgaagcacccgcgagacaacgcggagaacgccaatgacgcacggacgacatgccagacaaaacgtcgaggaagggaaaagcacgacgcacacacgaggcacaacggacggcagaagacaacgaccaccaggaaacagagagcccacggaagaacacaaacacacacgacgaacacatcgcacagctacagggcgaagcagaacggaagccaacgccaccagcgcgcaaccgacgcagaagaaaagcgcggcgcgaagccacacacgcaaacacgaaggctcggacagtaaacccggagagacaagcacgaaccgcagggcgataagagagaagacgccggcgcggacacgcaccaggcacgagcgcccacgcgagcgaaacacgaccagcccggagcaaggacgcagcggaacgacggagcgatgagcaggagcacgaccacaagcgggcgacgagcacaacgcacgacaccagcaacgacgcacacag

SEQ ID NO: 130262 - DNA, 479 bp, Arabidopsis thaliana columbia
ctatgacgtcgcatgcacgcgtacgtaagcttggatcctctagagcggccgccctttttttttttttttttttttattttttttattgttgaacgatatagggcgtaaaaggggcagcaacaatgcttccccactatcttgcatggcccccacgaaatagaatgacgtgtaattattcattcgaactttatagcttactacttttaggaaagctctaatgcgaaactatgcacacctttgggttgaagttcccagaacgtagtttctcagagggaatgctgacgtaaaaacttgagataattcacctaatctgactaacatgatgggcagcgttgagacaccaatcatgtgtgttgcaccaaagcggtgaccaccacagtacgtgataacccctatggattcgcttgcgtgacccgaggcggttgttgatgatcaataaaggatttaacagatgcaatccctgaattaaaaatctgttg

SEQ ID NO: 130263 - DNA, 1109 bp, Arabidopsis thaliana columbia
  unsure (1)..(1109): unsure at all n locations
cgcccggcaccgcgtacgtgaggcttggataacagcggaggcgccgacacagagctgggcgctttgggaattccggaccgggaccagggagcgtcccaggtttccctatagggagggactagagaagggggagacgacgggcgcaaaagtgtcctgtgtgaaaaaaggattctctctcaaatttacaaaaaataaacaaccgcagaggaaaattggggagcccggggggggtcaagacgagagcctgacccaaaatgaaagaggggggggggtaaagggggccggatgaaaaggtggggaaaaacactgtctgtgccccagggttgagttataaaaaaaaaaatgggggggccccacaccgccccactggngagaaagagaagaccaccctatgtttggcaccaaaaacaaagagggggagccacaaccacgaggagggggcgggnagaaatacaaatcctttctcttctttnccacaccctccatctaaggaagaacggggggggcggtgattctacgactcgacgaggagatgtggggtagacccatttcgttaacacacacaaaacacacgggagggaaacccttgccgaaaaaagagaagagaaagggcaacagccacaaccgcgggggagagaacaccccccacccggggaggtgggggggctaccaagaccaaagggggggggagaagaaaaaaaatcccctccgtgaaaagagaggggggtcgtaacacccccgggggggaggtattaaaaacaaaacgggcccctgccgggggggtctaaaacgagaggggcccccctaacgcggggaaggtgtttttgtacacgaggacggggcatacgccccacggcgacttaccgaataagagggaggggggcccactttcggtggccccagccgcctcaaagcgggaaatatgaattgtgggacgatgcaaaaacaacttaacaaaggggggggggagggggaggaccagccgacgtccaaatacataataaacttacgggcgatgtgggttggaaaaaaaaaaagaacaccgagggggggggttccctgaaccgaagcgtgtccgcttaatccgcggaattgaacaggaggggggg

SEQ ID NO: 130264 - DNA, 741 bp, Arabidopsis thaliana columbia
agcttgaatgcgcatgcacgcgtacgtaagcttggatcctctagagcggccgccctttttttcttttttttttttttttttgtttttttttacggggaacctttatttgtattctaccacaatttatataaagtccataataatttaaagttcaaaatgatttttgtccaaacatgatcacacacaaacccttttacctgcccataaccctttttcgttgtctaacttgggtgggaaagcacccaaaaatgtggcgtgaccagtatgaggaagacaggcaaaaaggttattaataagaccagtgccccgtaaaatgtgttggaaccaagcacccatcactgacaacataaccaaccttccgcttttgatctccttggtcctaaactacttgagttaccggaaatggtgcccacccaaaaggcgaccttttcccctgtgaacaagttgagtccctcatttgttgtttggaaaaactgggacaatttttgaccgctactcgggtcttgaaaaaaataattgggcgccaaataattaaaccgttcttttttttggccccctttcccctgtaacccaaggagaattgaaggtcttcgcaccttgggtacccaaataatagtttgtctcgatatttatattagaccaccgagggtaaaaaaaaaacgttcatatggattatttccccccctcttgttatatccccatttttaacttcggaattttgcttcttagacgaaaattttc

SEQ ID NO: 130265 - DNA, 751 bp, Arabidopsis thaliana columbia
  unsure (1)..(751): unsure at all n locations
tggtgtcatttcgttnnnnnnnnnnnnnnnnnnnnnnnnnnnnnnnnnnnnnnnnnnnnnnnnnnnnnnnnnnnnnnnnnnncttttttttttttttttttttttttttttttttttttttttttttttttttttttttttttttggaacacaaataaaaaaattttgttccccactcacaaatttgtttggggtaaaacattctttacaatttatgatcattatttttacaaaaaacctttttgggctgtcagaaaatttaaagaattaaccccaacccaccccttgaaaaaaatttaaatgggccaagtaaataaatttggagaagagaaacaaaaaaaccccctttttaaaccaacaacaaattggctggcccccataaaaccaaactagaacaggtggaatttttttttaagcaaattttgtttccaacggggaaagttgttgaatgtttttttttggatcccaaacacattttggaacttttcctcaaataaataaccctttttgggtttgaaatcgattccagccactgggttctaaaatttagctttcagctgttcataggggaaaggggctccacttgggtgtatttaaaaaacaccttgcttttttgtttccggcttggcttctggttaatcgggggcgggggaaactttcttttttttcttggtttaaagaccagtttcctttgaagcctttttttaatcttttgtttcccccagagggatgtcatttggtggggtggagc

SEQ ID NO: 130266 - DNA, 768 bp, Arabidopsis thaliana columbia
agctatgacgtcgcatgcacgcgtacgtaagcttggatcctctagagcggccgccctttttttttttttttttgttaataaagatcttctcttcttcttgtctatattgagtgtaaacaacgttggctctatctcgtgtttcttacaagtcaggaaacatacaggaagaaagaaacagtacaatgagtcaggttgcaatctctctgatcagccagtttaagctcgggaaggcaaaataaaggacgagaaacgacgggacagccaaagcaaacgtaacaaagaaataaaccccgagaactgcagcactcacagggattgcatataaagccatcaacaggaatatgactaccagaggaaacttagccaacaaatgagcaacaagagccattgacttacgtaccgagtcatggagcctcccagttctgaagaatcctctggtcacaccattccaccagctgcgattgtccagcaacccttcatcacccaaggcggtattactcattccatcacacctatttctcaagtctctctgccctgaagcaacccttttgttgtcgctgggtgcctccgatctggagccattcatgctttctaccatccacagaaggtaaaagtttcttggaagggaaatctggatgggtttccattggcaacactcagccctttaaaagaagaagaaattattgggcacccaagggggccaaggccaaccctaaaaaaaaggggaaagcctgggaaaatggggttaaaagcccacgaaaggaattt

SEQ ID NO: 130267 - DNA, 715 bp, Arabidopsis thaliana columbia
tgacgtcgcatgcacgcgtacgtaagcttggatcctctagagcggccgcccttttttttttttttttttttttgtttaaaagattttttcgtatattattagattcaaccaactaacaataacagctttctcatttacagctaaatctcttttaacttcaataaccaaaagtgactgtgaaagtgtgaaacaagaaaagaggaaaataaaagcagagtagagccatcctaaacgtaattaaaccaaaccagactttgccacatatttagtcagagactaagaataaagaacacaaaagtacatgacaagatgcgaagtcttgcttctgtttaagagatgttcatagcttcagcatgatagctttcgagatctttgtcgagatccgcagcagacttctccactggcttctttccacctcgcccaccgcttttattccctctgccaccaccattaccccggcctctaccacggaacccgcctcgaccagctgtcacaccaccttgttggttttgttggagtggaaggcgtctcccaaaaggacctgaacctcttcctcttcctactctcccacctctaactccttgtccaatgaagacactcctcttcatccttccattcaatccagtcacattaacacgagctgcgacaggaacagattcagtattttcacccagaatctccagtttcataggccttccatccaaaagtacattat

SEQ ID NO: 130268 - DNA, 446 bp, Arabidopsis thaliana columbia
acacatacacgagctatgacgtcgcatgcacgcgtacgtaagcttggatcctctaaagcggccgccctaactttttctttttttttttaaacaaactaatcaatacaatttgattgatacagtacattacataaaaaaggtccaagtacattatttgactgatataagaaagagaccttgaacaacatttccacaccaacgatcgcataacggtgcataagttcaagggttaaccttgggagcccctcccgagatcatatacctttacacagatctatagtttccccgaaactagactcacctaaaaacaactgggacttaaacttttccttcccccgaccagtagtgtgaaatatgacttattataaacgacaccactgtcccccaccgcttttcgtatgaacaaatataggtccctaaaaaaaaatcaccaataatctctctat

SEQ ID NO: 130269 - DNA, 402 bp, Arabidopsis thaliana columbia
cttgacgtcgcatgcccgcgtacgtaagcttggtaccattgagcggccgccctttatttaatctttttttttatcccaacaacaaaatacaaactcagcctattaaaaattgatcccaaaaaggcataaattataaaatgacctaccaaaacgatatatataagaatcttaaacaagtgaacgaaaataaataaaatcaacaaaaggcaaaacggttcgattcactccggtttaggtcttggtccgaacatatactcataaccggtcccactggatcccaaatctccaaatccaattccgaaataagacttcctccaacacgtaacgttatcgccttcacgaaccccaaaaaaatcccaacttctcctccgaattactttccagaagacaaattatttctcc

SEQ ID NO: 130270 - DNA, 1401 bp, Arabidopsis thaliana columbia
  unsure (1)..(1401): unsure at all n locations
gcgatccaactcgctctgaaactcatgtatgtaatatataatagattatgatagtaagggtatgaagggaacaaatatacacatgatagatgagagagcgggaaatcttagtatttttttgaggaagagcaaagcgtaggatcaagatttatgtagaagatgagtgttgtgtgtataaatgtattgtagttatcaggttgagtttctatagttaggggttgctgatgagatgtgatgagtggagagaggtttgattgaggattcgtggtgagatttattgtctattgtatggaattgaatgtggatggtatagagctgtataggatttgaggtgactatcgtgttacgattgatgatttgtttatatttcagtttatcgataaggtgtttatgtctaaatgtacggactttatggtggtaagttgcagtaagatggagtagttaaatgctacgaagatgtaagttatattagatcagttatggtatgcaattgaaaagtaagagtgaactatgaatgataagtagaanacatatgtgcacgttactgagagatagtacggatagaaagtatagatgtatgtgttatacatatgtgatctgagagcaagtgatggaatatagtatggtagcatgtatataattgggtgttatggattctgtagtcgatctgatctgattgtgtatgaatgtatttctcacgtgaacagaaagtgcgatgtagagattcgcgagtatctggtaatgagttgcgaagtgatcggtattgatcgcgagtatgtaggagtaagtgtaggataggatacgagtgagtttgcggatgttagtgctctgatgaatttgtatgtgatggatatgtttcgatagcagcactagagttacgtaagagcacgtgtcgataacagttgcattgttctagcgtctggggaaacgtcacgttataatggatgattgtattcgcgaaaatgacattaactagaatcttgatagtgtatgtataaatccccgaaatgaccgttgaggtggagaggaccctgtatataaaggaaaatatagactagatcaaatgtgggaatcgagggatataaaattgggaaaaatcttgagcgacgaaactcggtggaaaggttgtttacttaaataaaaccggcgaggggagtttattgaggaggatcttctttgttatgattttagggaagagggacgaaggtgtataatggtggttgttatataatataataatgtaggggagagtattgtggggggtaaaaatctggtggttgtatgaacccgtttgctaatctgtgggttaaatttgaaatatcacaatcttgggggtggatatggaaaatcgtatgatatgggggttgtagaggattaatttatttgaggagtgtagtgggg

SEQ ID NO: 130271 - DNA, 1067 bp, Arabidopsis thaliana columbia
cgttgcgccatcgtcaccgacgaaaccgtagagactctggtataccagctgagcagcggcacgccaccttatattaatttatttatattattttatattacaatacgctactttacaacacacacgatacgcggtcgaggttgtttccaaacacattcacctatcgttatcacaaccagaaggaaaacacacagcggcatcccgctttatattaataacagcaaagcgtgcccaccccgcacaaataaacaactattcagcccccccccgaggtctacctcgggtccccacacaccaaaaataccctccgtgccatggatcgagggagataacaacacgttaacaaaacaacaattgtacggacatcaaggggcacccaaattttcgtaaaaccgcggggagacaatctttttcgacataaagaaggcacaaacgcgcttcccgaccgagatcgtgaaacaaaaaggaaggaaaaatcttactgccacccccaacaaaaacattaggttgtggcccctcgtatatccgccgggagagttatcagaccgccacaccattgtcaacaaacatcgggggagttgagaggaaacaccaaccacccccattctgtggggtgattctcaaacctttacgaaaacatacccccccccaaggcaaccgcctgcacacataaacaaacacaacctccctttgtcacacacgaaacggcggccaacgtcaaaaagagggggccttaggggtaactacaccctcacaaacagacgacggggcggggctacaataaaaaagcgtccaacgtgccctttgtgcgcaaaaacatacaaaaaccgtagacaccgctcccagaggattttcttttaacctacccaacggcgccttcgaagaatagttcggcgcggcaacgctaggggtactctcaacaggggggaggaagagaaaatatattctccgaacccaaaacagaggccctggaacccaagtgcgcaaaattcacttgaaaccaggaaacaccaacactttggtccgacgcgagacctggtacacctcaaaaggagaaaattacctcc

SEQ ID NO: 130272 - DNA, 734 bp, Arabidopsis thaliana columbia
aactaagatttttggcatgttacgacttttcaataagcctggtttccttctgaaagctgtctcccttttttatacaactttttttttaaccgctactaaaattagtagcatgttttttttttttagatactatttttgattgtatttatcttttttttatttttttttatttttttttttaatctttttttgttatataaattattttttttcttttttaaatttttatttcttttattaaatgtaattttttttaatttttttctccctttattatttatattctttttattttttttttgtattttttgttttaataatataatagtttatttttcacatctattatttatattcacttcggttattttatacattaattgaattaaatttcttaacatctcatcttatgatgccccttattataaatgagtacatgatgaataactattaaaatttatatgtattggatttttattattaaggcacgtctcccttttttatttttatataatcgttttatttagttaatagaattattttgttttaaagattatttcttattcctgttctttccactatagatatttcaatcgttttatagttctttttttttattaatgaaatgacattatttgttattatacttatgtacttacatatattttaaataagcttatacctgattttctatagattacaattacgttataggattatggataatttatact

SEQ ID NO: 130273 - DNA, 700 bp, Arabidopsis thaliana columbia
gccggcttgaagccgccccaacggggaggacacggagggcgcggcgccgtttgttcaacagaggcaacccaaagaggaagaaccaacagggggggcaaaaccccaaacaggaaaacggaaaaggagacacgagccccagggcgccgcgcggaagaaaagcggcagaaaagcgacgggccaaagagaacaaagagaaagagcccaagccaccaaagaaacaagacaaggggcagcaggggacagcaacccgagggggacaagagggggaaagggcccagccccggcccagcaggggcccagagacccccgcccggcgagaccccggggccaattatacaaaccacggcgcagaccctcccggcggcgggcaaaaaaaagcgccagagccccccaagaaggggggcggacataccaaaagcgggcgcacagcccaacagcggagcacaacccggaacaaaaaccgagcactcggggtgagaaccaacgtaagcaggaagggggagaacaccccaagacccagcgcccccgggccggcgccaaaggggcagccgccggccgaaaaacgcaggccacgagagagacccagcggcaggcgacccacgggaagccggaccaagggcccggccgccgacacaggagaagaaaacgcgacggggaaaacgccgcaaagggaagcgagagacaaccacgcgcaaccgcc

SEQ ID NO: 130274 - DNA, 834 bp, Arabidopsis thaliana columbia
atgactttgcatgcccgcgtccgtacgcttgaatcctctagagcggccgcccttattttttttttttttttgttaaaactgacattcaatttctcatatatagtgatctgtccacacgggaaaaaatgaataacactatatctcctttggatttacagaggatgttgtcctttcatctacgcaaaagttcttttgcttcatcggttttttagatgattccacaaacctcctaatcttttactcggcaaaaccctttcctttgtgagaataaatcccatcaatatacctacactcgtctgaggttgctgtcgaataaggagctgcaaaaacaaccattagatttctttactaacagttagccggaaaaaggtagtttatcatcgtcctcgatttactgccgtcctccatactctatacctaactccgagcttgtcataagcaactggtaaaattcacatatgttctgctcccgctaatcatctcgtttcttgttgtccataaaactactccttaacattattaagttatatacctttttaaacaaaaattgtctccaccagaagctcccactgaattgggaacactctctctatttttaagaacaaaatattaaattgacattccggatttaaaagatcctgcccttcgatttttttacaaacaacgggtcaacccagttccattgtgtacattcgatattaataaactacgtgattcttacaacactccttggctttgtgtcttaactttcttctagccccctcttatatagaaataatcccccaggcgtctttttatgaataatatcctccctccaacttctggtccatcatc

SEQ ID NO: 130275 - DNA, 468 bp, Arabidopsis thaliana columbia
acacccaaaacacgcagacacaggaccacacggaaccacgcgaacacgcaaccgcccaccacacagacacaccacgcccaaagcaacgcaccaaccccaaacaaacacacacagagaccgagggggccaaccaccaaagcgaaacggcacaacgaacgcacacacacaaacgaaccaaagacacacggaacaacacaaacccagaaacacagaaaccgacccacgcgacgcgacgacccaaaacgaacgacggacgacacacacgaaacaaggagcaacatacacgaccgcacaccccggaaccaacacgacgacggaacccgaggcagaacagccaagacgccaaacaccaggagcacagcagcggcccccgcaaaccaacaacaccggaaccacaccacaaacgaaaacagacacaacgcaaaggacccgcgaacacccaccaagcaccaaccccaccacgaccca

SEQ ID NO: 130276 - DNA, 696 bp, Arabidopsis thaliana columbia
tcgtggaagcccatagtttggaacacccgaaaagagccaaaagagcgcacaaaacacagtttaaagacgaacccacaaaaagggggagaaggcaaccgcaccccgacagaaaccggaaacaggaaggccccaaggaagaccaagaagcccgagggaggagcaggagcaggcaagccaggagaggacagacagacaacgcacgagacagccccacaccagaggagacaccccagcaggggaccggaagccgcaccggagcaaacagaacacgacacgatcgcagcgagaagaggaagacacaacgcgagaggcacggcgcccccgcctagcggcagcaagaagagcgaacaagcacgcaaccgcaaagaaaaacgccgagcccggagagggcaagaagacaggaaacaaagcacgggatcgacggcagaacagtaccgaacagaaacaacgacgacaaccggcaggcccgcgagaggccgaccaccgaccgaagagcgcgagcccgaccgacaaggaaaccgccagaaacagagcaacggagcacagcaaaggcgaaaacaaaggaaaaaaaaaaacgggaagagagcgggagcaaacagcaccggaacaccccgagagtgagaaaacgaaagagaaaccgaaggggcgcgaggacagcagcacccgggaaaacaacgccgacagcgcaaacaagaa

SEQ ID NO: 130277 - DNA, 1144 bp, Arabidopsis thaliana columbia
  unsure (1)..(1144): unsure at all n locations
tttcnnnnnnnnnnnnnnnnnnnnnnnnnnnnnnnnnnnnnnnnnnnnnnnnnnnnnnnnnnnnnnnnnnnnnnctttttttttttttttttcataaaacaagacacggttttaatcattctggcccttcacgggagatgaatttaccaaaagcctgaccctttaaatttggtaaaaaaaaagataatgcgctgaccccctattcttcattcttaacacaatgcagaggcagggggtcaacattcctgttggacaagccggtgccaacggacgtaatttttttggaaccacgtaagacttcccaactagcacgcggggaatgaggatgcgccttactattcaccatattgggggccttcctcccgtcgggagaaagcgtgcttggcacggccttgtgccttgaatgggagcccaagagggccccccctttttgttatattggggcttgaaatgggtggagggttcgctcccctggaaaatggttttgcctaaagaccaaatagacgccgggaagaacatggcgaaagggggatccccttgatttgttggccccgggctttcaataatgggtgtaaaacatggggcccccgcgaattgtgtttttgtggcggtaattcccgcggaaccttgggtatagagaccccgggccctttgaaaagtcaaagaaatcggccacctcttggtttgggccggcaaaagaaatttctcgcacttgaacccgggaaagtttccgtaaagccccttcttgaaaaccaaggccacaagggccttagtaaaataaggggatagattgggcgtttgaaccatatacccgcgaggggaaatggtttctcctctcaaaggcgcccccggggaaaaaaaaaaaaagtggctttcaggtgggttgtttttaaaccgccatatgaaaacctgggttgcgggggttggggaagttattttggtttaaaccgctcttaccataaaaaaaccccctcccccaaaagggggctttttccagagggggcgaattggccccttgacttttttttcttttaaacccccacataaatatttgcggggtcaccccatgggggcaccaaacaccgggggaaatttaccgggaccccgggcacacttggggggggcgtacaccaatcctttttcc

SEQ ID NO: 130278 - DNA, 655 bp, Arabidopsis thaliana columbia
  unsure (1)..(655): unsure at all n locations
cgcctttcagttgcgccgcgaacgtccccctctggatccctcatagcagcggctcagccctcataacatattaatacaggcgtgcttttttctgtgattcncacgtgcatgacacaattaaacacacacaaattgtcggacacaagttgcgtcattcaaatacgacaagtcaacatctcacatttccacgtacttgtacaaacatctatctaaatacatcaacttaggtctacacagcccactctgaactttcgaatcagatcactcatcacacgattacctatatgcagtagtccacccaccagcattcacgcctcctctcgtctgggacactatcactcggttgttacaccatgaggtcattcgtctctcatccgccatacgtctccccatcgcttgaagcctatttcctcttttgttacacccgcgctattcgctgagcttctgacattctcccatccaacttgactcgacttctgtctcatgaagtcctcgcgcatcgtacatttcagtgcatccctatcccaatatgtgattgaccttttacaatatgggaccgtcgatatattcccccgcctctaagcgatacccacaattactcttgaatttcagcagtaaaaacgctttatctaataacacttcgacgtactcttcg

SEQ ID NO: 130279 - DNA, 929 bp, Arabidopsis thaliana columbia
ctttgacttcgcatgcacgcgtacgtaagcttggatcctctagagcggccgcccttttttttttttttttgtttgccatacattttcattcaaaggcccaattggcaattacataagggattaagtccagaggattacaacatagttaacagcccactaaaaacataatataaacaaaagttgctcatatgctttacttttaaacacgtttacaaaacgtattttgatccagcccacgcgttcactccttaagcataaccgttaacattgccggacatcggcgtattctgactaaccaccgtcgatctgttctagaacgatgtaaatccttttcccttccgccgaactctaatcctaaagatagatagcaccaacattcttttggttcgattctataaagttgctttaaaattattttggtaacaccaattcggggcagctacaccaccagttaccacccaatattgttgcacctaaagatccaattttttggttacaaccaaatttgaagcataaaggggaatattgaattaaaataatattaacttctctcgcaaacaaatttggggggataatccccatgaagaaaaaattggtcaatcaattgacacctactatttaaattctcccgctttgaaaacaatctattttttataaaatagggaatattggaattatttccgtaaattttgtctctttctagtaaatctcaagatatattttataacaaccccgttgacatatatttcccctgtttaagggaaaacatgtttaccgaacattcctcaaggccctcggaaatttttaatttgaatttttcaataccctttttggccctatataagctctttccccccttattttccgctataaaaagatctccttttagggataccgaaacacccggaaaatatttcctgaaacccctt

SEQ ID NO: 130280 - DNA, 738 bp, Arabidopsis thaliana columbia
  unsure (1)..(738): unsure at all n locations
gttnnnnnnnnnnnnnnnnnnnnnnnnnnnnnnnnnnnnnnnnnnnnnnnnnnnnnnnnnnnnnnnnnnnncttttttttttttttttttcccacttagactggaaaaataaatgcttgacaagtgcacagtattcgaagaaagaccatcggatctaaagaaacatccttaccaatctctgcgctgcagtaatcaatcagatgaaatacgaactggaagatataaattgtagctctgagcgtaagagggccaatgggagggaacaggcttcttggacgtgggtgtttttctttagttgctccatcagccaataaatatttaatgccgcagtgataagggaaattgcccacaacccactcttttgccacttggctatatcaaacctttgtgtctttgtttaggtctgagtgacatcatcatcacctcatccaacctgtcaggaggagatccggaggaatacagacgtggaggctttgttgaaactttcaaggcatacggctacgatatcgctctcttccccgcccagtgttgctactgtcacaggaagctaaggtacctatgacaccataaccagagtttccaccactaccacgggcttctgaaggaggtccccaacaacatgaatcggtcattcctccgccaacacgtgttggcattccgcgggtctcatgaagcacatcccctggaaagcccccttccgaaaggggcagaggccacattccccaaagacagtagttt

SEQ ID NO: 130281 - DNA, 931 bp, Arabidopsis thaliana columbia
gagaacaaagcgacgaggagaaggagcggaggcgagagacaggaaaaaaaaagagaaaagaaggggggaggagcgagagagaggaaggggaggaggagaggaaaggaaagaacgaagaaggaaagaaaaagagagggggggagggagagagagcagaggaagcgagagaaacaggagaagggagaggaaaagagagaaagggggagaaggaagggagaggaggagggggagaggagaaagagggggaaggaggagagagagaggaaggaacaagagagaagaggaaaaggagaaagagggaggaagggaggcgaaaagaacaaggaaggagcgaatagaaaggaagaagaaaggggaggaaagagaaggggagggaagcgacgagagagggagagagaaggagagaaacatgaggagagagaaggaaagaagggaaacgaaaaagcagagaggaaagaggagagggggaaaagagagacaaaaacgggggggtgacagacgagaacgggtaggggagaaggaagaggggaagaagaacgtggaagggaaatagaggagcacaacggaggagagggatgcagagaacagaagtaggaaagagaaaactggaagatgagagacagaggaaagcgagataggagacataggaaggagagagacagaaggagaaagaggaggaagggaagaagaaaaagataggagagaaacagacgacaagaatgaaaagaaggggacagggagcgggagagagaaggggcgcggcagggaaccgagagaaacgaggaaaggagagaagagaagagggagacaaaggaggggaagaagaagggctaagggacaaaaagaagagaggagaaagagaggaaggcgagggagaggaaggcggaggaggggaagagaagagaaaagaagagaggaaaggaagagagga

SEQ ID NO: 130282 - DNA, 827 bp, Arabidopsis thaliana columbia
  unsure (1)..(827): unsure at all n locations
cgcccccccctcgttgacttccgttnnnnnnnnnnnnnnnnnnnnnnnnnnnnnnnnnnnnnnnnnnnnnnnnnnnnnnnnnnnnnnnnnnnctttttttttttttttttttaaaagaaaaatataaaagttatctatttcatcacgtcaaaaaaatacagtagaaccacaaactgttttattagtaacagccttacaaacaccaaaaaaaaaaaaaaatctaagaagaaataaaaaatctagtaacagaaaaataacataaattcacatcaaatattttttatatttctgtttgggtgagtcaaggacaccttgggttccgaccaggccctccatagtaaaaataagtcccccatacattgtttttgccttgtctgatgtcataacaagcggggtgatcggccaagacatggagattcttcagaggcaagagattgttgtcccagtcaacaacttgtaaattcctaaagtaggcagctttctcaaacccttcatctgcgaaatggccgcttcccatctgggttccggtgtgagcaccgcttgatcggctgttcacaacttcgccgccaaaatggaccatacttgcatgactcctcaagtgaatgaacaagaaagctggcccgtatcccacaagaagtccatttcctagttcaagcccccagtgccccatgttttggattccttccaaaatcatttaaacccgatttccaaaactgggcttttccatttataaagaaaggacccttcggggggaaaaattcggcttggaaccccaaatttggcaaatttttatatttgggttgggggttttgggaccccaaaatttc

SEQ ID NO: 130283 - DNA, 817 bp, Arabidopsis thaliana columbia
ccagcctgatttcgcatgcacgcgtccgtaagcttggatcctctagagcggccgcccttttttttttttttttaattcaattcagaaagacttacaaaaaaacaaagtaagctcaatttttcacaaaaaaaaatataattatatattcttacattacgaaaagacaaacgtatgaattatttacattagattaaaggaaaaaaaatgaattttaagagttggtgtgactagaaaaacttagtaccgttccccacctgcctcacttctcaacggcgaattcactccatttctcaacgttctccggtgattttccgttgaattcctcggcgacttggccgtgggagatggagacttggttgtcggagatggagacgaccggggatgattactttgttgttgttgatgatgatgatgatgactactcttacgtggcttattaccaacacgaccatcatcttctttattgtccggagtgtttggcaccgtgtaaatgaaagtccccataggaatatcattatagtctttaagatcattgagtatagagacgacggctctcatacatggccggttcttgggtcgatggcttaagcatttggaagccaatgttgctgctttttttgctcctggctctgagaactgacctttaaagtttggggtccctgatttcgaaaaagttttaccgtggggccatttgagccatttggaacgaagccccaaattccacaaagggttttttggtctccccttcgaatgaataccctctttttttggggcctaaccttgaatctctccgcgttccgggttcaaaaaaagcctt

SEQ ID NO: 130284 - DNA, 879 bp, Arabidopsis thaliana columbia
cgccccggttgatagacgttcattataaaccagctatgacgtcgcatgcacgcgtacgtaagcttggatcctctagagcggccgccctttttttttttttttttttttttttttttttttttttatcaaaaaaaactgcacattggattatatatagtagggctaagccgcaccaatgatggttttgctacaataacatatccttacacagagagaaacacgagttttttttacttttttttaacgaaacctttcaatggaatttaggcataatctatcaaacacatccaaaatttagggcgagggcgactaatatctgttttcttcaagcaggtcaagctttatctggaatactctgagctaaaccttggccgtggagattcctttgaccggaacttccaccactaccataagagacatcatttcccgtccccgacgaaatttgccaaacactttgccacgcctgaaacggagggtggacataaacaccattcggaaccatagctggtctcccaataatagatcctccaggaccaactggttcgcccatcgggggataataaaaaggcaccccgttcggggaaggagccaccacccttccacccccgggggctgggggttctcccttaatctgaactttagggaacaattttcacaagggaaaatgcaaagaattttaaccccctaggaaaacccgcggccagcgcaatttccgttttttttttgaaaaagcggacaccaacgtgtttttatttcttttcctctcaagggggggaaaaaaccccaaagaatcctggaattccaggaaaacctttcaaaaaaaaaaacaaaaaagcctctcacacaaagtctttttcccccaaaaaagaaaaaaaatct

SEQ ID NO: 130285 - DNA, 602 bp, Arabidopsis thaliana columbia
gacactagacgagctatgacgtgcgcatgcacgcgtacgtaagcttggatcctctagagcggccgcccttttttttttttttttaaacaaaaaagaacagtatttgttgatgccacaggtgtgctcgatgtaatgagaaacaaactgtattccaaacaaaacttgttacatatctcgtggcctgactacttaaaacatagacatccataacatgaacttaatccatagtagttttgagcgtttcgaccgaattgggggtaatagagagcacggaaacgaaataaattattgtgtaacatcaatggggaggaattacgtcaccgcactcggtatcagggaaatttccaccaaaacaacctgcagtgcctatgccgtataaaccacctgcaccgtcttgtccaccgagtgcactatcaataccagggcgaccaccaagtgcagctgctacatgaccagaaactgaagccccacctataccacctagactcgggagaccgcctacaccatcggtctataccaccaattccggcggcttaaccgcgggcagcaaagactcgggagaccccataactttagcggcgaccacaaccaaagcaggttga

SEQ ID NO: 130286 - DNA, 714 bp, Arabidopsis thaliana columbia
  unsure (1)..(714): unsure at all n locations
nnnnnnnnnnnnnnnnnnnnnnnnnnnnnnnnnnnnnnnnnnnnnnnnnnnnnnnnnnnnnnnnnnnnctttttttttttttttaagtgaacgtgatgatgatgatgatagcgataatcaaatgccgagataataaaaatcctacgaataatgaagagcttctgacgtggcacacaaacccaaattctcttacaaccaaaaaccacaataatttaaaaaggcaaaagcactgactccaccctggctctctaaaccaattacatccacaaaccataacccaaaaccattgagactcccaccaaaacgtaactcatcactcccttagacgcaccacttgcctttggtggaggaggaggagaagttgaacctgcaccatgagtgggtgtggtgggtgtgggtgatccggcacactgaagtgattccggtgtgggatgagttcccgggaatcaataaagtgacgtgggagaggcctgaggtactgaataaacggattggacatttacgggctgtcttactgctgccactgctgtgaccctgtggggaagaaaaggaacctgtgattccatcactcttaagatcaattttgggcgcttccatccgaatggtgttccctaaccggcaggagggtgtccaattccccttaaatatcccgggttttggcccaactaccaattggaaccggtgggggggggaaaaaaaccccttaccttttgg

SEQ ID NO: 130287 - DNA, 629 bp, Arabidopsis thaliana columbia
actatagacgagctatgacttcgcatgcacgcgtacgtaagcttggatcctctagagcggccgccctttttttttttttttttttttttctggaatttattggggttttttttcttcctttaaacgttggattccatagataatacataagcacaagagtaaaatcataaataagacgagagattggttccacacattggttggttcaacccctcaatgaatattttttaccactaaaagcttggaacttggcttccttctcagcctcttcctcttgctttctatctttcccagctccaacctttgttgtctctttagtagaccgctctacatttgaaccgaacacaagtttccctcgattttgttgcgtaaccttctctgacccactactactactacttgcaacaggatgtgattggccgtttctgttagcagcaaccaggttgcggttcatagggaaaagggcgtccattcaaacctttttccgaacccgtgaaagggggtaaactttgggttctggtttcagcccacataaaacccttcctttagcttttttggctttaacacttttggggcttgggaagccaaggggtggcttaacagggggtccggctttccgggggggtatt

SEQ ID NO: 130288 - DNA, 763 bp, Arabidopsis thaliana columbia
  unsure (1)..(763): unsure at all n locations
tnnnnnnnnnnnnnnnnnnnnnnnnnnnnnnnnnnnnnnnnnnnnnnnnnnnnnnnnnnnnnnnnnnncttttttttttttttttaccaattttatacagagagacttataccataccaattgaaatctattcacatcctaaacaacgatacgcgaccctactcatgtatcaattaaccatttgctaaaacattcagagactgacggaaattgtaaaaagagactataactctatgagtcaggggaaacccctcattctatcaaccagtacgagtggagctctctctctatcccgcgatttattcctttcttcattgatcccggattaaagagactccttggtcagaaccaaccatctatcgcctcgatcatgacttcctttgatgggatgggcgagggaggatcgaatttgccagctcctcattcaacttcaccggaagaggtggcatctgcttcataacttctggcatgtcattcaagtcgttcaagattgcaaggatattgtctcgagctttgcacaagatattgacattctcatgtagctggaaagctgagaaatttgttgaaagttgattgaacatttgagcattttgctcgagaaaatctccactcacaccaccaatagctttatatgaaataccatcatcggtatcgataggcatcataagcggagcataagaaggacccttaggatgaacattcaaatgagaagaggacttggctgaagaatttggagctttttctttcttattcttgcgttttc

SEQ ID NO: 130289 - DNA, 817 bp, Arabidopsis thaliana columbia
  unsure (1)..(817): unsure at all n locations
nnnnnnnnnnnnnnnnnnnnnnnnnnnnnnnnnnnnnnnnnnnnnnnnnnnnnnnnnnnnnnnnnncttttttttttttttttaaaaaaacaaaaattattatcacatcctatgttgacgtcacaaaacaaagaaattgttataggcttagggttcggacaagtgtggtcctaagcctatcttccgatcttaatccttctggaaccaaaacaacaacatcttgaaccataacctgactcaagcgcgacgcgttcgcgtgttgtacacgacaatccatttccattaacgcactcatcaatgccgacgtaggatggttcacattctctgtctgaaccctaattatggcttcttctccgacgatcttcacttgcacttccaagtcagagcctctgtttgattttgaaggtttctggttaacttggtactcaacggaagacggagacgtattgctgctgctgttgtctaatttatctgtctccgtcatcttcattttcttgatctcagtttcgagatcatcgattttggatttaagactttctatgtacgaaactgcgtcggataaaagtgacgctttgtccattcgtgacacttttggtacgatggcacgtagagcgtaaaaccggtgggttaacttctctctccgttgcttctccgcttccacgtggggacaaaaaccgccgggatgaatgtttctcttttcggcggccggcaactacccctttgtccggcctcaaagttatccccttccttccggtttttttttttcccgaaccccgcaaatttggcttgaatttatcccgcttttttcggaaaatga

SEQ ID NO: 130290 - DNA, 764 bp, Arabidopsis thaliana columbia
cgcatgcacgcgtccgtaagcttggatcctctagagcggccgccctttttttttttttttttttttttttaagaaacttaatacaccaattggatcttccatatcttgacaaatctcaaaacgtttttttaaatggttgcttgcagcttataacaaacgataagtttgtaagtgtggagcacagggttttggcaaatagaggtgaagaacctcgcatttcaagcgcatctttcttcatgcacaccataccaaatgagcaagtatatggacctatgaaagagcttctatcaaagcaaaaccctcccaagtacagaaacacaaccacgaccgagatggcgagacattacttggctagaggactcgatgggacctcaccgttgctccatttcaggatctgaaagtaatggtggatccaaatctcagactcagaggatttctcagtagacactacacggctttcaaaaggaaatgactgaatgtcgcacatgtgatatagctgtgtccctttcagactcttctactgttccaagtttccttggaggaatgaaaccttgaccacctttttttgaaagagcccttttttaaatctctttttcaaaaggtggttgccttgccccaacttcactttttctgggtcccctcttttggaccctttggttttgggaaaaaggttttgggtttttccccatatttaccccatattcccccccccatttttggggggtggaagaaatttttgaagaaaaatgggcctccctttttcc

SEQ ID NO: 130291 - DNA, 631 bp, Arabidopsis thaliana columbia
  unsure (1)..(631): unsure at all n locations
nnnnnnnnnnnnnnnnnnnnnnnnnnnnnnnnnnnnnnnnnnnnnnnnnnnnnnnnnnnnnnnnnnnctttttttttttttttttagggttggaaaaatttttttcggatcctctttttggtggtccgtcaaaaattatgagagcacactttggaatctctttgcttctatatatatcacaatcatcacaaccgcccctatcggtttcagtgaaggtacctgtcgaaccgctcctctgaccgactcagacacaaagcgagagagctcaaatcgcacaccttacttcctggaatatgtggtacccaagggaccaaaagagccctatctttttcacctaactactttcgtgaggttaacgctgtcttcacagggatctgccctgtccgaatcatcactggctgcccattctcgttttcccgctcatgcgagggaccctactgttgctaacgttctatcagaaccgattgactagaaccggacaatggctttttgatgtgctgcggggacaaaaatggcatgtgccataacttgctggggctgatgaaccatgttcctgttcccgtcctaaccctcatacggctcagctcctagatgaggaaccgcgtgctggtttctttatgcttcattggtc

SEQ ID NO: 130292 - DNA, 776 bp, Arabidopsis thaliana columbia
  unsure (1)..(776): unsure at all n locations
nnnnnnnnnnnnnnnnnnnnnnnnnnnnnnnnnnnnnnnnnnnnnnnnnnnnnnnnnnnnnnnnnnnnnctttttttttttttttttttttttttattacaagatgatgattttctatttttatgatcgggcataagcgtacaattaatcatcatgagacatatatatatatatatatatatgaacaacaacaacaacaacaacaacaacaacaacaacaacaacaacaacaagccacaccttaagataagatgaaatgaagaccgagatttatttataatcagcagcatgagataatatctagtttaaaaagagccaaaacaatatcatcaaaccctaaaacaccggatgagatggttgtgatgatgatggtgatgatcaaggagattagtaccgagaaatctagtgttttctcgatcgatcaatccttgaacatacctaaactcctcaacgtgacaagggatcgtgattgtccctttttgagcaaaaccaaactcttcttcagcttccttcaagagttggccaaacaaaggatgattaaagtacataacgggaatcacaaatctctcttgctcttctccttgtcctaccttcactggcaaacacccttttggtaccttttcatgatcatgctcatgatgatggagacgtgggatgtggaagctccagtggctcatgactttgtctccgttacccatgggccgataatattagtatagataatatatactatggtttagttagtttgcggacgcgtgggtcgacccgggaattcc

SEQ ID NO: 130293 - DNA, 937 bp, Arabidopsis thaliana columbia
cctagcattgtgttatgaggatggtacccgcacacgggggcggagacgcaaaccagcgctgtgggcaccacagagtcacgccagaggagccgccgcccatatcttttttttggagcccgcgagagcgcgaagaacatggcaagactacaccacgagggggggggggacgagaaaagagaccggagggagaggaagcacgccgacggaaaaacaggagaaacggaggaggcgagcggaacgagggcagagcggcgggggaacggaatgacgaaggaaagaaaaggaaagggggagaggcagcgccagagaaggggggaagggcacgaggggggagccgagatcaagaaaagccagcaagagcagagagcgaggaaagtacaaggaaacacgggaaaagagcaaggcgaggcagaaagcagaagactctagcaagccaatcgagaacggtggacaagaagatcgaaggctccgtgaaggcgaaatcgcaggagaagagatagcacacggtgtctattgcgactctactccatgcaaacagagtgggatacgatggcagacgaaggaacgcgagcgcggacgcgacgatagatcagagccagagatcacggcagagagacaatgcaacgaacagatcaggcacgcaccagatcaaacgactataagcactgcgatcagcatcagataccgaggcgtatgagccgcgagcgcatagcgaggccaagcacacagcaagcgcgaggggagatccgcaaaggaaagggggaagatggcgccatgagtaacgtggaactcggtgatatcgcgaccccaaccacgcgcaccaacagaaccgggagaacggtgatcgatccattgaacgacgccaatggacggacacgagctaggaagtacacgaaaaatggaggtcaagacggtagagacagcgtcggtgaactag

SEQ ID NO: 130294 - DNA, 341 bp, Arabidopsis thaliana columbia
agaagagagaggagtgtatgagggacgaagacacacgcaggccccgcgaaaaggggaaggaagacacacgacgcacgggacggacacagaacacgaacagggagacaagacgaggacaaccgtttttatgacgacgcgggagggccagagaccggagagacaacgacacgcgagcgaggcggggggcggagcacgcaaccgacgcgggaaacaaaactgaggagcaacacaacgataacactgacgagacgagaagaagagaacaaagagaggagaacaagatcagaggaagaccgacagggagccagcaggaggacgcccgaacaacccgcgaagacgag

SEQ ID NO: 130295 - DNA, 929 bp, Arabidopsis thaliana columbia
acctctgagaccggccgcccttttttttttgtttttttttttttttatttttcttcatttagaagggaacttttggacctccttcatcatttgaacaaatggcacaccggaatccttagaaacctttggaaatgattattgggatccgaccaaaagatcttggaaattaaagaaaatcaaatattttgagactcgatttttaaacagaggcaagatgatatccattttcctttaaaaattttaacttgcccataataatcattcgctcgcaacggcgggcttagtttcgggagcataatcgggtttaattatacaagcaagttgcacactagcagtccctgccataaccacattaacactgcagaggccccaaccttacggatagaggaccatgtgtgtgccagaccaaattacacccactgtttgtacacccctaattggttgagggaaagggaaagtttttctctcggagggttggggccaaaattttttccaatggttgggccaaattcttataatccccctccttttgaaaaccgtttggggtggccccaaaaaaaaaattaaaggggggtctttttaggggtttcccgggaaaggggggggaaataattccccaaataaacaagcttgtgggaaagcctcttttcagaaacagtgtccccccctctttcattaaaagaagggtttcttcctcccgaaggtctcccgccaaaaaaaagttttcctcccccaccacccacataataaaattcccctcacccctttttttctggcgagggaaccttctccttgggggacgtctacacccccgggggaaatttctgggggaccccggtgtttcccttgcgaagggggggaaaccaccccttttctctcaaataaacggagagggcgcgtataataaaaagatttgggccataaaaaaa

SEQ ID NO: 130296 - DNA, 965 bp, Arabidopsis thaliana columbia
cgagctttgattgcacacgtacgcttgcttggatcctctacatcggccgccctcgttttttttttttctaagtaaccctttttaaaattcatcctataaataaaatttacagttcatcaatacaacaaaaacaactcatgaacctttggtaaacaagaagaaagaaaccgatgcaaataaagaaaacgaaaatggagtttttaaaaattattaaaacaacaaacgaaaaaaaaaagaagaagagttgttacgaggcgtgaaagatgcgttgcttcttgctacacaccaacgataacatctcagtatcgtgcactcttttgtttcctacgacgtcgtttcttgaactctccggtgaaatgttaactccgaacaatctcaaaacccgacccgcatctaaatctgacccggatctcgacttccacccaatgtacaactgttgatcctgaccgttagatctactgaaactaacccacgttaccaggcacgtagattttttttcctttaaacgaaaccttggttccaaaccctttttaattcaaaaaacaataaaaaccttttgaacattaccttggtgttcccaccaatatacccgaaggttaaaccgcgggaaaaacccctttctcaaacaaacttttttttcccccggtgttataaacgggttcccctttcaaagaagggtttttaaaaacaaaaacaaagttttcctcttttttaaacggggaaaaaaacccttttaccctttgtaaacgcgggaaaacgccggaaaaaaaaagggttttctctcttggggcggggaaagggtttccggggttttaacaccaaaaaccgggtttatacatttttcccaaaccgttcgccttttgggcggttaccccgctttttttttaaaaaaagggggcttcccgccgatttttaaaaaccccccggggtaaaaaaaacccgttttttttttttaaaacccccgc

SEQ ID NO: 130297 - DNA, 770 bp, Arabidopsis thaliana columbia
  unsure (1)..(770): unsure at all n locations
tccgttnnnnnnnnnnnnnnnnnnnnnnnnnnnnnnnnnnnnnnnnnnnnnnnnnnnnnnnnnnnnnnnnnnnctttttttttttttttttttttgtgtttgcaattcgagtcttctttctcatttcagcaaatattcatatactgaattacataggaaagtagaaactgcaaatactcaaaatagctcatccgataacaaagttatactaataaaataagataaaaatccaaaaccacacttccaagtgttttcatcatctactcgaaaacccaaaacctctccttgatccacgtccttaagctctacccttgcccttgcccttgttagaacccttgttggaaccaccaaattgtttgcctgagttgaatggcttcttgttgttgttaccaccggatgattgacctccagacttggggctctggttagcattcacaggagactttccacccttcttagctgggtgtggtgtcgctgtgtgtcctcctttcttcttctcttctgtcttctgaggagtagaagctggggctgctgctggttttgccttctttccagagaccggtgttttggatacagattcatttggccctcttcttgttgattggcttcaagcttttttaagagggctccctcctcttttttaatccctcaaaaatcccttctctcctcgggcaataattctggaggtcaaatctttttaattaaaacaatcccactttccctcttttcttcaaggaggggcaattcaataccccttctttttaaagaac

SEQ ID NO: 130298 - DNA, 754 bp, Arabidopsis thaliana columbia
tagacgagctatgacgtcgcatgcacgcgtacgtaagcttggatcctctagagcggccgccctttttttttttttttttttttttttaaatgaacaaaagttattctttcttgatttattattggaacatttctttcttatataacacatcagaatctcaagaatcttatgttttttgcttcatacactttccatgttatcgagcttatattattgctcatcaataacgttgaacaggcacaagttgaagaggtattttcttgacaatagagatattaccagcttcttccatatcaatgtcttcacctttagtcccatcaggcatactccaatcaaaataataaagcaaattcatcaatgctagttccacactagcaatcgccattggcattccgggacaaatccttcgaccagaaccaaacggtaataggtcaaaatgttgtcctctaaaatctacagagctatttgcaaacctttcagggttgaattctttagggtcattccaacgcttagggtcacgttcgatcgtccacacgttaagctgggatttgtggtttcgggggaaaatcataaccttggaattttgatgtgagacattggtttcctttggcccccaaattggaagtgccggtggtaacctaaaagtttccttgagtattggggtcaaaaacctcaacttttgccttaatttttttttaggtgattttttttccttctttgagaaaccccaagtggggttccaaatacctttttt

SEQ ID NO: 130299 - DNA, 757 bp, Arabidopsis thaliana columbia
tgacgtcgcatgcacgcgtacgtaagcttggatcctctagagcggccgccctttttttttttttttttttttttttaagcgaacaaaatttttttttttaaggctcataattgccacagtgaacacataaatcaccccacaatctatactgattttaaagcatttggcttcaaactctactcatgaccaaaagcttatcttgttctgaaaaactaacgcttaatcagaacatctttgaagaaatcctctactgaaaacagggattttcccgggaccttccacatgagtgttttaaccatcacctccacgtggcatacaaccttcgggttccccaatcccagctatatatgctgagttcccattaaaagccttgatcggcaattggggacgaatacttcccaaccaaccaaccttttatgtggcaaaatgttggcccctaaaatcgatggaattattggcccgcttttctccaatggattatgaaggtgagtccaacgcttagggggcacattccaccagacacgccgaaagctgggtctccgattaaaggggggatctttttagctctaatgtgcttgatgcgaccacctatggttttctttagaaacccacaaaatggttagttggcaggctttcttggcccaaatatgtttctaaatacccaaaattggtttccctcaaaacccccaacttattggccccccaaaacttttggcttaaaggggtagggtgttttcacaccctctttttacacaat

SEQ ID NO: 130300 - DNA, 817 bp, Arabidopsis thaliana columbia
gcctgacgtcgcatgcacgcgtacgtaagcttggatcctctagagcggccgcccttttttttttttttttgcagagattgagcaaatcaaagttacaaacttacaacaatacaaatgtgtatgtaaaacaaacaaaaggaacaatctttaagcattccttggatcactttctctttttcttttatacaaatcattacataaacattaaccaaactacactgtataaatgtaaaatcatctgtccacttcttggctctctatgaggtatttgaatgatgcagagaggttgttggatccagtggttgcggcggttgtgacagagtcaaagcatggttcagctgttgctctagccttctggctcgccatcttcgtctccatctcacaaactcaaccatcactgaacttccgcatatgcatacaccaaatccagcaaatgttgacagaagaactgacagaactggttgcaacttcaccacagagtaaaatatatgggcgaagagaacgaccaacgcaaactggacagatgcgtaaatccagacaaatcttctaattaccatggttgatgcggtcatggatgcaagaagacccagaattcaagaaaacggcagtgatatagcgatgggaccctgtacccaatattcttcaaacccagaaacttgcttcgaggaaacccaaaagttaagcccaagccttgcctggatgaaataacctagaaacccgggtaacactttcttggccaacacaccctatttaaccccaggaagaccttttaaagcttgaggggaaccaccccggaaaaattttccaaaagggcctt

SEQ ID NO: 130301 - DNA, 799 bp, Arabidopsis thaliana columbia
ctatgacgtcgcatgcacgcgtacgtaagcttggatcctctagagcggccgcccttttttttttttttttgtttttttttcatttttatttttttgtctggacataaaattaacttattgaattgagagggtacatcaaatcaaatatatgactcacattggctgtaccttattaccaccgaaattaaaacatgaaaacaacgaattaaacatattacacattgctgcacacccggagaatcatgacccttacagagctaaaacttaatcggacgaccaaaccgattaataaaataccgaccactatgataggtgttggttcaaaaacactagaaagagaccctgaatgaaaccctctttttccaaaaacaacccaattttggggattttttttacttgcgggggaaaatccaccgtttaccgagttttatttttcaaagtccggaatccagcattgagatctgggtacaatttcttgaaattttccaccaggggattcttccctttggctggggatttgaactttttagacacttaaatggagaaaaaaacttctaagccaagctagataaagatgtaggtatcttttgaacggccatttcaactggtttttttaaaccccttgtttggcttgggttttcgaaattggataattgtttaccccattttttcccccccgggtctctgttattaaaaggggacccataatattttgtccaatattggggaggtttataccccccgtttttttgaggccaaagagggaaaatttctttctctctttaaataaagattttaa

SEQ ID NO: 130302 - DNA, 811 bp, Arabidopsis thaliana columbia
  unsure (1)..(811): unsure at all n locations
tcgttnnnnnnnnnnnnnnnnnnnnnnnnnnnnnnnnnnnnnnnnnnnnnnnnnnnnnnnnnnnnnnnnnnnctttttttttttttttttttgagttatttcgttaaatgtagacaaatttgtgacaagaaaaatgggtaatttattcaagatccaaacacaccctcccaaacgatttcccacaccgaaatcgtttagtacatacaatttttcttctgcttttcaatgcttcgaatttctaaaacaaaatcagtttttaaaatccgattacaacaaaaaaaaaaatccttattccggagactcgaattcttcagatagcataaactcacacccaaaggtttatagacaccttttgttcacgtcccattttcttagtacagcagctcttcgaacacgggatctacgctttgtccccattctccattgtacatctccaagagcttctccgcaggcgtaactcctgttctgaccacttcatcgactgcgttcaagaaaccggcttccttgtagcctctgcgctctaaaccatcctttgcgagtttcaggacatcttcagcgacatgctttaacaaaccatccctaaaaggagtctttaagccagtaactggggactttgttccttagcatctttttttctgctggagtccagtcagctgtcagatccaggatagcttggagactatcatcatcatattataaaccccacccacaaaagctgggcaggggcacacaagccttccttcaagggacccttcattcaggcaccctttttatttttccaagtaatttttttttaaacccgaaccctttt

SEQ ID NO: 130303 - DNA, 784 bp, Arabidopsis thaliana columbia
  unsure (1)..(784): unsure at all n locations
tnnnnnnnnnnnnnnnnnnnnnnnnnnnnnnnnnnnnnnnnnnnnnnnnnnnnnnnnnnnnnnnnnnncttttttttttttttttttttttttttaacaaggtatggttgacaagtaaaatcagagaatacagaacaaatagaagtgagtaagttcttgtttaatatctgcaaatttgtaacagagttcttgcttctatctcaagggtagactagttttggttagtcgcattgagcgacaatgttttttgtttgtcttttggatctgtagcagaaccaagaacaggatcgtgtctgagtagtctattgctgtttgctgctgtcagtaccatcataccgaggaagatcaaaactgagatagatgagaagataagcattaagccagaaccgaccggatctttcacctcttgcgcatactgaaccgagtctaacgcaagaaaagtgagtgggaacgagtaagcccaccacgcgacattgaatcttttcattgatttcttgaaaagatttggcctacagaccagggacatgaagatgaaaagtgaaaggaagaacaacatcttcgctacggcatcaaaagttccacaaatagagttccaggctagacttgccatggctggtgcagcgacgaacaaaaagaaaattggccttaacttggctgggaagttgtttccctccggtaagcgttgatagagggtgacaaagattacccaatagtgaaccatttcgagtgagaacatgcatagagcaaactttttcaacccattttttgtgtttcttgtgcaacc

SEQ ID NO: 130304 - DNA, 971 bp, Arabidopsis thaliana columbia
  unsure (1)..(971): unsure at all n locations
agctttgacttggcatgcacccgtacgtaggcttggatactctagagcggccgccctttatttttttttttttttttttttgggcaaccaacacacactcgtatttgtatatattttaaaaagatgcgatgagcccctccctccaagctatcacatcagacagcaaagagaaaggagggtcatttattgatgattacatgcggaaaggatgcattattgaagaagaaggagacgaatagataaggaaagatgtttggtgaatggtgagtcatcaagcctttgtaggaaggccatgcttggtccaggccctataaccaccgaagatatctttgactccccagaagactgtatggagaaaatcgggggtggcttagatagaactaccaccgggtcaggcagcccacaaagatgttattggattgtccgaatagggaggagacttgcttcaggaaagcgggggtctttgacattcctgatgctcctcgattttaattgaggggaccagtgggttttccccgggaaagcatgtacaatggggcctccaacgtctttaatatggaaaacccctgggacaccttttaaaaaataaggccgcgtcgggcgcccgcggctcttacaaaatggaagaaggttctggttgtggggctctataaacatggtgtatataatcccggatacacatctctcggaatatgaaatggtggggggaaacctcttgtggggcttctatatacacaaacaccaagggcgcatattttttatttnttatacaaagagggggcggtcaaagaaatatttaataaatcacggtaaccagcgcgggggagttctcaacccccccgggaaaaatttccgggaaccggggaaacttgtggggggggttacccaacgcgttcccccatatagatgaaagcgcgtataaaaaacattcggagggtatataaagggagattaaaccggtccccctggtc

SEQ ID NO: 130305 - DNA, 745 bp, Arabidopsis thaliana columbia
  unsure (1)..(745): unsure at all n locations
nnnnnnnnnnnnnnnnnnnnnnnnnnnnnnnnnnnnnnnnnnnnnnnnnnnnnnnnnnnnnnnnnnnnctttttttttttttttttttttttttttttgacaaatatatatctgaagaaaaaggtcaatacaaggccaaccctttctttagcaatgtctagatccaagagcaaaacaaaaaagaactacatatatagagaacatgtgagacaaaaacattgccttgcgaattaagcgattcccatgttctcacgagttgtatacggaagagaaaatctattttgcttccattgagaaactcgtcagagtaaactgtgaagaagtcactaaacagagaattacttactcaccttcccaacctaattgccgagctttgcgctcccacaaaaaagtgatcttccgctctttgagcaacaatgcttgagctctctctctagctgattcgcaaatttcagtggcagcgttacacttctcagccctcttttggtactgtgaagcaacccttttagcttcggcaagtgtaacattcatatgacgactatgctcgtctggcactgctttttgaaactttagcttttctgggagaaagatcacaaaacggctttcttcaatcttcttttttggagctttgggataatccggttgcccacaaaaccttggaaataaaaaaagagtttttgtcaaggccccccggggagaccaaatttctggggaggggagaaagaaccacaaagggggggggagg

SEQ ID NO: 130306 - DNA, 734 bp, Arabidopsis thaliana columbia
  unsure (1)..(734): unsure at all n locations
attccnnnnnnnnnnnnnnnnnnnnnnnnnnnnnnnnnnnnnnnnnnnnnnnnnnnnnnnnnnnnnnnnnnnnnncttttttttttttttttttttcaaaacatacactaatacacagacagatgatgttgatcggcgaaaaactgccaacacaccatttgggacaatgttcattatcaacaaaaaaggacaatatccccttgtatatcgaccgatccctcaatactagccaccccccggcaagcccaactacttgagcaaagctatactgtcagtgaaagggaacaactagccacgaccattggtcgtcaagaaagatccaagcactttcctgaaagactaagaaatggcgtccaagagacggaacgacattaagccctggtcgaggtaaaaacgaccctggcctcctcggagaccccaaacggaacaagacctgacggttccaaccatccaagagggttagacaaactgtgatgtccctttcgaaaccctcccaagccactcgacagtattccttcagaccacttcggataaaggagcttggtagtcgagtaccgcccaccgcctcaggaagggtccttcctgcgctaacaaattgacagatcgcttgggcacttggctaatgttctcctactaagcccgacaaagtggaggcagaaccaaattgggtcgccccaggccgccgaattagcctggacgacgtgggggtgggccctcagcccctgatcagcctc

SEQ ID NO: 130307 - DNA, 701 bp, Arabidopsis thaliana columbia
atagaacaagctatgacgtcgcatgcacgcgtacgtaagcttggatcctctagagcggccgcccttttttttttttttttttttttttttttttttttttttttttttttttttttttttgtttttttttttttggtaccccaatattttttttaaccaatctttgtaacccaagaaaaaatcaaaccacaacggagtttttatggcacttcctggaaaaaacaaaacctaaatccataaaccctttaagcttttggggccccaaaaaaaaaaaacactttccctttcttggtcccaaataactcttctttttcaaaaaccgccaatggttttccttttttgaaaggaaaagtttttttttccgcaattgtgaacccggggactttttttccggaaaggaacgttttaagtttaaacggggtggggaaaacgggtaaaaccttcctagggaacaagaacaaatcttttggtgaaaaactaaacaaacttttcttggaaacctaccaaaaaaaatctttggggctaaaaaccccctctacaagaaaggtcacccgaaaattcttcaggggtttttcttatcgccgttcccataaaataattttttctacaaaactgtgcattactttttccaataagaaaatctgtggaatttttgaaaaatgggcctttttaaaaattttgcttaaaaaaatttaaaaact

SEQ ID NO: 130308 - DNA, 647 bp, Arabidopsis thaliana columbia
tgacttcgcttgcacgcgtacgtaagcttggatcctctagagcggccgcccttttttttttttttttttttcatttggaaacgaattttaaatgcaagagaatcccactagtattaaaagaaagaaccccgtatctaatgaaacattctcaccaatctctgcgctggcctccttaataagatgacatacaatctgtctgatatctattgtaactttgaccgtaaattaccaatgggagggaacagacttctggctcaaggaggttttccttttgtagctgcatcagccaataaaactataacgtcagaatgataagggaaatccccgacaacacaatcttctgtgactaggctttaccatagccttgcatctctcttttcatttgtgcttcttcctcttcatccccgtacaagctgcctaggaggagatcccgtggaaaacagtatctgagctctgtcgaatctttcatggctacgggtcctggcacgctctcttccccctccagtgctggctcaaccacgggaagcaaacctaccttaggccctccataaaccagaagtgcccacccactataccacgggtcgcccgtataaggcagagtcccacaatcccaacctgaaaattttggtgtgtgattttcccctctc

SEQ ID NO: 130309 - DNA, 689 bp, Arabidopsis thaliana columbia
cggttcaattataaacgagctatgacgtcgcatgcacgcgtacgtaagcttggatcctctagagcggccgccctttttttttttttttttgatacaaacaaacttatctctatgaaactggagaaactacatttgataccaatacaacaaaaataaatcattttttgtccgtataaatagtaaccgaaaactatatcaaaaccgtaacaaaatgtggtttctgtctcttttcactgtgtcttatctctctgctcactcttccatgaattcttagctgcatctgctgaaatagtcgtgcctccattaccatcgctgctgccatcttctccgggctttggtttggagaagaacgggtcccacacatggccccctgcttcccgttggccttcctccagcaacgcatacttccagctgttctcctccacgaagtagtcatactcggttcggccctcgatcatgttcttccttaaccgagtcaccttgtctatcacagcctgtaccgagacatcaaatgcatctttctgcgtctccagttctgatctcgggtctgcgtagatcagccttgggatgaggttgatgacattctttctcattatcttgacctgcttggctggaatctggaggagtcgcttctcgatgcttatgttttctctttcgaaacattatccctgggggattaaatacccgag

SEQ ID NO: 130310 - DNA, 563 bp, Arabidopsis thaliana columbia
gcatgacgtcgcatgcacgcgtacgtaagcttggatcctctagagcggccgccctttttttttttttttttttttattttggattttattgtttctgtttattagtatcagtggattatttgttgtcacaacaaaatcaaatttcatgacaacagggcacccatcagcaaaacacaaaaagatcccaaccccccggaagagaggaaacaaaaccctaccccaaaaagaaagacggcgacggaaaaggctgctcgagccccacagtgaacctatggcgttatgattggccaacccccctagaaaccctggaacgtacgggaaagttccaaaccagcagagaaccaaatctttcggccccgacaaaaccaggcataactcctttcccaagaaggtgatcccaaaccccccaaaaaacctccccgtggaggaaaacccgcccaagacagaaccaggggcgagaaaggcccctttggagatcataaaccctaatattggcggcccaacaaaaaaaaaaaaacgtggcgcgcattcccggaaaaggagcgccgaaaaacgccccaaca

SEQ ID NO: 130311 - DNA, 622 bp, Arabidopsis thaliana columbia
tgacgtcgcatgcacgcgtacgtaagcttggatcctctagagcggccgcccttttttttttttttttttttaaaaaagaccagtattttaagagcacgcagagttcctcagtgttataaaaaagtagtgcgattttaatcaaaccttgttaccaatctctgagctgcactaattaatacaatgaaatccatactggaacatatcaattgtaattttgagcgtttagacccgacggtggggaacagacttcatggaattgaaaatatatatcttgtatattcatcgggcaggaattatatcacggcattagttttcagggaaattcccaaccaaaccatcttctgcgacttggctttataaaacctctgcatctctgtgtttcatcggtgctaccttccatatatctagggtggaccaaccttgtgcgagatgaatatccgaccgagaaagacctgtagcaggcagcttttgctcgaactatgatcaggggagaaccagctttattcacttcggctctatatccacaatatcatctgcctggcttactgcccaccggggcaagcgagaagtcttccctgttggcccccctattaaactctggagctgggggcgaacccctcaa

SEQ ID NO: 130312 - DNA, 1165 bp, Arabidopsis thaliana columbia
accttggatgcacgcggcccgcagacgggagcctggaaaccgggcaccgcccgacctatgggccatccttttttttataaaaagaacgcacccggattagcccaggggggggggtataaaggaacaatatataaaagtaggacaagaccaaactacatcagatataacactaaggagaagaccctgatcctgcataataacctcggtggggaaacaaggcaacagatcaccccccgcactgcgaacttgggccgcattgctctacagtgtagaaacaggcaaggaggtcgtaagaactcaacctggaacacagttcataaaggctcacgcaagtaggacacatagcaacacgcgcggagcgtagtaatagtaatccctaaatcaccgtacagcagataaaagcctgcatgcagcacaaagcgtgatgactagagcaatacgtgactccgatgcaaatatatagacggagtctcttgggacaatggagctatgcgtaccaagagcagccaagagaagacaaagagcctacaaataggcgcgcagggcaacaatagtagtcaattcgaacacatcctgagaaggagaaccacaagcatctcttccggaagatggaactgagcacaaacaacataaaaaatagcccgacattccggaacctgaccaccaccatttaaataagggggacataccctcattcgacggcctctcaaagcactaaccccggaatgggacatttcacttacccccatcggatggacaaaaggcataggggcaactatccagcagcctcagtcacctaacgcgccaactaaaccaatatgtgccacactaaaggaccgtaagacattgcactaacacccccacccaggctattgaggcgacctgatacccggtgaaataaaaaacccaaaaccgtgaaaacacgaaactggcaagagaaaaccccaacggcgccacaaaaataacaccactcttcgaaacaagcaaaatgacaacacagtcgcgagggggttgcaccctaccgccaagacatagcgggagaaaacgaaaaccttcaaagagaagccccgggagagttacataactgctcagcgccgcctacaagacgaaactcatctgtgccacaactaagactccacctcgccgagatgaaaaatacacttct

SEQ ID NO: 130313 - DNA, 741 bp, Arabidopsis thaliana columbia
  unsure (1)..(741): unsure at all n locations
tnnnnnnnnnnnnnnnnnnnnnnnnnnnnnnnnnnnnnnnnnnnnnnnnnnnnnnnnnnnnnnnnnnncttttttttttttttttttttttttttaagtgaacttatattccatttattgataagcgaatttttcccgtggggagacaatcggtccatgatgcacatttcatgaataagaatagccacatttgggataacattacttgcaaatagaagcgagtacctccagcagagaaacagtgaatctcatttgggtttcttcatccacggcaacgaaaagaggaacgtgaacaaagagtgatctggtcttattctgctctgcaaatctcagagaatggtaatagacatagttacacacaaatcgacctgcatcatctgatgttatcacttcaaagccattcttctccaacgcctttgttatctcttcaacaggaagattagtctttcttacagttgagattggaccatcagagggaacaattggcaaattctgcagaccacaagaatgtttcatggaactaaacaacttatcaaacaaaaacaaccaaaggggagtgaacaaaaacctgaggtttccaacccaattcatcaggacaacgaaaagtcgcttcattcacagcttgttgctcaattgcaaaattttgtagcgccactattaactccaaagtgaacccatatgggtttttcggtcaacgactcttactcttttgtgttaaccgcggattgtagcaactgatag

SEQ ID NO: 130314 - DNA, 749 bp, Arabidopsis thaliana columbia
  unsure (1)..(749): unsure at all n locations
cctnnnnnnnnnnnnnnnnnnnnnnnnnnnnnnnnnnnnnnnnnnnnnnnnnnnnnnnnnnnnnctttttttttttttttacctttttctttaaggcagaatgccagtgacgtaataccagagcggacacgtttttcatatgcctgtaaaaagaacacctaggctaaaaaagtaattgccttttagggtgtagattgtttaaacgttatgctatggggagaaaccaagaaggttcattgacccaaatcttgtattatgctttagaaaaagagatgccttttatccaaagggaaatgataggacaaacactggtgttataaaaaaatgtgagcggcggaacattgcttgaagattatggagaccctgttcaaggaggtcatcccccactctggcgacgaccaagttgaactgtactgtagacactggctcttcatagactccaatcatacttgattggctctgttcttatagacgcatggctccagctgcctatttgggaccggttactgccgggggctcaccttggattaccatgagctttgttacagccaggaataatcccgggggtgccaggtgaccggggaaatcgaaatctttcttaaaattactgaactcttgctacttgaaatcaaggaaagttgaagcttgtggggccaaaaagcatggaggctatgaccacattaattggggggatggcagttaaagtggggtggttctttgacccattggtaaaacttgttccacgctca

SEQ ID NO: 130315 - DNA, 756 bp, Arabidopsis thaliana columbia
acgtcgcatgcacgcgtacgtaagcttggatcctctagagcggccgcccttttttttttttttttataaaaccaatttcaacttttatccccaaaccagtaatcacagcaattgaagtgacgcataaagacaacacaaatgaatcataaatgttttacagtaaaatttatatataatccacgtcgctcttattttcagcaattgtctcttccgttacaataacatcagctgcaacatgttccttgctagattcatcctcgggtgacttttgaatctgttgcggttcaagatcatctaaggctggtgactctacctcagttgaagcaagtttgatatcagttccaatgttttcagattccaaattcttgctttcaactgattgttcgtttatttcaacaggatggtcaccagatgaggttttgtcattctggcttgtaagcgcgtcttctatgagacatggctttactgtttcctcttcaacctctttgcttttgtcaaccgagtcttttcttgtggtgaaacatggctctactgtctcctcttcaacaacctctttgcttttatcattcgagtcttctcttgtgaagtctgggggcatggtcagatgccagaaggtgaatcatcaattttcttttggattttgattcatcaatcctggattagaaaaaccttcccaaggaagaaaccgggtttcttctttaagcaaacaccttttttggtctttaaaacctttggaccccttttaaagcgggaacg

SEQ ID NO: 130316 - DNA, 1021 bp, Arabidopsis thaliana columbia
accagaaagaagcgcaacacaccatttgcattattgcgagagagcgacagagagaaaacaagaaaacacggggggcgggcaaccccaacaggaaccacagagcacacaaccaaaccaccaccgccaggagacggcaccggcgaaccggcgaccgcaaaaaacgcgaaccagtacacaaaaacaagaaaccagggcgagcaaccacacaggaaaagagcgaaaagcaaaacggcaacaagacccgaaaggaaaagagaaccgcgggggaaaaaacaaccagaacaaagacaccccacggggcgcgagcacaatcacaggagaacgaggcagacaccgacacaaaccgcgcaaccggaaacccacgacaacggcacaacggcgccgggataagcgcgcagagcgcgaccgcacccagaaaaaggcagcaccaacgcagacgcggccataaaccagccgccgccgtcgcagccaacacgcggcagacactagcacgacccacaggcacacacgtcacccgcgcccgaccaccacaatagaagagagcagcgggacgcgcaaagcggaccccgaaccaccgaccccgcccgtactcacaggcagacatacggggagggacgcgcccaaacaacagtcgaggcgcacgccagcaccagagacagagaggaagaggcacaccgcaccaacccgacaaacgccaagaagaacacgggcgagcgcaccagcacccgggacagggtaacacagcgacaacaccaagaggggggaccaaaaccacaacaggagggaaagaaacaggatccaagacccacaaaagaaacacccataaagggagaagccaaaactgggaacggggaaaacaggacgggagaaaacagcaaccggggggcgaaaccccaaaagcaacgacgccacgggcccacaacagaacacccacggcgcaccgcccagagggggcgacacacccaggcacccccgaggaacaaggaaaaaacacaaaccaagaccaaaaagagggggcggc

SEQ ID NO: 130317 - DNA, 676 bp, Arabidopsis thaliana columbia
cttgacgtcgcatgcacgcgtacgtaagcttggatcctctagagcggccgccctttttttttttttttttttttttttttggcccgggacatactggtgtttatatatacagagcaaagtcattgggtataaaacaaaaaggaattgagtttttttttgatgaaaagggaaaactaaatcaaatcaaaccaaaccatagaaaatcatctgtcgtttcgtactaactcacatagtttgaagcagttcagggctcaagtacacagttttccagctttggaaaggagacaccaagttgcattccaacagtaactaatgtctccaaggacctaccactgttagctaaaaaatcctaatcaatcttaatcgagtccttttcaaaaacgcatataactgtgcttccaccaaatgaaaagtaaccaaccttgtccccttttttcacatggtctccctcttgcctaacaaagctgatactaccaaccattgttgctccaatcgcaacaaatgcgacctttccaaactatgctgttgatataattacaatggtccgtttatttttagtgaacacattacaagtccttgctatttgacagcaattcggattaaacccggtttttaaagctttcccaaaaaaacattttgaaaaaaaattttttaaaattgaccccccccgtaaaac

SEQ ID NO: 130318 - DNA, 687 bp, Arabidopsis thaliana columbia
ctaccacgttggatgcacgctgccctcatccggaatcctgtatagcggacagcggccgccctttttttcttttttttggataaaacaaattatacagcaatcattaccttggagagccatacacttccacaatcatcatgcaaaacatggctcacacaaaaatccactccttccctgaaatatttctctctaggccgattctcaaaaccctgagagtgattctggctggagttgtgtgatgaggcgttttgagtaggtgctactgggggagcttgactctgagttctacccatgtctccaccaatagtaccacctgagacaaagcccattatggacgaaaaattgtttgaataacccatgcctttggggatctccatggcgtatgcagcgacaaaaccattcttgaattgggccattactccagttctcactgaattgattgccacacctttcttggagctttttaacgagaaggtgaactactagaaaacaagctaaaatgcaataccaaaaccataattacctccaccttctcaaatgtttaaaaagcctccttcttcggacctccctacaatcttttattctgaacgcgtgggaatattttttgtaaactccggcacaagggacctagaaaggctttccccactaatttacccccaattgggtgcgaccccctgccaattaaaa

SEQ ID NO: 130319 - DNA, 594 bp, Arabidopsis thaliana columbia
acgtcgatgccgcgtacgtaagcttggatcctctagagcggccgccctttttttttttggatgtttttttttttttttgctaattggggaaacccaaattgactgtttgaacttgaaaaatgtcctctgcccccccaaaattaaagggggtcctttgattcttacgagttatgaaacggggctttactgggaaaaagaaaacaaccccgggccaacctttctgacctttaatttcactaatttgacgctttttgtgggggcttgcctttgatccgtgggacttgggggttgccccccgggtttttgataaaacccccttgggaattgcgggtacgagggaatccattttttgccacgcattttttggccacgtccaaaggttttggtgaaggtttgtctgcggggatattttaaggtactagtggagttttttttctttccaaagagtttgttttgtgggggatgcgtaagtttcccccggtggggccccccgagaaaattccttttttaccctgggggcccccatcttccgtctgaagtagggaacacaaaaagttgcccctttcctgggtttcttaagagtgtttttttctc

SEQ ID NO: 130320 - DNA, 786 bp, Arabidopsis thaliana columbia
  unsure (1)..(786): unsure at all n locations
gttnnnnnnnnnnnnnnnnnnnnnnnnnnnnnnnnnnnnnnnnnnnnnnnnnnnnnnnnnnnnnnnnnnnctttttttttttttttttttttttttttattttatgatccgaattattaatttcatgattcgaattttatattacaacatttttcatggaatcttacattattaaaatttccaaacttcaaaacaatcatgtatttatatataaaaaatctaaacccaaaaaaatgcttaaaccggtaaacttcaaaatggtggtcaataaaatgtgatatttaagccaagagattagtcataatgggacgtttatggcaaacggctcgtaattgcacgagtttacgcatagccattccaggattctctgtcatgtcaacatcttcaccgttgactttttcccagtcaaagcattgaatcaacgaacctaaagccaacaataccatcctctggcctaaagtcgcaccaggacacgttcttcgtccgttaccaaacaccattagtttctttgaagcttcttggtcttcgaaccgctcaggcataaacttctcgggctcatcccaaagtcttgggtctctatggatggcccaagcgttcactagcacgatagtgccacgtggtatgtcgtatcccccaatcttgagaatctttcagatggaagaaacgtgggaaacaaggaaggtggttgccaaccttggaccaccaaccccgaaaaagttcttcgggaaaacctatggttttttggaagaataaaggggtaagaatttcccccaaatggttcagggt

SEQ ID NO: 130321 - DNA, 621 bp, Arabidopsis thaliana columbia
gacgtcgcttgcacgcgtccgtaagcttggatcctttagagcggccgccctttttttttttttttttttttttttttttttttttttttttttttaaaaccaaaataactttttgaacttgaagtttgtcctttgcaacaccaaaattaaagggggttctttaattcttacaagttttgaaactgggtttaactgttaaacaaaaaacagccccgtaccaaccttttttacctttcatttcactaacttaacgcttttttttgctgcttgcctttgaaacgttggacttaggggttgcccccaagtttttgaaacaaaccaccatggagatcacggagacgagtgatccatttttcgccagcaaccttttggccacgtccaaaggtttcgttggaggtttgtctgcgaggatatttaaaggtagtaggggagttgagtttgcttcctgaaaagctggcttagtggggatgcggaaagtaacgacagcaggagccccgtaaaaaactcctttaaccttggcctccaattcgatagaaggagacaaaatacctcctgcatcaagtttttcccatgattttgaagtgcggacccgtgggtccacccgggaatttcggaccggta

SEQ ID NO: 130322 - DNA, 243 bp, Arabidopsis thaliana columbia
ctgatgcgcacgttaaggctggctttaacagcgagctttagcaaaagtcgaaatttaatatttcacttggatattgctaggtggatgggagcgaggaggtaaagagtgtgaagggatgtagtgtgtttaggcgagttaggttgatggatgtcgttataggagagggtggaataacttatgttttaagggtaggaagggggacttggtataggttgggtcttgatttcgttacgcgagggttca

SEQ ID NO: 130323 - DNA, 748 bp, Arabidopsis thaliana columbia
  unsure (1)..(748): unsure at all n locations
nnnnnnnnnnnnnnnnnnnnnnnnnnnnnnnnnnnnnnnnnnnnnnnnnnnnnnnnnnnnnnnctttttttttttttttttttttttttgcttcaagaaacattgatttattgtaaaaagagattacaaagacggtgagagtagaaaggaaggaaacatgagtttttgggattacaagccttattattatatagacaagaaacaacaacacatgtgattatctttttgacggatttaacgaccaagcgatgatagatcgatgagattgattgtaccttacatagactgagcttatatggagattggcctttagatgcttggcctcacgttcagacgggttgcaagtttatgtcccaaggatcgatcaggctgagaccagtaagagatccagatgccgcggatctcgtgggtgagacgtggttccgataaaatctccacccatctgttaacaaacctgtcttgcctgtctggtgcccatgatctgtgcctgtctacagcctgtttgaaggtgttcttttttttgatgacgcactttggacgaattccagtgtaggagtttgtaggggtgggaactttctcggggcaacggaaaggattaaattttgaggggggacaaatggttttggtaaatatttgcgcctgaaagttaataaaaacctctcatgggggattggggggtggtagaagcatctttttggggaatctctttgaacttggaaaaaaactggttcttttaactttagggctc

SEQ ID NO: 130324 - DNA, 768 bp, Arabidopsis thaliana columbia
ctatgacgtcgcatgcacgcgtacgtaagcttggatcctctagagcggccgccctttttttttttttttttttttttttttttttttttttttttttttttttcagaggtaacaaacaaaattgcatcaagttttgatttaaaataaacaaaagggattcttaagtttttagagttttaaacggccgaatgaaacattaacgaacattctttcgcgattctgatcttttaaaccgtttgtactcacgttcatatctgaagtctttttcctccattttatcgaaccgatgactgtaccggtctgtgtccccttgatcgtcttcatagaacccactagttttttttggctcgccacggtattttgcttttttttcacgggaccgaccaccacccttatgctcatattcacctccttcataatcccgttctttttttttactgcggtctcggtcataatcccttgaagtacaaacccgtcccttgtcccggacccgggggtttttgttttccttgtcacgggtcctgtcaaaaacacgtttggggtacctatacctgtgtctgcctttttgggctggaccctttggggggttattcttttttgggttttgtcaacaaaaccctttttttgggggttttttggggaaacaaccttcaacgaagaacctttccccctttttttttttcccctttttccccaaaaaaatttttttaaccctttttttccccgggggattctggaaatggcctccccttttgaacatggtgaagg

SEQ ID NO: 130325 - DNA, 715 bp, Arabidopsis thaliana columbia
tcatgacccccggggaacggacacccaggccaaagagggacgggggagggaatttgcgaaacggcaaccggagggggaagggaaggagaacacagaagcccaaggacaagcgcagaagcagcaggacgaacacggagacagagagaaggaccgggcgagggggcgcggaagggggaaacgaggaagcgacacacgaaagggaagaggccgaggaacacacgccgggcacaagggaagaagagaggacgcgcgcacggagaacaccaagggagagaggcagagggaccgaaggacgagcgaacgcggcgaaaggacgagagaagaagaggcaaagcgggagagcaggaaggaagagcggggggaagcgacgcacgggaggccggagagggggagagaaagacaaggcgaacaaagggaccgaacgacaggggcgaagggagacccggagcgaagacgaagacggaggccggaggcagcaccggggaggcgaaggccgcccgcagaggcgaaccaccacggggcgcccgaaagcggacggagcgaagagacacgacccggggcacacccaggaggaggagaacggcaaacaaaggaccgaccaagccggaaacgaagcgcggacagccggacgcgcggagagcagaaggagaaggggcagcggcgccaaaccgacgaggaagggcggccacggccgaaagcaggcgaacgcccgggc

SEQ ID NO: 130326 - DNA, 730 bp, Arabidopsis thaliana columbia
  unsure (1)..(730): unsure at all n locations
acaccatcnacgagctatgacgtcgcatgcacgcgtacgtaagcttggatcctctagagcggccgccctttttttttttttttttttttttgaagttaaaaagattgatcttcttcagaaagcctctctagagagaaagagagagattataaagaataattgaagtttccgttctaacatcagctaatgtctaaaaagcgactttgatactaattaattccacactagttagtcttctacatatatgtgtacacatactttccttggctcatccacctgttgaacctccattccaagaaaaagatctaaacaggacttaggcctcttatgatgatgaaccaccaaaacggatctcaacatccggaacttacaggtccggttccagatagattgaaacattgcctatatctaccacatacacattggctccacttttgactataccggaataataaatccatatttccggttcacattctccctggctgggctcacgaggttttctttttcccgtgggtttaataattaactaggatccctcgggttctttccttttcttgccagatcttctaactctgctgcttctttcttgagaatccgaaaccggctgggacttttggtccggtaagctgattgatcggctttggttcatccattgggatttgatgggagtatggggtttaataataaaatggataggcaaccgtccgagggggagaaaaaatacggg

SEQ ID NO: 130327 - DNA, 741 bp, Arabidopsis thaliana columbia
ctctgacgtcgcatgcacgcgtacgtaagcttggatcctctagagcggccgccctttttttttttttttttttttaggattcaaaagctctaataaattgatcatgtcttctctggaaaaactaccttattgataacttcaatgcaatgattgccttagtaaaaaaactccaactctctgtatttgcttgcatttgatacctacattgctccatgccaatcttaggaggagtgactgaggttggacaaggcacaggtgtccaaagcattgaactccttcactgccgtatcaaccacaaggcctaatttcacagcatcatcctcactctgtgcctcgatgttaaggggaacaacaggatcatggagagaaagtctgagaagaaaccattcaccaaagcccgaaacgcggatcccttcctagttaactggagctattataaaatttggatctgtttctattgagttccacacgtgttgcaggaccttctttccatactcccggaaattactttcttcaaggtcagggtgattcttgaccattttaaccctcagttaataaagccactctgggctcttccagacctttcaacaagattctggtaaaaactttgccgccccttccttgacccgcaaactaggcccccacttaatttgtcccaggattttacccttatatatggcccactttcccacccaccggtggttctttataagaccatgaacactgggttcttatgccaaa

SEQ ID NO: 130328 - DNA, 729 bp, Arabidopsis thaliana columbia
agctatgacgtcgcatgcacgcgtacgtaagcttggatcctctagagcggccgccctttttttttttttttttttttttttttttttctgaccaacatggttttcactttttttttttttttttttttttttttcccaaagaaacttttttttagggctaaaaaaggtggggggtacaaaaatttaccctttggggggggaggatcccctttaccaaaaatcaaaaagggggctcaaaaaaccaataaccggcttttttataagaaaaaaacccccaaagggaaagaccagaccaagcttaaataaagggtttttcttaccccccttttccccccaacaccccttttttttttccccaaaattaaaagaaaacctttttctggaaaaggggttcctaaaaccccaacgccaaaagctgggggggggatttgtccccccccccaacaaaaaaattcaaaaactttttttttccaaacaagggacccttcgttcttttaaaaggtttccttcccccatgaaatgggcctcatttaaccccctttgctcacgggggttttccttttccggaggaaacccccccgattttgggccagcctgggttttacttttttggggggggccccacaagggggttgaaaaggttgtccccttaaaatcgttgaaataaaaaagaataaggggttgacccctttctgggggggacatggggtttttttacaaaaaagggga

SEQ ID NO: 130329 - DNA, 758 bp, Arabidopsis thaliana columbia
  unsure (1)..(758): unsure at all n locations
gttnnnnnnnnnnnnnnnnnnnnnnnnnnnnnnnnnnnnnnnnnnnnnnnnnnnnnnnnnnnnnnnnnnnctttttttttttttttttttttttttttttttttttttttttttttatgaaatacatattttaaaaagactgataaaaaaaggaaaaaaggaaaacccaaaagaaggaataaaaagacaatttgtaaactaagttttgacaactttaagtaaagttccccatgtgagaaaaaacaaaagatcattaaagtaaaaacttttataaaattggggaaaaaaaccgaaaaagagaagaaagctgatagttcatgagctttttttaaccttttttcaccatgaaaatcctcctgttttactgaacatcccattccaatatgtattattaccatgactttttttttgggttgggcttgaaagctttttcatgtttgaaaaagggaacaaaaccctacttgctccattcatgtcatcattggtatcttgagctctttggttactggtgatggggttatgtccaatcccttgatgatgatcaatggaaaatgaaaggttgttattactttgtttgtaatcaggcattgttggaaaccctaaagatgagtacaggactgagtttgaatccattatttgcccacgccaagaacgttttttttgcccttttgaaaaaaacttccattgggattttttaaaaagccttcaaaaacccttgatggaatgaatgaatcttttgccaagaacccggggaaaaa

SEQ ID NO: 130330 - DNA, 757 bp, Arabidopsis thaliana columbia
  unsure (1)..(757): unsure at all n locations
gttnnnnnnnnnnnnnnnnnnnnnnnnnnnnnnnnnnnnnnnnnnnnnnnnnnnnnnnnnnnnnnnnnnncttttttttttttttttttttttttttttttttttgatctttttttctttttttttgaagataaagaacttttcaaaagataaaacttgactttgttttgattcaaaaaataaaaaaccaactgttgtacaatgtgcgtttcaaaccaaacaattccatttactggcgttataaaaccctttcgggggaattttgcccaacaaaatgttaatttggggggagggttttactttccacctttcccgtagctgactttgagtgtgaccgtccggttcaacacaacctttcctggttcaaagtccttgcccaccgtgtaataacctatcctttccaattgaaatctggccccaactgccctatttttaagggttgataccgcttgggcaccaaaaattcccattttagagtttgggttaatgccaacgacccaagcttctttgagttcacccgggttctcggagttaaagagtttctcaaataatcggacttccacctttatgggctcttttgctggggaagattcatcgacccaccgtagaacccccttgggctttgacttttttctcggggggcatatttccccatggaattttcccgaacgggtttaaattggtccttcagggaaaacaccaccctttgggtggcccctttgaatttggtgaaaagccttttttttttaggcgaaaa

SEQ ID NO: 130331 - DNA, 744 bp, Arabidopsis thaliana columbia
  unsure (1)..(744): unsure at all n locations
nnnnnnnnnnnnnnnnnnnnnnnnnnnnnnnnnnnnnnnnnnnnnnnnnnnnnnnnnnnnnnnnnnnnnncttttttttttttttttaaagaaagtcggaccaacatgggtccaacatcttgttatcaatagttgaaaaaggtatacatacataaagatattaggtatttagaggaagcatttcttacaacaacacacaaaagcaaaagataaagaagcattgtaaaggtagattagccttccttttcatcgttagtatacttaaacttgtgatggcttagtctcggcttctgcggcttttggttcaacatcagcttttgcatcaaccttagcctcagtcttagtctcagcctcggttttagtctcagtcacggtttcgaccttaggatcagcctcggcttttggctcagcttcagcctccactggccagtaagaagtcttctttccggtctttgaaactgtttggaaaactgcttcaggctcaacattacctttcactgtcaccttttgctccttgatatcaatgtcaaatgactcaacccctgagattatataataaattatagagtcaataaattataaggcttaaaataaagggaaacaatgattagtagaaagtatttgaaagacattgaaaaaagattagagagaaataccttccattttgcctaaaactctattgacggcaccaacgcagccttggcatgacataccaactttgaggacaacggtctgcattaatta

SEQ ID NO: 130332 - DNA, 1152 bp, Arabidopsis thaliana columbia
  unsure (1)..(1152): unsure at all n locations
tattagggattgatgattggaataatggtgatagagaggatcaagcgcatttttnatttttttggaggcaaggaangaagcagacgcaccaaacacaagtgggctttgggtgaaaacaaagaacacccacgcatgtttcatagacgcacgtattccactggacaatcattgaagggaaggattattcacttaaaacatgccgtgataggtggtgaatgggtaccacggccccgacagggacgtgaatcggtacgtaataagtggccgctccggacgaagaaggcaggacgtgtctaaaagttaagggtcgaaaagaaccaaacggccactaagagatactagcaagtgagtatcgatcattgtgaaggaggaacgtaagagatgcagaggtagaagatatagtatggagacgataccgtgacgcgcccgagttaggacgagccgtactctgcctggaggggatctgacagttgacgtgatatgggcctttaagaagtacagaagtactcaggaataaacggtgcgatatgcgaagaatggagataaacctgatgatggggccaggattataaattattcgtcgataacctgctgcagccgggcagcgtgtaggctagcggtaaacagaagtagctattcctcaatctaggaagtccgcagcgactactcgagagactgtgccgcaatggcagagtggatccgtgagttgagcagaccatgctaggagagtagtgtaagtgcttcgtcccgctagaatcgagatcattcgcttgtgaatccaggggaacaccacgtctactggttatgctggcagatcagaacaacgttgtaatgttaggcagtgtcgtgacaattcgtgtgagaagcgagtgttggaggtaattaagaagacaggcgaaggcaagcagaccgataacagagagagggaatggatatattaatgcgcggattgggtacggtcgaacgcgtaatcgtttacaggaagaatggcagtctgcgtaggggcactagtgaggcgccgccccgagtcagaagtaagcagcatctgtgtggcggataagcttcgccactcacaagaggcgtattggtgcttgtgaatagcgaaggtcgcactgtggcgaacagcacaatgccgggagttagaggctaata

SEQ ID NO: 130333 - DNA, 603 bp, Arabidopsis thaliana columbia
  unsure (1)..(603): unsure at all n locations
gcnnnnnnnnnnnnnnnnnnnnnnnnnnnnnnnnnnnnnnnnnnnnnnnnnnnnnnnnnnnnnnnnnnnnnctttttttttttttttttttttcgaattgaacagagataatatttgttttcgaaccaggttcggattcaccactacattgtttttagatcctcgggggctttaaacacaaagtcactgtgttgatggggtaaacaatgatccaaagaaccttattttgaaggaggaaaaggacggaaaccttccacctctttgctcaacctaaaaaaacactaactacccttaacatgagaaactctatctactgtttccctaccactcaaaatctgtcctttagagaggccgttccttcgttacccttccattaacacaaagggaccaccgccacccaaggtctccgattttagtccgctggagatggcaagggtttttcaaggaacggtcaacaatcatggcggggctatctttggcttccacaaacggagaatgtgcactatgcgcatccgaaacacttcctgatgaacaccctgactctgtatgactaagaagagacctgacactccgccttggacctgttagaagaactagagccac

SEQ ID NO: 130334 - DNA, 1236 bp, Arabidopsis thaliana columbia
tgaaagacgacccgcctcccgggggccctgaaaccagcggaacgcgcgccgcgccacgagaaaaaagctttttttttttttctcgagaaccgttcatccgacaacgcgccaggggcggcgggggacacacaccataacccaggcatgaccacgcaaccaataatgcgccaaccacccactaaacagcgccacaatcggagtaccgacacctccgagaaaggcgaatcgacaaaacacgcacatcaacaccatgctacgttcaccgccacccacgagcgacaccacaacaagaggcgcggacacccggtcacggctataacagacgcacaaaccgagagcgcacacaaatcccgatccgcacggcacaacgaccaatgagttgttaacgacctactacgcgacggcaagcacggcgacgaaggcagccgcatatcggagagggcacctaccagcgcaagggacttggcgcccgcaaatcgcacgcataccgcaacgagggcgcacggttgcgacaaagcgccgcacaaacggggcgaagaggaataaggaaccggccgagaaataatcgcgggacaagcacaacgcaatctcagaggcgaaaaagaagcccccgtcgcaccccggatgcacaccactgcattcacgggagagcgagaaacactccttgatacaacgcgggaaacaaatgagggggggcacaggatatgcaggaaatacccctgggacggagaccgcaccccaccccggcggaaaagaggaacaccaacaggaagccccgccctcccacatactctacataaaacacacggagggggcgtcatgcatacacacgcacaagcgaaaatagaacccgcgggggacaattttcccgcgacctcgcgtggcggcaaaaaaaccccttacagccacccacagaagatatccggggggcgcctacacgccgcaatttctccagaaaaacgcttcttcgcaaagggaggactcccacactggggggcagcccggcgcgtcccgcatccaactggcgcacgaacgagaggacgcaagccagcgagcgccaaacccatcagcaggacgacacgcgagctaacacaacgcaaaaaagacaacatcaggcactcgaacagccgacgcgacacccgaggagcccaggctcgaagcaacgaccgtaatgcagggctcaccacaacacggtcaagattcgaaacgaattgtacgactccaacgacgctaaac

SEQ ID NO: 130335 - DNA, 785 bp, Arabidopsis thaliana columbia
  unsure (1)..(785): unsure at all n locations
gttnnnnnnnnnnnnnnnnnnnnnnnnnnnnnnnnnnnnnnnnnnnnnnnnnnnnnnnnnnnnnnnnnnncttttttttttttttttttttttacagaacaagcctgttcaattgatgacacaagcccgaaacaaaagacttatgtccacttttctatacaattaacaagaaccctaatacagtaatacagaaacaatccgatggtggaaaagaaggtaacctagctttgctattttaagagatgcaaaaaaaaaaaaaaaagttggaagttgacaccacgatggctcccacctatgctaaatactttcacaatcggggttaattaccggtatcagattcatgtcctgagctatcactgtcagagccactagaacccgagcctgagccactactagaactgttagaactacttgaccctccaacatttacttcttgtcgaacagtagatgccacatgacctaattcagtaacttttgacgattcaaggccaggtactagcgggttcgattcgtgcacactattgtgaaaagattcaggatctctttgtgagtctaatccctgtgcctcctttttcttgcttaagctctccttatatttcaatccccgaatcttggaaaaggcttccccaaagggggtttccccggatccaaaaaacttgttcaaaattattttaaacctcccaatttctctaattcaaatcctttggggttagaaaagaggaaaatttccttgggaaaggatacctccctttcctttattaattaaaatacgtggggaaaccaaa

SEQ ID NO: 130336 - DNA, 785 bp, Arabidopsis thaliana columbia
ctatgacgtcgcatgcacgcgtacgtaagcttggatcctctagagcggccgcccttttttttttttttttttttttttttttttttttttaatctggaacccaattcattacaatctgtaactcacaatgaatctgaaaatacatttctggaagttataaatatattgttacaaaatcaaaatgtgccaaacaaaacaatatgtttgcaacaaacttttgcttgattagcattcacaccctgttgatctttgttgctgacctccggcaacatcaatggtgtcgggaaggtacggttcttcttcaggttcattcttgaatgcatttttggtaatgcactcgaaagccgcatctacattgaatccttctttggcggaagtttcaaagtaaggaatgttttctttagatgcacaccatgcctttgcctttttctcaaaaaccactctgtttttgccaccgtcaacatcagttttgttccccaacacaacaaacggaaagtttttaggatctgatggactagcctgaatcaaaaactcttccctccagttattaagattatcaaaagatttttataacattgtacttctacacaagaacccaaccattccctttccttggtaaaaaccccaatttccaaaaacttttgaaaaattttttttttgttcccaacacattattcccccaaaattttttttaaagaggggcaaaaaaatatcttggccccatcctaatttttggaacacccctttttttatagttcacaaaaagaaatatttggttttccaaa

SEQ ID NO: 130337 - DNA, 501 bp, Arabidopsis thaliana columbia
aaccgaagattgcacgtcgaaacggggcggaagaggggaagagacctagttcatttgtttacggcaacacacgaggggaaagccagagaaaacgcagaaggcgtcacagaccaataacacaaggcaataagtaaaggcgaccagaaacatggaaaaccaaacgaacaaggaaacaacaagcagatacgcggccacgcagaaccgtggggacgagcaaaaacccgagaacagaattgagacacagacaagaaaagacgagcgcaagaacgcgaaccaaaaacaggcagaccaacacaacgaaaggggagcaacactaccctacggggagaagagagaaaacaaaaccaggacgaaggcgcctagcaaccctgataagaaaaaggcggagagacagagaacaccgcgggggggtggcaaacgtaacctggggaaccaggccgaggtgaaaaggaaaactactcagggaaccaaccctggtaggggaggacggacagacaaaca

SEQ ID NO: 130338 - DNA, 342 bp, Arabidopsis thaliana columbia
gagcccccggccccgggacagggacaccaagagagcggcgcgcagggacgcgaagacagaaagattttttttttcgggcggagcaaaagagaaaaagaggaggagcaatagagaaaggggggcaacgcaatagaggccccgaagaagaacgaccaccacaaggggcacagaacgaaacaagcggcaccagcgaaagagcccccagagaagcgagaacaaagacaccagagaagggggaagggacgaccgcgacagccgcgcgagataacagccacgaggacgggcaacggaggaaagacacaacgagacaagccaccagcggacacgcgacgacgaaccaaa

SEQ ID NO: 130339 - DNA, 1217 bp, Arabidopsis thaliana columbia
  unsure (1)..(1217): unsure at all n locations
cctatgacgtcgcatgcacgcgtccgtatgctttgatccttaaaatccgctccaccattcgcagctatttttactttaattaccattgacattcgaagtcaaaacatgtaagaatacataaaaggtttacacaactattaaaaattaatggccaacgaattggcattcttgaggaaaaataccagcattctatcattggggggttgcttgtaaagattagcgtacattaagggcccccagtcgttctctggcctgatttgaatcttacgaaatggcagcggttcttttgactgataaaccaaaaaatttatcctcttgtcccggttatacagtaaatcttccctccttcatcatagtggtcgcgcgtcgcgcatcatacatatgatccactatcaacttgtaacaccttcgcactttatccacccatcaacttttttgttcctttcacataataaatgcactggtgcgaaattatgagtagcgccgaatttcataacttatttaaacagctatagaactttccatctagaagacaccgccaacataactctaactgcggtcattaccagttcatctatacttgttaataacaaagaacctcttgttgataaatactatctgcaccattctcgtctaataatctcaataaattttagttttcaaagatcgggcgctctctccgtattgaaactccttcctccttttcttatggcggagtaatccaaacacactctttatgttgtttcacaaaaaccctatttggggtgaatgggtgttgtctcctctctcttagacatgggtggcgcctctgggatcctctttaaagagtttaccccctgaggcatccagcattcttttttcaaatatttcttaggtcccaaggaaaaaaaccccttcacgcgagtctaactctaaccttgtataatcgcgctcttcttttctgtctcataattgtataaataccctcattgcaaaagaccggttgttcataatggagaaaacccccctcgtgttatctaattgaaagatcccttgtctctttatattgaaaaaactctcggttctaccaattgaagagctccctataaaagggtcctcaaattgggggggaccctgggcacccntaaaaatccatctattggttctaccacccagttccacactcactattcgtgttgtcgttaacccgttgatttttttgtaccatcgactttcac

SEQ ID NO: 130340 - DNA, 315 bp, Arabidopsis thaliana columbia
atagacgagctatgacgtcgcatgcacgcgtacgtaagcttggatcctcttaagcggacggcacattaggaaacttttttttttttcggaacttcattggagcctaaacggttttttgagagagggcccaaaagtaccttcatatactctcttaattcggataaccgaattcaagaaaaaactagcccccttctctttcatagcctgaaatccattactatagtgctagatcctctaacaatggggtcgggcgatcacacatgataaacaacgcttaccagtccaattaaagccgatacatgacaggctataata

SEQ ID NO: 130341 - DNA, 935 bp, Arabidopsis thaliana columbia
taggtatgattagtgggtcgtgggagatatggattgatatattttataagagaaatttaaggtagttgatttaaaagtttttgtttttttgaaaaagatgaatgtgtattgggggaggtttttgtatttgggataattatagtaagtgtatgatatagtttttttgtgtagtggattagtgaattgtaattgattgttaatgatggggtgataatgagatgaggtttgatatggtagagaaatttgattgttgatgttgtattaatagttttatgttattatggtggagtgttgttattgaattattggaattggttaaagagaatgtgtttgtttaattaataaattttgtgttttagaaagtagtagaagtagagtgtaaagaaatgtgtaggtgattgaaagagtgatatatagtttgtgattgtaaagaagatagtggtattttttgagttggtagtggattgtttttgtttggtgtgagggggtgatttttaagtatgaaagattgtaaataaggggaatttatagttggtatagtatttgagttttaatgttattattggattaattgaaaattagagtttgagtaggaggaatgagtatagaaagggggataatgagtttaattaattgtgggatatggataattgattggtttgtgtaatttgatttagagtggattgtgaaaatataatgagattttagtatgtgtatattagggtatttattatgttgatgattataagagtttggggttgggtggtatgatagttaaattaggatatggtaattgtggtgtggatatttaatgaatataagggtatgttgtatatatattgtgatggtgtgttgtggtattataagaagtatggttaatttgatagttggattagagtatagaatgtaagtgatatgtttaatatatagtaaga

SEQ ID NO: 130342 - DNA, 169 bp, Arabidopsis thaliana columbia
taaataggaataactgggtccaagaataattgagggagtagaccagaactagaaaaatagatgacaacgattagtaaaaagaaagatagtacgaaaagagagtgtcaaaaatgggaaaggagaaggaaacgggccgcgaaggaatgaaaccgagaaagaacagatacat

SEQ ID NO: 130343 - DNA, 554 bp, Arabidopsis thaliana columbia
tgaacgccctcacgactagcgcttttttttttaagacgctctggaaaatgaccctcttttgtcctaccctaatccccaagccaacctcaaataagggctttggctcaagccccattgtccattggaaaaaattccaaattctcccctgggtttaagacctttccttcacactcactctggcttccactactcttatcatcgccaaatcactatagtcgtgctgtactgaacaccgttcacaactctcccaaactcttataccaacatctccggtaatccccttcttcagaatcaccttaaccaatgctttcaaactatatcattatttgcccaaatgaacatcacacttcacttgaatcagattggagtcttaggtgacatccagtcactaaccaaagacttcagtagtcaaaattttcctctagacgatttcccctctcatttaataaaactcagcacgtttcagatacatacttaaaaaacctgtccaagaattctctataaccagtttccgaaactcgaagcctgtagaacaagccccctcagcgccacat

SEQ ID NO: 130344 - DNA, 636 bp, Arabidopsis thaliana columbia
accatctactcgcccacacgacttagaagcgtaacacagttagttatgcattgggcgaacatacatcgtaaatatcaacgaacccgggtaaaaccccaacatagcttggctgggggctacacgagacgccaccagaactccggaaaccaatgcaagtactgactaaactacaactgccaacggtattgggagtaccacatcttgactggaataggacgcacgcaactggatttatgtacaggaaaatggcgacctgaaacgacatagaaatcatgtctccccctagagcatgcgctctacgtatcacaggggaagccaacgaaaccctacaattggcacctacgtagccagtacatcataaaattgtcttcaacgaggaatgagccaccgccccgcacataccaataacccaaaccaatttcctcttcgcggcctttgccagccatactaggcacgaaaaaaacccaatcaagggattcacacacaaaagcccctagaaaagaccattgccgtattaccttggcaccctataaaaacttcgcgggaggaccgcctcacgacaacgagaaacaccagaggaaccgaagacgagtacgggacaaacgacatagaccctacatcacattatacaaaata

SEQ ID NO: 130345 - DNA, 731 bp, Arabidopsis thaliana columbia
ggcctgtctctccccatgatagcccctctacatacgcgggacgtttttttgcccgggcctaagggattcacacctcattcccctcccattacaagaatcttcctaaatcttgaacaacaacccctgaggctattatatatatcacggttctctctgcatcgtgatttaagagcagggtacgatacctgactattacgccaagtagatttgtatcgacactgaacttcgtaactgcacacaataaataacctcgaccacttctgattcgtatcaattccctctcttcccacctaaccgtaagatatgggtaaaaatatccacggtccgtctgcgactccgctccatattgaaaatccctagaatgcgcactcctgctagctaactacctgccacctctctaagacgggcaaagcgaactattgttccatatatgactttaaacctctataacaaacggactcctcacggatattacggactgcaaataaccgctcgctaccacctctttcgtgttatttcagttgctactctcctcgacgtagctgttacactatgatttccacgaccgatcctttcgatcgagtccttacgtaatttgcacaacctgccgattacaccagcgttttccactcataaaactctctgcgtactacttttgacacgcgcttcagactcgaactactcatctgttgagctacacaattgacttacacatatatgtttcggcatcc

SEQ ID NO: 130346 - DNA, 221 bp, Arabidopsis thaliana columbia
gaggccgacaagccctttaagaccggccagcagaaagccaggcaaagccagaaacagagggcaaggaaaaagcaacgaaaaagaaagaaagcaagccggaaccccacaagaacgagacgagacacgaagagagaggagggcgcaagaggaagcgcagaaaggacagaaacaagcggacgagcgccgagcccgaaacgacgaacaaccagaacgcccggacc

SEQ ID NO: 130347 - DNA, 528 bp, Arabidopsis thaliana columbia
gaatttcaggttcgacccacgcgtccgatataaaggtagattatgtcctgtggaaaaaatcccaattttatattttttttacatggtccggattagggacaaagattgcatgcactgcctcgtgatataggctcatctttaccatcgatccaatcttaaccggagaaaattgactgtaatggaggagatacatactacaattgtgaaacacctaacccgaatgtgcatattggggcaattgtgggcggaccgcatttctccgatccagtcagcgacaaaaaatcagattactctcatgctgagcccacaacttacatcagcgccgcctttattgagacctaggtgcagcttctggatcagtcaccttccgggtattaatctcgacgatacttggattgggtgtgtcggggggataacaaaataattgatgcaatagcaactatatccagttaacgtcaattataaccgataaactattgtttttgaccctatcgaaaaccttttaaacattataagtcgtaacctcca

SEQ ID NO: 130348 - DNA, 526 bp, Arabidopsis thaliana columbia
  unsure (1)..(526): unsure at all n locations
cgtatangcggggatgtagagtaaagatttagaagataattngatgagaagaaaaggaggataatagtggggtgtgaaaggaatttttaatgtttttttagagaagagagaaaatggcatattgagagaaaggatatgaaaggcggagtggagggaagaaatattaaaggaaaaaaagagagagaggaagtaaggagtagatgagagagataagaaagagagggaaggagaaggaggaaggagagaaagagagggaggaagtggaaggagggtgaggtaagagagaaagaagatagataggggtataaaggatgaggaggagggagagggagttaaagggaaaatggagagaggattgtgaagaggtaggagggaatatgagaaaagatagagaggaagtggcggattgaagggaaggtatagtgataggtaatgtaaggaaataaagataggagtttagaggcagagaagtagaggctaatatgtggaagaagagagtatgaggaagaggtattcgcagagtaga

SEQ ID NO: 130349 - DNA, 194 bp, Arabidopsis thaliana columbia
tccggaatttccgggtcgacccacgcgtccgcaaggatggaagaactaggccgcgatcatctgactggatttgtttttctggtgcaacgaccgaggaccgtacacctggtggaggaggtaccgtcacagtaacttagacagctgtcatgcgaggcacgtatctatccctgacgcgtcgatagccctgagggtaa

SEQ ID NO: 130350 - DNA, 331 bp, Arabidopsis thaliana columbia
tccttgcccagtgattgcgccacggcgttagtggaatttcacgttaagccattttttttgagggagtttgacaaggtttctattaaattaggtctactttgtcattagcgcatacctctagctgtcccaggccatgttggcccccctccttcttttcctagttcccgctccacttgttgttcccgggccctttatatatatgggtctcctttagatgagagcccactttgtttcaggtgtttttagcttttgggtaacttccccgatgaatgtgtactgcaccggttatgttttttattcttatacataagttagtcttttgcttttggct

SEQ ID NO: 130351 - DNA, 1092 bp, Arabidopsis thaliana columbia
acccaccggagttcgagggaacccacccgtccaaaaaaaaaacaaagagtgaccaagagtagaagaagaaaggtttttttttttgacgtgggcgagaacggagaacgaagagaggagagggaacacaagaaaataccgtaaacacacgccggagacccatacgaaggcgcagacggggacaaccagggagaagaacagaggaggacgaaccaaatagagccgacgctacaagataacgcacgggacgctgaaacgagctcgaagtaggaagcaaccagcggataatgacaacccacgaaaaaactacagcaactcgagcagaggggttgacccagaatcgatcagggcaggaagacaaagccgcaaccagactatcgtgcatataatcgacgataagcacgatgcgatacgatccagcacgtgaacaagaacagatggcgtgagaaggtgcatcaatggacgacctcgagagaagagcaagaagagcgcgaaccaaccaaggagcggtatggcactggagcgacgaggctcgagcgacaccaacaagcgggtacggcgtgtcgctacgccagaacgcacgcgggaacaacgaggaccgcgtatcacagcgagtggttacgcggccagacagagtactcgaacccgagtaccgcgtgggtcggagaagcagaccgactgatgagatactgcgccaacacacacgaacgaaggagaacacgcgccgcacacacaaaccaaaacacaggtatgtaacggaacggtacgagcgatcctgaggagagaagaacacgcgcgcgacagttgccgtgagtcaaacctgaccagacacggtagctgcagagtgtacagagagcgaaagacacaaatgagggacacagggtgcagagaaggatcggcgacggacggcgagacgaacatatgtgcgacgggtaacgacacgagcgtagacgcgggccgaaagggagactaacagccgcacacgacggacagtgcgcaccacgacgccgctatgaagagaagaaagagagtgtcagacagtcagggtagatgagagaaacgaagaggcgatgtcagtacaagcacacacatgcc

SEQ ID NO: 130352 - DNA, 958 bp, Arabidopsis thaliana columbia
  unsure (1)..(958): unsure at all n locations
ctaatttgttagtatatgtatacaagttgttttcgagtcagattatcttgtatttttaattttggttagttagtagtgtatttttcttttttttttgtttttattttattttatgttttttttaaatttttttttaattatttttagtttttttttttttttttattcttatttttgtttatatatttttggttttatttttattttatattttttttttattgtaattcctattatgattttgagttattgattttgtttgatttttgttttgttatttatttgccattatttttatgtttatttattttgttctctaacattatgttagcgagttagtatttatgtgtattgtactagatttggtttatatgtttatattgaaatatattatatttagtactattcggttataacatttgtgcattttatataagtttttaatgttgaatatatttgattatgcgctttgatcatttagatattttgttgtatgttgcgtgattgggctatgtttgagttttacgcgattatattatgttaatttgattcccgtggatatggtgattatttatgtatatgacttgtggatgttttttatttggtcttttagatgttattgtgcctattattgtgtcaacatggataatttgagngctatgttctanaatgtttgtcttattagtgtaattatatgtttgattatttgcattttatggactagaatctatgtcgttagtcgtatctatatgatatttgtatttaatatagtgttacgattaaattattagatatgtgttttatttgcttttcgatgtgggtatatgttgagtatagatattttgttgacttttgatctcgtgtttcatttgtttatgtttattattttatttggatagtcagagttacttatggttttttattggaatatttatttttattattggttgttgcgtgt

SEQ ID NO: 130353 - DNA, 454 bp, Arabidopsis thaliana columbia
gctctgacaccaagatagaacacgcaagaggcaacgccatgaaaactttttggaacgggaacagcgcggaagggccaagcgaacgagagggccgagcgacggggcgaaaagacggcgggacgagagagacaaagaagcaaccgaggcgggcgaccagcacgacggaatgcagggagacaccgacgagaggaggaaagcaacaacggatagaagccgggaacgaggcaccgcagacccagagaccgaggaggcagcagagagggcgaggggccccaacggggaccggcgccgacctaaacggggcgggtcagggacaggcccaacagataaggctgcaacgcgaggcgccgaaccaaaatgcacggggcagcgaacaaaacacaaagcaacagcgtgacaccaggacgctaggccgccaggggaaacaatgcagaaacgaagatcgaacaaagcc

SEQ ID NO: 130354 - DNA, 783 bp, Arabidopsis thaliana columbia
ggtagggaccgtagcgtttaggaatgtaaagaatttatgggtaatgattagagtaaagaatatggggttttgggtttagaaaagggtatgtgatgtgtgtttgtaagggggtaggaattgtttagaagtgtggaatgtttttttttgaaattgtttagtaaatatgttttgtgtgttagattatttaagtattttaaggttaagaggtgataagtatgagtgagagttgtgttataaaattgtgttaaatttaaagtttatagaagtgttgtgatttatatgaggataatagtttttgtatgagtatattatttatttttaataagtggattgttattttagaaatttaattgggtagagttattattgtaatagattgatgttttggtatgatatggatgtgtatttaaagtattaaatatttaaattttaataggatgtttttgaagtggggaagaggtagagtgtgagataatgagtgaatgtttatgggagggatattatgagagtttatagggtataattataaggagaggataaagttaagattttagaaggaggagaaattaggtgtgtaatattattgtgtgttagtatattaaatgaggtgaagatatgatatttaagataggtgaagaattgaggttatattttttagagagattgaatatgtacatattgtaatagaattaatggagtttaaattaaatgtaatatattaaatgtaatagagcattgggtatggttgaattaatttgagataacgtgatagtattttagttt

SEQ ID NO: 130355 - DNA, 680 bp, Arabidopsis thaliana columbia
agaccctttgtagttttgaggagagattggaaggaagagtgtagagaggagataaggagagagggtggagaggaattaggattttggggggaaaaggggtaaaaaaggaagggggtataagagaaaagtgataattattgggtggaaagagataagatggaaagtttagggaagaggtaaggattggatggataagaaagggaaaatagataagtagggaaatggagtggaggggatgaaaagattgaaggaaaggtaaataagaaggggagaaggtgagaggtgagtggatgagtgaatatgttgagaatagaatgatgtgggttggtgaggaatgaatgggggaaatatgaattgtagtgtattgagagattagaagagggtggtagaggtgggtggaggttagtttgagggtgggataagtgtatagggaaggtgtagtaaagagattgaagatgaggttttgtgatgattgagaagagaatgaggatagttttgaatgaagaaaggggaataggtgagtgataatgttaaggaagagtaagggaagagaaaagaaggtggagtgagaggagtgggagaggtgagataaagtaggagtattggaagtgttgtatggtagagatgagtgatgggagattgtttgaagtagagaaagtttgattatgtataatggaagg

SEQ ID NO: 130356 - DNA, 363 bp, Arabidopsis thaliana columbia
tgacgacgcgagtagcggttaagaagaggcttcgcgatagtccttaacacgtggcgcggatacctagttccagtgcgccaagaaggctggaatataatagccctacacttaatagccttgtgtctagatagtaggatgagtatttgcgctttccagtcaataaccgcgggtgacgtgctcaagaacaactcgaagtagttcaattttgcccatagttccttgcgtcgggatatatgagctcatgaagcagctacaaatttcgcctctagtttggacttgtctaacttcgatcgtcccttgaaataccaggtgatggctttctctctcatactagaaaatctgtgtagagggtatctttccttg

SEQ ID NO: 130357 - DNA, 1013 bp, Arabidopsis thaliana columbia
aaatgattagaggtccaggccacagacaccacgccgggcgagggacataaaaagcaatcacgagaaagaacccgttggacgagagggcagcagcagtgttttttattttgctgcagggcgtacgagcagaagtcccaaagacgcgcgtagcaggtgcaccacacgccagggcacaggcgaagaacgacctccgaaagcgacgaggacccgccatgacgcgtgatcacgaagcccaggcaggcatcgcgcagcagagcgtgcaaaccactccgctaggaccgaagacacgacactgaacctagccgaaccacccgaggaggccgggcaaccccaagcaaaaatttagaccccccggggccgccatgagcggaccacgtcccccgaaacgcacaacgcgcaggggcagaccaccaccaataagcgcggccccagaaacccaacgcaacggccgaccagcgaccacatgcgccatcagaagcacaagcatacgcgggcgagcaactgccgcccaaggacacccggagtattgcacagaccccacgtcgtaccgagccacgagaggccacacataacatcggagggatccggcgaaaggaaaaccgcgacacggaagcgcgcgcaccatccaggcgcacacaagaaggacggcacgccgacccccagcccacggaggaacaaaccccgggcgctcggaacacggaaacgcggcatacccagacgatgcacgacagcagcccaacagatgccgaggggcgagaacatgccgccgcgccaggaacgccaatacggaggcgccgtcccaccgggataggcaagggacacagggtccggaaatgagcccgcgccgcagagcaccggaggggaaccccagccgcccgaggattcgggacaccagaagacccttccgacagggtacccaaaaaggggccctgcggcaacaaaggaccaatcggcggcaaggcgcggcctcccgcccccgaagaaaagaccctccagactcccgtcgtaagggg

SEQ ID NO: 130358 - DNA, 614 bp, Arabidopsis thaliana columbia
gcagtaccggtccggaattcccgggtcgacccacgcgtccgaagtccagaaaattgagggaggatcagcacaccaagtctgtttttctaagttaaagaacaggggacaaactacgaggcgaattgttaacatacacgctgattttgttactctattcattcatagaaacattaaatcaactattgtggtggttacccatgaatgtcttgtgagtctctatagtctaagggtcgttccatggctgagccatgtgatcatgatcacatcaataagctttggttgcagaacacacataggccctagagcttgggacacttgctcctaagtcgaacgtttaattgtaacttgtgctgttgctaagagtgctccctgtgaaagccgcgtgtaaaactactgggcgtaaacaagtgctggatctgacaaagcgggcgcaatcagcattgatacatgacttgacacgctaactgttattcaggagagccatcaagcacttgcatcgcatacaggtatagatagggctggtgctgctaacacccccggactgtgtatgtgttcatacaaattcctaggcttatattgaggaaagccttacataatggaagaaattccacctt

SEQ ID NO: 130359 - DNA, 620 bp, Arabidopsis thaliana columbia
tccggtccggaattcccgggtcgacccacgcgtccgaaaaatcggagaggctggtctctgttttgttgacaggactggggatctgttgatgagcagctccctctgctgcggcggaggatgcgatggttttcctgcattctccgcgggggcgaaagtggaagataccgttttgtgagaatctgcttctgcatgcattcacggcgtggaagagtttgtttagctgatcggcaaagtcagcaaccaccggattagagtcggacggagataaccgcggtgactgacgtatgcgtatccagcttctagaatgtcatttctatactcggtagaactagatccggactcgcttgattcatacgagctcccgcgtcgacgcagacgcctgttaagcatactcctgtggttgtcgaggacgtggcggtcgtggattatattccaccaactatctcggcgttctcgcttcctaaaacagacccgtatctcggcggcggatctgcttgtagtagaccttgatcaacaccctttgctcgtcgctctctataccagacgtgagctacatctctcattaccagtcaatgaacgggacgaattctttatgtgcgtcgtgctacgcctccgtgccc

SEQ ID NO: 130360 - DNA, 424 bp, Arabidopsis thaliana columbia
  unsure (1)..(424): unsure at all n locations
cgacgccacagcgtgccgtataacataaagatntagcagccttctcgtctagaatacaggctgagggtattcttttattttcatccgagctcagtgaggaatgacaagataatatcgatgtgggcacaattcttgtaatctcagagatcgaatcattaggcatcttcaccgtaggtaagtcccactaaggtatcgcggcgcatcacacaccgggaggtcgtgttagtgatagttatgtgatcgttaaacctctcgattgctcacaaacgatagttaacgggctgatgagatactacgagtcctcgaccatagcatagtgtcaatacactagtatgtagtgttctattttctagtactatatccacatatgcagcagaaatagattaagttcgtactgcgtcttgatcctggatatcagatacac

SEQ ID NO: 130361 - DNA, 671 bp, Arabidopsis thaliana columbia
tccgtttgcggtaccggtccggaattcccgggtcgacccacgcgtccgaaagaagagcccagtcgaaacgataggagtgatggagagtataagtatgtttcattgtgaagagccgcgcagatgagaacctcacggatggagatgtgtctctgctccagctacagggaagcactagttgcacactctgatcatagcgacatattcaaagatggactggatgtgtttactgtcgcttgcaattagatcatcggccgcaagtgttccgaggtggcactcgaagactttctacctgaagaagaacctgatctgataaccattaccatcttctgagggcagagattgtattgaaaaccctaagactatagctttgtttacactactgcactgatggttcattttgtgactgagttggatctaaccagacatcttatcctgtgagatatgatatgaacttctcattcacctgcactctcaatacaatccatgtaacaactaataaagctttctatctcacactcttttaaaggcgtgagaatgctcaaacgcggagaggtcgaaattcagcgtaaaaaggggcggccgctcaagaggaacaaggcttacaacccagctctttccacgtgaaaactcatatatactgcagagctaatatgaattcactggcccgtggg

SEQ ID NO: 130362 - DNA, 672 bp, Arabidopsis thaliana columbia
  unsure (1)..(672): unsure at all n locations
accggtccggatttcccgggtcgacccacgcgtccgcttatgtaaattgattagggcgctgggaagatcaatggcatcgcattagattcggaggaataacctattggctctgcacgctttattgtgcctgtaggaacagctagacttgctctacaacaggcattgctgggaggctctgaatacgctcaacttgcgnctggtggcgaacactgacgtttcattagccacttccctcgcatgactagagagtgttcncgcaccatgcgacagaaagttcgtgggattgctgtccttcaggcgctgtctgtnacctcacatgactcgatagctgatggacgcccaggctatagattgccagcgataaacgacgtcttattgccagcaatgtgataagaactggctcggttgatgctaatctacaacattagccaacttgatggagataaacagggagctctcgttctaggaacgaacacccgctaggccgccgctaatgctagtaactgcagacgagcatgctcgcccattactcatggcaactccattactatgtatggcacgtcatcgctcggatagtatagttgcctacacatgtgtggccaataaaactgatgtcaaagaccgctatgactaaattgccatgaagtgatgtctctgtgctacatgtaagtt

SEQ ID NO: 130363 - DNA, 696 bp, Arabidopsis thaliana columbia
ggcattttgggtttaggctcgcatcccagctagcgaagaaatatagcttccatcggtatgtaaaaaactattttttttttttcacatgacgttattccatcatcatggtatagcgcacgatgcgtgaaattgatgctgctgttggacccttcatagtgattccacaaagcaggcacattgatggatttcacaaactgtttaagcgctttcctataaaacgttcttcagaagatactggagaatttctgctggtgctaaaaatttcccctctgtcattgcgaagctaaactaatgggatggtagtggtgtgtccataagacgatatctgcgactacaaatgtttcacgtgtgctgcagatgactggaaacccgcgcctgcttgcttaaagtatgattgcctcgcgatgggtgtactcagaagactttaaatgctcgctgctccaatatgcgcttttgacacaccgtgttcacttcagaacatgtgattttgtctgttacccctatggcgttgttcccccctggtgactggtgacccaggtgtttaaaatcgttgccccgtggccccgacttgctttaattcagcgtattttttcctcgccagaactgtcaaacatttattttttccctccccaaaaaatgttcccctctcctaagccgatctaaaagggtgggttttttagtaaaaaaaactatttg

SEQ ID NO: 130364 - DNA, 640 bp, Arabidopsis thaliana columbia
gcggtaccggaccggaattccagggtcgacccacgcgtccgataaaaaagaagaggagttccataaacaaaggccagtttttttattttaaaagcacaggatgtgggaccaaatgtctaacacaccctatggatattcggacgtgaataagcctgctcccattctcaccggcgacaggggcctgtaatggtagatgataccaactcccttcgtgtgacagcatacccgactgaacgagctgcttgaccctagggcgcaccttattcttacgaccattatacgggctaaagatcactttactgtctatgccagcccacccctggagtcatcgcggaatccattgatccctgtgcagcctgaacttggtattccctatgaactgactgacctatgggtggacgggcctcccaaagtcaaagcacgtaatgccccctcagaagaagaacttttgggcgacgatctctctgaggcacccattagcaatgacggccgcctgaagcatgtatgaccctctgaagaaggcttggttcggccatacacacccccatacatatgttatatgatcagctaatctgcctgacaggcgctatctgagaagccagcagccgacctggcgtgagatgatagggagcatcagcat

SEQ ID NO: 130365 - DNA, 877 bp, Arabidopsis thaliana columbia
ccacgaccgccccgacactcacgggaaaaagaaaaacacaagcaagacggaggagcaaaagagccgatgttttgttctgtgagaccgagcgggccccagacacgggggggagcccaagggcaagagacaccgccgccgccccgcagtgagcccaacaacccgcagagggcaccgcgcaggcgcagaactacccacagacggaccgcaaaagagagaaacctctggaggggtaaagaagaccccccccgtcacttaggaaagccccgaggcaaaagcggacgggtgccgggggggcgtcggaaaaggaagacaacatgccggcaaacaaaaacagtagccggacggagcgccccagaaggacgggggaagatatccacgccgggcccgaataaggagagggaaggtcaaaagaaagccccccggccgtgaaaaggaagtagatgcccccagggggaagggcgacctaaccgagaaacgtgaacgacggcactagtataacccaagcgccagaatgccgcggcacaaaagggataggggctgaaccacaccgggactggggcatcggccacaaggcggagagacaaagccatcggaatcgagcggcgggagggcccgcccgggagaccagcccccgacaaataagaccggtttgggaatcaccccctagaccgagacgtacccgaaacctttccccacgccaccgggaaattttaaaaccccggataagcgccgcggcggaaggcataggagggagagctagctaatacctcggcaagccaagggaagggagcagagcagctgcgcacaaaagaacacatccttcgaatatgccgaacaagaggggtgggacaaaaaaaaccaaacggggggccccccc

SEQ ID NO: 130366 - DNA, 642 bp, Arabidopsis thaliana columbia
cgtttgcggtaccggtccggaattcccgggtcgacccacgcgtccgagttgacaatctgacgatgccctgttatgttcccctggatgaatgtactgcaacaaggcatgctgcacatactgtacttggctggcagattgtctacggtggtctgcacaatcttaacaatgaacatcttgtagagttgactgaactggatgatggtccttctgcaactgtgtttcacggtacgcgaaggggcttataggtggattgcggacgatcaaaattagttcgttcggtgtagggtcatcaaatcatgagactctgactgtgggctcacgagtggaagcttcgacgcctttatagctccttgatccgatctgaggagcactttctgagtgtcggacggacagatcgtgtgggacgtaaccaatctgagacaaagaacatggatgatggtcatctgacgtatgtgatggcacgcatagacaagcatgctgaggatgtatcgagagctttcatcgcctaggtgtctgtagatgtatagacctacacacactcacacacctccgtatatttcattgaatggtgtatctttgctcatgtgaactcgatataaccactgatgcctatgtgcgtggtgggatatcatggtatagcat

SEQ ID NO: 130367 - DNA, 650 bp, Arabidopsis thaliana columbia
aaaattggctgactgtccgttgcagtaccggtccggaattcccgggtcgacccacgcgtccgaaatgatagatcgttatagtcctgctatctagcgcgatgttggttttttacacgaacggactggggtctgagagtacgacagaaggacatgttcaaggctaatatagagcttcgagccaagaataaccggttgacaaagactggactggatggtgtccatactgcaattctcatagacttaaccctaatgtgcattggttgcaatagcggacgatccgtgcgcatgcgatctctctaggatcatagaagacacagcacgatgactctccgcccccaagcggcatcatggacgcctttatggaaacgggtgctgccgttagaagcgacttctgctaaacttaggcacaaacaggaccggcataaccatctctttccacatagaattcataacgcgtcttcaaaatattctgtatacgaaccggagtcatgcggagcgggatttctctgtggctgtctgcatttggatctatctaggtgatgatacctgcactcatacacacactgttctatttatcagggaatcgatatattacctcactgtctacctttaaaacggaggccttcttaggatcgtttctctttcgcggc

SEQ ID NO: 130368 - DNA, 1217 bp, Arabidopsis thaliana columbia
  unsure (1)..(1217): unsure at all n locations
tgccgttatgggtatggtgtataagttttgggtattgatattcttattggttttatttattttgagtttttttttttttttgaagaggtgttttggtttggattttttaatagatatggggggggtttgtgttaggaattttttgtgtaatagttttttttttttggttattttttttagagtgtttttttttgttcttgttgtttgtggattttttttaatatattatattttttgatttattttatatttatgaattgtgtgtattaatgagttgatttattgtttgtagtttgttaaataagtattatggattataattaatggttagtttgtaagattttatgctataatgttagttttgttttattatataattgttttggagatttggtaatgtgttgggaatttatatatatagtatatggattttgcgatatgtatgattgttgtggagtgtagatgatttttggtgtgatatactttggtatatgttattattgtgatgattttgtgtattgtagagtgttttgtatattattatatagatgtgaatattgtattagaattgtttgagaatactattgtacttttggattaatatgagagtngtgattgatagattttagttggtattatatgactatagtgtgtagtgaggttgnagtattagggtatgtgattatgtatatggtttgatatgaagattgtagttgtagactattgagtatgtttattgtgggtggtatactgtaatattgtctgttgatagtgtatttacggattattgatgtggttaatgtctatgtgggaatatgatatagattgtgtttgtgttatcagtatagagtggtgatgactattgatgttatgaatagtatatgttgtatatagttatattatgagtaatatggaagatttgagtatatatattatcttgatatattgtgtgtataaattatgatggtgtagttgttaatttaattgtattgtatagttttgtgatagattaagtgtaggtgagcattggtggagttgatagattatatattatagttgttgtggtgtgaatattgtgtgtgattaatatatatattggtattttatttaattggattaataattttgatgttgtatgatttatttgagatagtgtatatttgtttaagatgtttattgttttttattattgatttattgttggtatagatgtttgt

SEQ ID NO: 130369 - DNA, 628 bp, Arabidopsis thaliana columbia
tctgcaagcacccgatcggaatttccggctcgacccacgcgtccgcaatgatagattagatcgaccctaggtggacatacacggttttttttttacaggctcggtgggtgcacaaatccactagggccacgatcacatctagggcaacgctgagcatctagccttccttaaccgtagaaaccgggctgtcgtggcggatctccataactccgttatcataccctcacccccgagtgtgcgcggaggtgcacctgtggtcggtccggatctatccgatcaggccagcgcccaagaacgctattactgtgaggcagatcccacaacaaagatcgatcggcgccttgattgttcacaatgcagcctttgcctcttcttgcggactaactcaccaccaaagggggcgcagggaaacaaactttaggttcgatgacacaaccctcataatggaaggatcatgactacctgcgttaataatgactcagagccgtcacacgatcggtgttgtcatattggatcgataaagccgattaaagcctacgcacagccacccgactaagatttaggttcccaagaaagcttgaaatcttttagcgtgctaacgagaaaacctaggtgaaacatacgaaaa

SEQ ID NO: 130370 - DNA, 446 bp, Arabidopsis thaliana columbia
attccgggttgacccacgcgtccgagctggtgtagggatttagcatcaatgggtgggtcaaaaagcggttattccatgcaaacagatcgacgttattccataagcatggtatggcggctaatgcatgaagttgatgcgctgttgacgtaagaattcggagcagactgagttcggaggtagcttcttaaggtgtaagagggttttgtgggaagagccgtctctggagtagttgggggtggtgttctagagattgggcaaatgtgtgttggaaggacggcttactgagggggctggagagttcggaatgaatctcctgctagtatggttggaaaggggacatgcaggctgagttggctgatcgcaaggcgtgcactgtgaactggatggatgacgtcgggcgaggtagcagactgacaacagagtagcggaattcttagagaagggta

SEQ ID NO: 130371 - DNA, 420 bp, Arabidopsis thaliana columbia
atagtgctcgctccgccaggagaggacggctgcgtaggggatgccccgaccgctgactgctggaggtcaggcaggtcgaacagcagaagcaggggggatggatgtgacctgtcgtgaagagcatcaggatatacctcagagagctcgcgtgggcggaattttgctcgagggagggcttatgagtcgcttggcagcagaaggagggggtgtctactaccggttagaccaaggagttacctttctcctcgcgggtcgcgatctcatgggcgagcacatgagctgagattaacgcgagaagactcgtcgcggctgtcagagcatcagggagactggatgcacacttgatgtatgttccgccggaggctgtgaagcgagataggcggaccgctcgtggtacgcatatattgattgttcgtttag

SEQ ID NO: 130372 - DNA, 918 bp, Arabidopsis thaliana columbia
  unsure (1)..(918): unsure at all n locations
cccacgccgcggggagaacagacacaccgagggcgcggcccggaaaaaaaagaggagagcccttttctttctttgagacagcggcacncggcactacaccgccaacccaggcccggggcggcgccccaccacggaaacagaccggcggagcgcgaaacaccaccgaacccaccgagaagcacccgcccggaagcgaaagacagccaacggaccgccgcgcacgacacacggaacacacgcaagcccgcccaccaagcacggcagcaccgccggccaccaaaccggagcggcaggcgacgaagaatccaccgcgaacccaatgacgaccgcgaaagaaacagaaccctagcccgcgccagacagccagtgcgcaccaggcggcgcgcacgcgcgcgaggcatcaaccgccacgcccgacgacccacacatccaagcgcaacccgggacggagagccacccgcgcaagacagcatgcatgacaatcggcccgcatgagagggcacacccgacacatcacgggcaccaagaacagcagcggcgcgagatcccggaggccccccacccaccgaggacgtggccacaccgcacgcgcgcgaacacgtgggcggcgcccacgccgcacaacacgcgctaagacacccgccgaaggacgaccggacaagaacgacttcgcggacgcggtgcaaaagacgccgcagcctgacgccagagtgcgcacggcggcctgccgacccgcagatccaaaggacagagacgccccccgcacacagagtaagaaagagccggagagcaggccaaccacgacagagaagacgatcgcacccatgcgagggcaggatgccagaggggacgaaccacaggaaacccccagaagcacagcaagaggcacacaatccacgaatgcagaccaaagccaaa

SEQ ID NO: 130373 - DNA, 414 bp, Arabidopsis thaliana columbia
tccggatttccggggtcgacccacccgtccgaaaaaagcaggacctcgccgccccccgtttgacggctttcgggcttcttctaaatggcaggaggctttttactagggcaggcatggtctggtcactccaaataaagcataaaaaggtctacccagccatctcaagattgtgattgatatggggacttgggcgcagctgtatcctttatcaggagggctgatccgctaaatgaaacagctccagtacgacccaacaattgcgttgcccagcgctctctcatttgacatagccgaaagaagcgccattttcgaacgagctgaggacagatggcccgattccgttactacctgaagaagcctggctgatgcaccggtcggtggtctcaatgagacgacgcctgttcccgctagatg

SEQ ID NO: 130374 - DNA, 413 bp, Arabidopsis thaliana columbia
gcagtaccggttccgaattcccgggtcgacccacgcgtccgctttgctgatcaacctcgatggaggtctttctcctatcgtttgggttgctatgacaaggctctgttcggaaacagctagcgagaaagtataatctccattgctacacctggcgctcgacttctgcatcgcaacatcaaacatgagatggtacgcctatccctcgacttatgtctgcgtgtatggctaccgctgatatccatggaatatccatcccacctctgtcccatgagaacgcttaggttaatcaacacttgaggccgcagatacccggtcacgtacccataagtttcacagtaacagggtgtcgtgttcctgatgctaggaaaccgctcactgatcgatcgcaggggtgataactatctacctgaacc

SEQ ID NO: 130375 - DNA, 654 bp, Arabidopsis thaliana columbia
tttgcggtaccggtccggaattcccgggtcgacccacgcgtccgctttgcgggactcactgacgagatgatagaacattcctgcgcattgtgtcatacaaggccaaagagaggtgtatgagatgctgctcagggcgtaatggatcacatcacattctgcttttgttgctcaactcccacctctacacatctaatagacatgggtcctactaacccaagacccttatgtcagaggctctacttgaacggtaactgcactgacaagccgtaacaccttgaccccacactaaaactcctgtggcttaacacccggggccatgaatacactgatacgatccacaagatcgccacgaatacgtgatgggtgttctgcagttacaaaggctgacgagctatagcagacgataatactcctggacataaacaagtagtgggtctggcaaaaagcttgcaatgtgtgtgaacagaagagagaacggtatatatctgtggatgaaagctaagcaggcttgtcctcctcggggctgaaacaagggtacacctggtgcgaatgtcagaggattgtgtgtataatcgttgataatgtgagtcgtcagtggaactacagggagtcttgacggatgatattcggccgtcggggtacggccctggatct

SEQ ID NO: 130376 - DNA, 652 bp, Arabidopsis thaliana columbia
tgtccgttctgcggtaccggtccggaattcccgggtcgacccacgcgtccgaactgacgagatgaatctatcctcggatataatccactgtcagtgtgttacatggacggatctgggacatatgctgccacgctacctcctgctagaggctcatcttctccctcgttccaatcttaaccggagtaatctgactgtcatggctgatattcatactacagttgtgatacacgaaacccgcatgagcgctggggtgcagttgtgggctgaccaagtttatccgatcagtatcgctacaaaaggtcacatgactctcatgctgagaccacggcttacatctacgccgtctttattggacctgtggctgctataataaggtgttccggattaactcacatttagatagagcgtggggacacagttatcagcacagaggaatcatgtctcatcatacaactatcactactccaatctataataatccgccgggggatgtatcgagcgcgtgatacatatatgtgtatgtagatgaacatacctgctcgcattctcacgctcacatttatatcgagtgaatcgtgtatcgttcctacaccgaagactatattacttccgatgccattgtcaggttccttatataattgaacaggatagg

SEQ ID NO: 130377 - DNA, 620 bp, Arabidopsis thaliana columbia
  unsure (1)..(620): unsure at all n locations
ggccacccactcccccgcnctgtagaaaaaacgtgggatctatttaataattgcgggggcttctttaccgctaaaatttgcgcagacgaaaaagcagctcttgcgaagaagatttagaatggtggccctaggagcggctaaagatcgccttttgaggatttggaaatgtttattcttgaaaggattagtcagtcccaaagggtattggccagaggaaactggaccaacactctttagtggtacagaactccatgcacacatttttcttcctactgtctgtcatattggagcagaaacataaattcatgctcatgatagcacaatagaagtaactgaactttgctatgctaaatatatattaacagagnnnnnnnnnnnnnnnnnnnnnnnnnnnnnnnnnnnnnnnnnnnnnnnnnnnnnnnnnnnnnnnnnnnnnnnnnnnnnnnnnnnnnnnnnnnnnnnnnnnnnnnnnnnnnnnnnnnnnnnnnnnnnnnnnnnnnnnnnnnnnnnnnnnnnnnnnnnnnnnnnnnnnnnnnnnnnnnnnnnnnnnnnnnnnnnnnnnnnnnnnnnnnnnnnnnnnnnnnnnnnnnnnnnnnnnnnnnnnnnnnnnnnnnnnnnng

SEQ ID NO: 130378 - DNA, 636 bp, Arabidopsis thaliana columbia
cgctccggaattcccgggtcgacccacgcgtccggctgattggaacaataaactctcgatttttccataagatcagggattgattgaggtggaccgacgtccttaatctgttaccgttggtaccggaattgttcgttgtgcggctctaatccctactggtgctgcgattgaagccggcaaggacattgctcttgacaacaatgacacatccttcgctggaggtgctttcgtgcttcagattgcctactaacatggtgcaatgattcttccagctgattcaacacatagtgacatatttgactgtgttcaaggctcagtgtgaccgcgctctgcgcaatataatcgagactgcatctggtgactccttctgcgattggactgtcgaaaagctcaccgaatttatagtagcggctgcgttgatgcatccaaactagaacatgggatatataatcactgtggactctactactctatctaacaatgctcttgcacgtgttgaagcacatgattggataggagctgatgatgacgacgtagaagatgtcattcatccaccaatgtatcacacattccatgatcgaaacacacgactcatgtggactgctcaagagggtcggcctgatatgccatttccga

SEQ ID NO: 130379 - DNA, 643 bp, Arabidopsis thaliana columbia
ccgctccgcaattcccgggtcgacccacgcgtccgacacaaaaaaacttgctgggtactgaaagaaaacgcaataaccctttctcaccttattgtaaagcctcaaaatcggaatatcccctttcgcgttacttcccttttagttgactctaattcgccctttactcattatagctctgacgtcagaccaccggctgggtctcttggttcctcggaaccgctacagggtattcctttccaatctgagtttaccaagggggactcctctgctttttgagctgcctatccggcgatctgcataactatcgccaactttaactttggctggttcttcccgagtcttaatctccgctgtatctacttgactgacagagtggtttttttgatctggcggcgccatccgattggatccgcctatggagtttggttgcgaagtccttacttagtaaccaaagctggggaaaaaggaagagtggcggtgatattggattaggtgcactggcgacggcgcttgcattaaacgaagtgttgctgctgggacatttatgcttaccgcccagtcttggggcgcttcgtctagtatggaaaaaagcctagacctcagagaggataaagggttcggcgtttggaccttctggtagggc

SEQ ID NO: 130380 - DNA, 632 bp, Arabidopsis thaliana columbia
ccggtccggcattccgggtcgacccacgcgtcgcaaccgagacaaatgagaccagacagcttccgacaatgatttagatttaacgtaggatatggacacgtcaagcagcccgcgtacatctgcaagaatcagaccctgtatattgatctgaatatggctccagcggacactattgttacgccgctttttccaatccaaagatatatccccggtgcatgagagcccgacctatgagtaagaaacggagctctgtattaaaactggattggctctacgttcacgacattgaagatgatagaaagatgatctggagctgagttaatatctgggacaactgtatctcttctggagcaccagatgcttgatcttcatattcaagcttacctgtttgttagaatatatcatatccttgcaggtcctcttagatgactcaactacaaacatgtgtagccatggaacattcaaaccacgaggcttttgaattacggaggtgcctaccattgcaagaattgtccctatttcacggggcgggttacgtttgaccggaatttatattatctgaacatcacgttctatacctggatgccgatatttgcgaagtattaattaggattgaagaacgcttaaagtga

SEQ ID NO: 130381 - DNA, 705 bp, Arabidopsis thaliana columbia
accgagtccggccgcgccgctgcggcaaacacacagcccgcacaaacagaaacggattccctttgagagaaacccccgaaggccagccagcaggccacccggaccgacacagcgcgcagccagccagcgagaagcggcaggcacccgcacgacggaaagacggcgccgccgagcaagggtgcggggaccgaaacccgaccacggccggcccgaggcccggccaacacgcccgcgcacggcacacagggcggcggccaccgaacccgcgcgggtaaaaccgcgggcaccaggaaccgggacccccacccgacaggaaacccccgccgaggacgaagcggaccagggggccctgccaaaaaacccggttcgcccacggcccgaccgccaggggcagccacccgcaaccataaggggaccaacaacgcaataccccgggctagagcggacacaagaaagggcgctacgcgggacaagccagaactcgaaatccacccaaccaacgggagagaccccacggcaaaccctgccagggcgcccccacaaggggggacgcaccaaaccgggggccccaagagaaggaccggaagccactcgccaactcccaaaaatcgggaagccaggccaagcccgaggccggcaacgaggccgcggcacaaaagggccccaggggaaccaaaaaggccgcccggaacacacgcccaaaaa

SEQ ID NO: 130382 - DNA, 605 bp, Arabidopsis thaliana columbia
ggagtaccgctccggaatttccggttcgacccacgcgtccgccggggcattaagagattgagactaagagaaaatgggggctacgtttttatttttggggctaaaacaagaagactcgttaggggcaatatcgtcgagcaacactctctcgtccctgacgctcagaatcagggcatgacatagccatgaaagactatttttgtcatgattaccataaaggaagatgtgggtcaagctccctatgatatgaggaccactgagctccagaaggccgggatacactcaagagcgtcttaatgtacgccaacacgaagagggcgtactcacacgagaacttacccaaaaagacaggggatgcctattggtctccgcgagacgaggactggtggcggtggaacatgcaagaaaaacaactgatgctcaaactctggttcatcgctctgagtgtgctcaaccagtggtgagagaggagaattctggacaaaccttgtactacatctgatattctgcagcacagattattggatgtatatggcgcaaacgttgtaactttcgaggccattggcttttaagcgtggatatgctcagcccaatctggttggaaa

SEQ ID NO: 130383 - DNA, 345 bp, Arabidopsis thaliana columbia
caggggaaaaaacacacccgtcccggcgagaaggaagaaaaaaaacacccacgccaaacgacgcggaaaacataggaagagagagtctctctctgacacgggcggagaaaccacgagaagaaccggacaacgcccgccgcaggagaaagaaaagaagcgacaaagaaacagaaaccacaccaccgccacaggcaagaaacgcacaggccaagcacagagacagagcgccaacgggcgacaggccacagagaaggcacagacaaaagtaccaaacactctaaaccatcagaacgaaggagccggcccaagggaaaaagccgccgaggaaggaaaaaggcttccccc

SEQ ID NO: 130384 - DNA, 207 bp, Arabidopsis thaliana columbia
caggcgtcgacgccacgtcgtaccgattgtgaccatgaaacacatcgggtcgaggataaatccagcagaatgaatcttgtttttatcaacggcaatagagtctgactcagtgaacacctgtataggtcgtacctttcatcagcatcacgatgtcacgtgatcctgcgcgcgtaatacgtcccttcgatggagtaacatataaatcga

SEQ ID NO: 130385 - DNA, 744 bp, Arabidopsis thaliana columbia
  unsure (1)..(744): unsure at all n locations
gcagagtaccgcgtccggtaattctccggngtcgaccccacgccgtcccgctagtgtcgcatatcctggtgttggcggttatagacacaatcagtactcagtattatcgatgcttatgggtttaccagtaagaaccgatcgaccttatgggagtctatgaatcattctcgaatggaggaatgcattgatgaccttctgtctcgacaagcatgtagtagacgagctacttcacaggcagagcgatctagagcactgcctcgaggacacgcttatgtagcgctatctaatcataccatccatgtagaacaacagctataggagcttcgaagtgatgtaatcaaactgcttgccttgtgagaatgtatgaacacagagagagggatgaaggcctcaggttacggacgacattttgagcgagatgcaacaaggcaactggagagtggagagaactgctgcttgtctgatgagttgaagtcgaaacaatcacgagcctcttgtggggagagaagaatagaggatagacgactcagtgacagatgggagaatatgtgctgttgagtctagctgagaagtcttgatgttgttgaaacggaatgtgcttacttgaagtcactctatgatgctgaagtaggagctccgggcactcaaagtgctgcattctcaggggttggagagactgataatcttattggtcaaggagagaacgatgcttatcagaatgtgaacaatgctgtgacttatgcg

SEQ ID NO: 130386 - DNA, 830 bp, Arabidopsis thaliana columbia
tggttttgggggaagattgagggtgaggttatatagtattggtgatttgattgtaaatagggtgttagttttttttttttggaggaagatatttgtgaaaattggattgtgtgtggggagtatgttatataataatgagagtttttttggtgatatgattgagttgtgttattttgttgagttgatttgtagtgaagtataatttttattgattgtttatgttatgatttgttagtattaggatattgtgtttgtttgtttatttaggttttattaagttagatttaatgttaagtatgtagtagttgtgtgtatgagtattttatatattgtggttaaggatgtgtttgtgtgtgtatgaggtgtaagataagttgttttattagtatatgtgaatagaatgtaagggagttgataagatatatattaatatgtatgggtttttggtagataagtgtggattatgtatgtgattgtatttatagattgagaaggttgtagtagatgttgagtggtgtgatgttaagtgtgttgtgagtgggtatgttgtatgtgtttttatttaggttgtttttgaatgtgaggaatgtggtatgttttgtgtgtgataatataggtgagtattagtttataatattttttttgtgtggttataggttgtgtatttggttggtttgtttttagtgaatgttgagtgggatgaatttgtttttgagttttgttgtgttggataatgtgtgtttaatgtggttttattaatgggtattttagtgatatgattgggttttgtagattgtggttatgtgtaaagggagagtagtgtggattta

SEQ ID NO: 130387 - DNA, 634 bp, Arabidopsis thaliana columbia
cggaattcccgggtcgacccacgcgtccgcccataattaggattgaggacaaggtcgaggtatgggggaaagaatttcgttggcacctacaaggagggactacaggaaataaacctaagagaaggtaactacgggaggatcccataccaacccccgaaattggtttacaagaaccctttctgtgtgggcaccttgtggggagcctcactctaccgtgatttccaggacctgagacgagtaaacgacttgctatccatgaaaaactatgataccggtcggatcacacctatcaacagtgtatgcagcaagctgtatggctataaatccgacgatctatccacagttataatggcactttctactatctttgatgaacatcttcaacgtgagtggtcacatgcatggactgctctatgctgggatcctgtgaggggagtgaatgagcagtaaggattagcctgaatagtctatctttatatctatagagagagagctgatcaacccgctgacattattacttcatacgagagagaggcccatgttattgctgaatgctaccagatcaatactgttgcataaatgcggtcgcagatgtgacggtgaatggcatggagaacatgatgcgttctagaaa

SEQ ID NO: 130388 - DNA, 584 bp, Arabidopsis thaliana columbia
  unsure (1)..(584): unsure at all n locations
aatccggttcgacccacgcgtccgcgtatgagagaccacagaagaatcgaccagcggcctcgcaatgctctacattttcagcgacaaggccggggactacgaggctggagtaatgtagcaaaactgcgccggacaactaaacccccaacacggagatccgagagcaatggaatgctccataaaaacccaagcctcaagagtgagtgaatgcggctagagctcaattcgagacccatggggcaaaaacacatagcggggtcgcgccgacacagctttcttccccaggcaggagccgcccgaacaagacccggaagaccctccagaacagtttcgctagttcgacggcaaccagacgatcagatgcatggctggaaaaatcgtaccaaactgaggggaacgtaagcacctagtaagcaatagactgagagccttgaacagaaaaagacataggagcaaccgtgcataaactggagaaacccagtccgtaagagggagccaacaatgatctgaccaggtgggataaaaaaacgctggggctcgcgaaataagatagactctcaaagccntaaaaaagaagaagggaa

SEQ ID NO: 130389 - DNA, 641 bp, Arabidopsis thaliana columbia
tggcacgcgccgcatttcgggtttagacccacgtccccgctaatttagaggttgttgctcacaactactttttaacagtgaattttccttacaacaacgtgtggggccaaaactgtgacataatcacgtctattaccttcaatacatccaggggaaaaacttttcccccctatggatgggaaacgcaaaagatgtttgtcctgaaagacaaaaacggtggcatacttgtagggttccatggacaccctggccaagctctatatcctcttggagcatattttgctacaaccacaactgctgtgactcctgccaaaatactatctgcaattggtggcgatgaacgaactgcatgggacgatggcgcgtccgatggtgtcaagatagtgtacgtaggacaaggccaagatgggatatcacccgttaagtttgtgtacaacaacggcgcggagaatatcggctgaggtgaacatggaaagcctactttactcggattcgacgagtttgagattgactatacaagtgaatacatgaccgcagctgaaggcacctacgataaaagctttgggagtgatagcctaatcataactatgcttaggttcaagactaataaacaaacgtgctactccctttaaacttgaagc

SEQ ID NO: 130390 - DNA, 932 bp, Arabidopsis thaliana columbia
gttcgacccacgcgtccgctagggggactgagagaagcccccccaagaaaaaaggcgcaggttttcatttgaagggaagaccctgtggaatagcagctcctagagggccagggagaacaccagactacgctactcaggctataggggagaagctagccgcatctcggaatgttcggcgctggaccaagaaaattccttgcccccctctcacaatgcttgagagcggggccccattcagacccacgacacgattcggcgaaatcaccatacccgaccgatggcgcccagaactagtcgccactccaacctattagcataccaagccgtctcaggcttaggaacggccgccaagcgggccttagacgagctataggggatctttggagcacacggttatagtctgtgaagactcttcatatataatatctgctgcgacaagacaaagactcgttggcatgatacaattaatgcatttggcggggaaccgagccggggcaataaaccacaaattgaattaacaagggccagggccctggcctttaagtaaggatattgtggttgacacgcccacatcgccgaacctccctggacggtacgttatagtgcctagtactaccacgcgggcgccttggggctggccagaaggcccaaggctaacctggcgagccaggtgcatcggctcgaaaccagaggtgtcacctgtgggcaccccacccagtggaccttttcataaggggccggattttgggtggccgcgaaaaaaaagttcagagtgcgttgccccccccaaaaattctagggaggccccaattatgggctattggccagtggcaaaaagcagccggcctgagtgaaccgtaagaatgtggggctaaggaaagcggcccattgccgcctctattgcaaaaacaactgttcgatatagaaggccc

SEQ ID NO: 130391 - DNA, 662 bp, Arabidopsis thaliana columbia
caccggtccggtaattcccgggtcgacccacgcgtccgaaataacagaacatatatttccttggaagctgcccatgattgtgcttgttcagcgccgaatcaggcacaaaatgagagtgctacgggctgctcagtaggtcactctcttcagctaacccagtgctgacatagacgggtgatggcaagagttgagtacgtgccttgtaaaaagtacctgctaacctgaatggaacgaggaatgaaccctggcgtgacgaatgaaagacgatcatgatactgtgataatgacgagcgactctcatgacacagtgcacgacgtccatcgtacgatgcttcgattgatcccacgtgcttatctggagagtccgcttctggagtttgcagatttaattcgtgggatgcagatacaggagttaggaacgcggcttcgaggggacctggctagatcgagtattcgagcctggaataatgcggaaaaggatgtatacaccgctatcctggatgacgaggtctctaagggggatatgccttacaactcatgcacggaagtggtagatttttccgaaggaaattggaggactgttgtacccttaccttgattttgtaaagggttaacttcctagaatggaaagtttcctggggttattggtagtggattacgtt

SEQ ID NO: 130392 - DNA, 679 bp, Arabidopsis thaliana columbia
tgcacgtacccgtcctgaattcccgggtcgacccacgcgtccgatctgaaagaatcaatgagggcagataaacagcgaacgacttatttttctaaataaagatccgtagtgaaaccgtgacgggaatttttatcatacatgctcctttttgcgctcaacccctcctaggacacatcttatcaactaatgtgcgttacacccaaaatctctattgtctgacgctttaatttcatggtccctccattgataatgcatcacactcttgaccccaccgataagctttagggtacataactcccgcggccctagagacactgaaacttacccagaagacgctcgctttcttctttctggagctgctgttagatatgctgacttgtaaatgagcatatacaaattctgtgcgtaaacaaatgttggctctggccaagcgagtgccatcatcggtgactagtgactggacatagtgaagtatcagccgtaggactgatcaagcagaatcaccacgtatcatgtaataacggttctacagttgcattacatccacgccatgttgtttcttaagcaattgcaaactcttaaagcctttccctgggcacgaaaatcggttgatcatgacaggaaggaccatttcgaccgtttttagggcaccagggaccctgggtccgttgtgaaaacc

SEQ ID NO: 130393 - DNA, 627 bp, Arabidopsis thaliana columbia
tccgtctgcggtaccggtccggaattcccgggtcgacccacgcgtccgatacgctgaaatccaggctggatgaggagctgcgtcggactgggatacaatggtagcgatgcctagaggaaactgcttagctaagtgataacatccgttgcccatgtgatgcttacctcctacatggactcatcagatcatccatgggtgatcagacccgggatcgttatgactgtgtctttcttgtcggtgatcctccattgaagaaccatcacaccctgatcccatcgagaagctcaggtttccaagcaacccggtggcgatatgctcggtacatactcaggattgcgaccataactgcctatgtgtactaaggccataaatgctggctgctatagcactatggaacattactggtcttgaacaagcggtggatctgcctaagtgggtgcagtgctagctgatagaacataggactgtagagctatatgccgtaaaactgatgaagcaggacctcgacgcctatgattaattggcgccaacttcgcttaaatcattggcttgcttatttccacattagaattcgaagccttcaatggaagcagaggtggacatgaccgaagagatgaaaccttttag

SEQ ID NO: 130394 - DNA, 642 bp, Arabidopsis thaliana columbia
ccttttgcggtaccggtccggaattcccgggtcgacccacgcgtccgctatgctggaaacaaggccgggcgatcagacgcgaacgactggattaccaagtgtgggatccggaaagcaccgtcgacgggtcatgaccactctgcatgagctgtttcagactctgctgacagatcgtgacagtgatggagagaaggtcacttacgccgaggatctttatgtcggtgtctataatctcgatgctaccacaccgaagatccgtgactcgttgatcccaccccagcctgtggactccttacgccccagaaggcgtacagctgaagttcagaggactgctgcggaccttcacaatgcacaggttactgaaagaacacctctgacaggcagagcaaaactgataactagcggccctccgtcaggcgaaaactcggcaagagagcgcattcataccggagagactatacgtcgggccaaatgacccgcgtaaggctgttgaagcgggatcatctcatgtgagattagtgtgtgcacatgtagcatagatcctagcgacgccaatgtcagccgtccaaagcgaaggccactctgtccgatgtgcagaacacttcgaacaagattctcattttatggtacgcctttgtgtga

SEQ ID NO: 130395 - DNA, 646 bp, Arabidopsis thaliana columbia
ttgcaggtaccgcatttccagggtcgacccacgcgtccgcaaaagtcaactgaaaaaaacgtagagaatgtaacaggcgtcgaatataaaaaggagtaaaaatctattggcttctgcacgtctttatgagcctgtcggatcagctgtattgccatcaaccgctatcatgcttgctatcactgctcactttgcttgatgcaatacaaccgctcttgcaacttctccaagctacgatggtagcactctcaatgagggtctgggttgctcacaaagggctgtgtgcactcacatactcaaagctgatggagcgcaggctatagcttgcatagcctgagggacatattcctgaccaaaggctgataagacttggggacctgggaaccaatatgtcacatgtgctaagatgattcttcaaaacagcgaggcgctggtactgatcaatatgcctgctgagccttgacaattgctagttattgctgacgaacatgctagcccagtttacattgcaacacacttactctctcacgcggtgcatggcccagatggtcaagttggtcttgaaatgaggggcgataatgaacatctcaacgccatcgaagatgatattgccatgaagtgcagaaaccttcctagatgagagtctgct

SEQ ID NO: 130396 - DNA, 762 bp, Arabidopsis thaliana columbia
aggggtggagggagtgtagcgcagggagatagagagagagatgagaagatgggggggatgaggatagagagattgggaggagagagggaagaagagagtggagaggaaagggaaagtgatgggggtgagggagagaggaaagtaggaggagagggagagggggagtggaggggatggagaagagaggggagggaagaggaggggaagaggtgagaagtggagaggagaaggggggggaaaaggagggaagggggaggaagggagagagggaaagagtgggagagagaatgagggggggggggagggaggagaaggggagggagaagaggaaaaggaagaaagaggggagggaagaaaagagggaggaagaaaagtgagaaagaggaagggaagggagggaaggaggcgagagggtaaagaggatgaggagaggaagagtgggggtaatgaagatggagggattggatggggggaagatagagaggggaaaaaataaaggaagagctgtgcgagaagggagaagatgcggagtggagggacgttgagaaagggggaaatgagtgtgagtgaggatgagggagagtaagagttgaagaaaagttaacaaagatgagaggagggagtaaggaaataggaaaggaagatagagggtaagttgggatgatgagagagggaggttgagaagaagagatgaagtcgagagatgagggagagatgaaggagggacatgagaggagagaaaggagtggtgagagaaaaggg

SEQ ID NO: 130397 - DNA, 652 bp, Arabidopsis thaliana columbia
ctgcaagtaccgctccggaattcccgggtcgacccacgcgtccgaaacgatggtataaagacatgatggtatacacttcttgtctgggtttctgaggaggcgattcttgttcttcctctgtgactctgtcactgactatctgtaatgttgggtgctctccacacagtagaatactcctatgtctcgcccactccacaaattctgaacctctatttccgatactctagagaacaagtgaaagaactgaagatccacaagactctggtcccatgcttaaatggactacgaatactagccgtattcctatcctcgaatgtgacaacttcatctcaccaatcactcctccaagtgttgctatagataacactagctgctgagaatgcactcattgtacgacgtgcgacagcttagaacaaacctggaatcctactagtaggcgcgcacccacctaacccatctcgatgtcaccatcactaaaccttatatcacttatgatgctggatcgctcattgccgcattccatggcacccatctacatggaaacaaggcttctgatatcgaaaccttcaatctcatcgaaactgtgttatgaccataagatcacgcttgggataaacaaaccactcggccaggtataagatcggtgtccatt

SEQ ID NO: 130398 - DNA, 558 bp, Arabidopsis thaliana columbia
tagttaacacccgcgcaaaaaaaaccaacccaaacgagactttcttaaagagaacgagcaacacccgggggccacaaaaaaagagaccgcaccaccacgaacgcgcaaagcggaaccccccacaccgaagaaacccccgccacggcaggcccaccacgcaaaaataggacacacggacgaacaaagaacgcaagcacgccaaccgacgaaggaatagaacagaacaaaaccagaccggcagagcgaggaacagcagaacgaccgcgcgtccgcacaaacgagcgaacgacgcgcaacaccgcacagcaacagcgagagcccgaacgcagagaggaactgaggggacaagagcagcggcgcggccacggcacccggcccggcgcaaagacacaacgagagacagggccccaaccaccacgcgaaacaggcaagagggggaagagaaaacaaaccaccacaagacaggcaggcgacaacgacccaagcgcggaaagaaaaggacaaaacacccgcgaaaccagagagcgcacacacgaccaggaccgaagagcccccaac

SEQ ID NO: 130399 - DNA, 405 bp, Arabidopsis thaliana columbia
gggtcgacccacgcgtccgaaatcacagatgaatgtgtccccagaaataaaaaacttttttttttttaaatcgacgattccgggtcctactctgcttcctttcgtatgcagagatgacattatggacctccaacccctttgataaccagctctaaaggtgagctgtccaaggaagaggctccatactaaatatttttcacaacccttaatcacccgaacaagtcgcacgtagggaatgtcatatttagaaccttatcgaaaaatttccatttcggatgcactcttgtcacctgaaccaactatgcatacacgagtttaccttctttcacagagctttatagatggctctcctcgtactctttacctattaaaggaacggcaacagccacctccttgactatagag

SEQ ID NO: 130400 - DNA, 644 bp, Arabidopsis thaliana columbia
tgtccgtctctgcggtaccggtccggaattcccgggtcgacccacgcgtccgagctgacggaataagtgcctctccatgtgaagataataagcagcatttcaaccttatgattcttggacctactcattcaccttatgatggatgaatgatcaagttggagctcttttcgcctgtagaataccctacggaagctaccaaagctatggttctcacaaaaatataccatcctaacattgacaagctggtaagaatcagactagatattctgaaggaccattggagccctgcactacgaatacaaacagagctcttaaagtctctgagctgattacataagatcatgacccgctaactactattgatttatagcagcttgacttctgctgctattttactaacgcgtgcctcccttatatagtattcaagcccttgtaagtgcaccaaaccgagatgacccgctttctgagaacattgctaaccactggaggactgatgaagctgaagctgcggatacagctaaggaatggacccgtatttatgcttgcggcgcatgataaaatgtatggtgacaactgaaaacatctatgtcatccacataacatcgcattggctgaaatgtatctgaagagcaaagttttaagaa

SEQ ID NO: 130401 - DNA, 641 bp, Arabidopsis thaliana columbia
  unsure (1)..(641): unsure at all n locations
cgggtccggatttccagggtggacccacgcgtccgactgtttaaaaaagctctgcttcccccaaatacggaagatttgctctttttcttagggcgcagaggagactctgggctcctctcaggcccatcaattacgtgaccgaatcctatgaaaccagtcatgcatgttccctaacttattagatctctgggctggtcatgaaagggcagactgattctgcgagtgaaggtcgacaaaagaaagacctcttggagttcgcacacgctacctctgcaacgatcatcgcaaacgaaacgactcgcgagtcactaggatacggatctgtctggatcaacactaaataggacgcacagccggctgactaagccatgaacagaaagtgctctgatggcacgttcattatggttaaatcgaggcagcctgggttgtccagccgcccgagacctctttgcgattgtcttatcgccaatagaggagcttaagcttgtactgcttgtctggtttatgacagaaagtagtataccatgactgctgagtgcatgaggaatacttgctgcaactntaagaccactgccaccggagggtgtgacgcctcgaactgcatgcccacaaagtgctgccgctctcagacatggaccctg

SEQ ID NO: 130402 - DNA, 672 bp, Arabidopsis thaliana columbia
tccggttcgacccacgcgtccgagctgctgaagaacttccgtctcactcctggaagaataacaaacgcaggcctctttatatcgattagtgactccagttgagtgaatcactcactccttcccttatgggcaggagagaagggatcaaggattgaagatctccttgttgcgacctgatcagaatagcaggcttatgctaatacatacgcatgagtctatgccttctagacaagtaatatacaccctctacattcacgagattgtctggaaagagtctagatctttgaaggacaaatcgttccctgtcactacaatcaccacgaggactctctcagtctctgaccggatgacatgacagcattttccgctaactactatcgatgaagagctacttgactcctgctgctactttactaccactcaccatccttacaaggtggaagatatctagcaagtgcacgcaaccgacctgacccgctgtctaatgacatcgatcaacacaagattactaatgaggctcatagccctgattcagtgaaggaattgacccgtctgtctgcaggccgcgctgatatattgtatgcgacaactgaaaacatctgtttcatgcggtagcgatcacatcgaatgaagtggccctgatgagctaaatgttgagaacgcttatgctgt

SEQ ID NO: 130403 - DNA, 1148 bp, Arabidopsis thaliana columbia
  unsure (1)..(1148): unsure at all n locations
ccgggggttttttaaagggcggccccccnttttttttntttttaataattaaaaaaaaaaagaagcccccccaaaaaaaagcgagccccacccccacggcctccccggggaaacacaagaaaaagcccccctcctttttttttttatacaaatcaccaccatctctttttttttttttacttactttccttaatatttagatatatcctcactctcttccctccctggcacaaaacacagaagggccgggggaaactcttccgctcttcctccccctcctaanttcttactatctccctcgcgttcgttccgctaccacatatacatttttatttgttttgtttccttctacaccctacattgtgtctggacgtttctcggtgcacgtcgcgctccacccatcccactactctcttgttctttttccgcctccctcccctctcaacctcccgtccggacacaaccactgaccttatcctctttatctccgccgcggcgcgtcgcgcgggttcttttctcctctctctcttataaatcgccgaaacagagtactattctagtgctgtttctttttttttatccatcctccctcgtcttctcgttgccttctctctcccggttatcctcttgttcctcttctctccccctcttctcttctcgcgacctctctacagcttatcccattactttcatctctccctcttctccttctcttttgctcccttgccttcggatatctatcgacgcttacatctttcatccgctcctgcttgtttacatcttctttaggtcgtttctttctctgtcaactcccacttcccctcttgttttggtttgtttattcgacgaatgatctctcccacctctccagcgtgactagtacgcgcttctgttttttttttatctacgatctcaacccaccaccatctcctcacttgtccgcgacgctctactccgcccgtacctacacaaaacgggtcgtctcttctatcctctttgcggggacggcgcctgcccncgttaaaatacaacattttcacttttcttctttctatacccctccctcccttgtttaacaccccaccttcttgctactttttctcctcgcgtgcctcattcttctactctaacatatcccccctttcccc

SEQ ID NO: 130404 - DNA, 827 bp, Arabidopsis thaliana columbia
  unsure (1)..(827): unsure at all n locations
atctatcagctacatcgtacgtggcatgcacgcgtacgtaagcttggatcctatagagcggccgccctttttttttttttttttttttttatgnaatgtagttcaataaaaagttaagtgttcaagttgtaatattgggacatttctaaggtaaaagaaattaaaaaatccgcaaacaaagctgtctggatttctctagtttccaagatgaactatgcaaacattgaatgtgataaatttataatgatagatataagagttcctatcgacctgatcagcgatggtcgacccctcccttcagagccaagttcgcttgcgattttttatgacgccggcctcgtttaggaccccaaccttcaagcttagcaacagggcaaccacatctagatcggaaaagtaaaacagcacgaccattaggcggagccatccttctaagctcagccctcaaacactcgtaatcaggattgctctcactacctcctttccatggcaatcgatcgatctccttagtagctccagatttaacacattcctccgtctgcaattgcaaatcaaactccatcgctttcttcaaacctttacacttgggattccgacacttcctcgatctgggtccacaacaaaggtcgagaaacgcaattgaagcggcgaataagacggcgaaggccaaaaagtangaagcgggaaggatcgaggagagatcttcatcgtccggagaagatcaagggaggagagggaagggaaagtgaaaggaagaggagagaaaaaggaagtggaaagaagattgggagaaagtaagaaggagaaggtgggaaagccccccggga

SEQ ID NO: 130405 - DNA, 796 bp, Arabidopsis thaliana columbia
  unsure (1)..(796): unsure at all n locations
gattacgttctnnnnnnnnnnnnnnnnnnnnnnnnnnnnnnnnnnnnnnnnnnnnnnnnnnnnnnnnnnnnnnncttttttttttttttttatttttagaaacttctttcagataaaacacaatattaccatacgtatccgcaaacaaaaagctaatcaagtaggcttgaaactacacaaacattcttagtaaggccaaatggtccaatgaggtaccacaagcccatatagggccatatatttctctttagagatttacaagtaatcaggcacgtaagaaagtttccatagtcgtccaggaaaggcttcatcgcctgattcgctttcatcatcagaactctctatccccagcaaatagttgacaacctggtgagttgttatgaggccaagtggcttgttgcctgatttcaaccgacattgttggttcagacatttaaagttttcgggccaaacaatataatcacagtaactgcagaatccccggccagatctcaatgcctccgatgaattaaccgcgatgtatgctttcttaaaggcttcttttcagtcaatatcggactgcatacgaatcaagactttgtgattgaagtgaaggtcaaattgtgattgccacagagagttctcatgcgttgcttggttccaagagcgagacacttgagctgaggaaacttaagacgatatcttgaggaaactgaagatgtgaataatgatatctcgtggaagtgaaaggatatctatatcttcttcctcacgatcttactacgcctttttagagctcttttgcctgcttgattct

SEQ ID NO: 130406 - DNA, 823 bp, Arabidopsis thaliana columbia
  unsure (1)..(823): unsure at all n locations
gggctgcacccgtaccttggatcctatacagcggacggcccgccctttnttttttttttttttgttttgaaaacacaatggattttccgtgccaagagagtcttcactccgtcgatttatggataccagaagttgttctacactattccagacataatagaatcttctagagtctaaaactaacacatatctctgatattgactggccttaactatcaacgattctcgctttaagccgtgacacaatcttgttaatcaggatggctagagtccaaaacctttaacaagaaagggtcctacctacccataaccatcttgacccaaggctgaacgttcccattatagagaatcacagctgccggtactatcaaacggttatcgatgttcacatcgtaacctaaacccaagacatgccatcttttgaccagtggctctgtgagaccatagaaagatagtttacctggagggagtgtcccgagtttccaaagcgtacgctctatgatccgatcttgccagaaatggcaccgagcaatcacgtttgcattcctccaagcgatcagatcaaaaacgttcataccaaaagcccatccacatgcttgcgggtcaaactttgagccgctgaatgggttcgagaaaattaaatacttgtaatatcggtgaaaggctttaagacatgtttccacagctccattgacgtttccatgccgatccacggagaaagatgggagtcaaattttttctgaacaaacaacaattattcgtttaggaaaaacaaattttctctaactggggggatagaacccccggaaatgtaggaattttg

SEQ ID NO: 130407 - DNA, 487 bp, Arabidopsis thaliana columbia
  unsure (1)..(487): unsure at all n locations
aaaaagtctattatanaacactatgacgttgtttgcacgcgtacgtaaacttggattcttttaaacggccgcccttttttttttttttggaataaactttccaaaattttatataaatacttttcaattaatattaaccctatggtaaaggccaaatacaaatccaataaaaaaattctattagataattgttgaaatacaaaaacaaacaaacttaaattgaaaaattctttataacaaagaatcttttttgggatataaacttatttttttaatgtacaaatccatgcagatctctaaatattggttcataactgtcttgtttagtgtcttgagattgtgttgtaactttgccctggtatcatcttaaattgaataatgaattcagaaagtaagttaatacttcattatcatctacataaaattaagtcattttctaatacgactgtcacggatcacgactagtcactcttgatataatgaagaa

SEQ ID NO: 130408 - DNA, 706 bp, Arabidopsis thaliana columbia
aactatcaacagctattactcgcatgcacgcgtacgtaagcttggatcctctagagcggccgccctttttttttttttttttttttttttttttttttattaaaaaaagttggaccaacttgggtccaacattttgttattcaattgcccaaagggtatacatacataaaggatttaggtctttagaggaagcatttcttacaacagcgcacaacaacagaagactaagaagccttgcaaaggtagattagccttccttttgatcgtccgcttacttaaacttgagatggcttaatataggtttcggcaggtttgggttcaacttcagcttttgcatgaaccttagcctcacacttagcctaagcctcagttatagtctaagccacggattcgaccttaggatcagactagggtttaggcctcagttaagcctccactggccagtaagaagatttctttccgaaatatgaaactgcaaggaaaactgcttaaccgaccccagggtcgaaaaaggaatattcgaccggtacctgcaggcgtaccatattttccctatagcgaagtcgagttagcagcttgagggaatcaccggccatgagcctgttaactagggtgaaaattgcccaacccgctaagccgttttccacgccaaacattaccctatcccctgaaggcctttaaagggtggtaacaacccctggggggg

SEQ ID NO: 130409 - DNA, 544 bp, Arabidopsis thaliana columbia
cttgacctcggatgcacgcgtcttcaagcttggatcctctagagcggccgccctttttttttttttttaatttttttgaagacgcgaatatttaaaaggcagagtcagtggtctcagacaaaactctctttacgtccgatattctagcaaaacatcattcgtgaagcttatgagtcttaatatcgactttgcatctagacaccatatcttcttacatagcgattcacaagataaagatgacgctcacttcttgttctcagttagacccccaacgggagacctcttattgcggagaacactggacatcttctgtctctttcgctagggtctcttgagggttcccaactttcgcttagcaaccgtaaaagcacgtgtgtctttaccaacctccaaaaggtcagggatactgttttcttagggggcttgaccagacgacttctttataacgcctttgataaagattgccctcgagcaaatggttcctttgcaagaacgaggactaggagctaattcacgtttggtaacaacatgtaccttgaataag

SEQ ID NO: 130410 - DNA, 595 bp, Arabidopsis thaliana columbia
tagaccagctatgacttcgcatgcacgcgtacgtaagcttggatcctctagagcggccgccctttttttttttttttttttttttttttttttttttttttggggcgaaccaaaaatggtttattcagaatacgtacatatgaatacataagtaaccaaaaaataaaattttatagcttttgccaaaagactcgatcttggattggctctaatcctacccaaaaaatcttgctatcacacaaaaaaaaggaagaaaatgaataataacggggtaaaaattttcagtaagagaactcatggccgcggagtgaaatgtattttttgacccaaatggcaatattttcggcgcaggcctgtgcctgaggagtcttgaaaagcatattaagtgtagcaaactcatgaactgcgtctttgtattctaaaactggagaatctacgtttacctttctaagctcttctgaataagcaatggctcggtctttcatccagacatgctcagctactactggaagtgttggaggcattaacttcagaagggggccactggggttatgggcaaatgggtttggtggcggggggtcaaaatccaactttt

SEQ ID NO: 130411 - DNA, 404 bp, Arabidopsis thaliana columbia
  unsure (1)..(404): unsure at all n locations
gagaggtagaaacgcgtgatgaataacaacatgacgtcgttgcacgcacacgtacgctagcatgctttagagcggccggcctttttttttttttttgaataatttttataaacgtgtgtcccctaaacgcaaaattaaaagatacaaaacaatatatcctctaactcactcacgttcgacggcggactaaagcttgggccgctttgaacgggcggatggaagcaggcccaaaacttcgtctcttgggcnnatcgaggcgggcctaattccgtctgaattgcggcgtggggtnttcaacgcggcccggctcccaaaggcgattttatggcgtgaaaacnncatacatnnttgaagggnaatctgattgggtctcccgaaaatttaaaacgcccctctatcccatc

SEQ ID NO: 130412 - DNA, 551 bp, Arabidopsis thaliana columbia
agaggtaagaacgcgtgaactatcaaccagctttcgttgcacgcacgcgtacgtaaggttgcttcatagagagcggccgccctttttttttttttaatcattttaaagcagatttagatagatgtgaaattacataacacaaacatctgagagcataaaaagagccagatgctcattacacactcatgtaggtaaacaacacacatcgaaggacgtacatacataaaaagcacaatacaacgaccgaatgcgcctgcgatacataccctgattatttctatttcagatgcatacacaagggcccgaagcttaacggccactatggaaaagaaaatgcgggatcttgtacatcatacggttcttggaaaagtgcttaccacttgtgtctccagcatcggatattgtatccaataccaacggtctcgacatttggaccggactgttcatgacgggctggaaactttttatcgaaggaacgcgatggtttataacaactgctagctccatagacttggcttcagggctatatctggatacagatttttcaacgt

SEQ ID NO: 130413 - DNA, 242 bp, Arabidopsis thaliana columbia
  unsure (1)..(242): unsure at all n locations
acgcgtgcatataacagacatgacgtcgcttgcacgcatacgtacgcttggatccttttaagcgggccgcccttcnttttttttttttttttttttttttttggggggatcttaagagtttcatcaccatgtgaagaggatcatttttcaaccttttttattttttttaccaaatccgcggccgggaaaaatggggaaaaagaattcaggttagtttggcgcccaccttccaaaaaccccca

SEQ ID NO: 130414 - DNA, 181 bp, Arabidopsis thaliana columbia
  unsure (1)..(181): unsure at all n locations
acgcgtctatagaacacttgacgtcgttgcacgcgtacgtaacgctggatcctctagagcggncgcccttnnntttttttttttttttttttttttnnnnnacancattcaaccgcattttttacttttgattcggcaaaatgcaaccacagaaaaggaatttaccagagggtaaccgtaa

SEQ ID NO: 130415 - DNA, 480 bp, Arabidopsis thaliana columbia
  unsure (1)..(480): unsure at all n locations
tacgtaaacttgggaacctttaaaaccggaccgcccttnntttttttttaaaagttaatttaaagtaattccaaataaaaaaagttttcaatcaaaaaaaaaaataaataaaaattaaacaaaattttcattacaaatacagaaaaaaacaatttgtcatttccacaaattatttattttttattaaaacatatcaacgttaatgtaacgtataaaataaaaaaaataattaaaaatacaaaataaattatttataattaaaatataattagacaaaaataaatgaatattcgcgaattatttacatcaacttgtatacaataaaatagttaataacattttataaatataaattactttcgacctgtacgatcgagactagtaaatcaagattaaaatgtatagatattctttaattatctaatcaaaataacgaaaaataagtggtctagagacaataatatggtgctatgcgttatg

SEQ ID NO: 130416 - DNA, 638 bp, Arabidopsis thaliana columbia
aatacgtctctctatagaacagcttgacgtcgttgcacgcgtacgtaagcttggatcctctagagcgggcggcctttttttttttttttggatggagttttggttaccggaattctggtaccacctcaataatggggtccttggaaccataagtaattccaaactggaataaaaaccttaatcaaaatctcatgcctctaacggattaccgagaaaattattagaatcactccacaatggtttcttccgaaagagtttttggcctctacagtgccttcattttcaaaaaccgtggtaacttttacactggccccatctcaaatcactggcgcttctaaaactaactttgagtgatagtctaccatatctccttccatgagtttgtgatgcattctcacttctctctagtagcaatgaacaaaccataccgagatctacctcgggcacgaaacacccactgaaccggtgaatctcacaggaaacttcgagaggtgactgttcaacaataatctaagtggcaggctcaggcagaaagaacgcggatcgaagttgacttgaactcctagactctcctaagtccgcctgcaccgatcgacgactgaggccattctaagagcaaactgcgacagcaacgtcgg

SEQ ID NO: 130417 - DNA, 741 bp, Arabidopsis thaliana columbia
cactatcgaacagctattacgtcgcatgcacgcgtacgtaagcttggatcctctagagcggccgccctttttttttttttttttttttttaatatatatcttagaaaacattataacaacactgatgagtccaaatccatctttatgatcttacaagtacaaaacaatcatcacacttgaccccaacaaaataattcttctgacttagaaaaacaaaacacaaacaccaatcacaaaaataaacacagctaagctctaacttacagttttgagaagagtttaagtcacttttaagctcgttgtgaccttctttgtcctgttgccacgaccattttcgacaaaacctcttcaagatactcacaacggactctatggtgttcgatccatatacataactgtcttatcgcttatctcttctcttctcctaatcccaacaatgtctccttcaactgctccttctatttctcctgttctctaacttgaccttcaagcttattctccacctcttacttctccttcgccatctcgtctttctccttcttcatctctaccacacacttgttcgccgtcaagagcatattcgacgcttcaaccactgttttctcgtagcttttgtgcttctcttcaagtttttcagacatggattggaaccggtttagtattgttgaatccactctctctgatatgtctctgatcaaaacctcgatatgtttccgtgggttggttgcgaatcttttccct

SEQ ID NO: 130418 - DNA, 897 bp, Arabidopsis thaliana columbia
  unsure (1)..(897): unsure at all n locations
cacgcacagccacacacaacccacaacaccaacaacacgcacacacacaacagaacacgaaaaacccaaccaacacaaaccgcccacaaaacccacaaacagccaccaacacaaaccccaagaaccccaccaaagacccccacccccagaacccaacacaacacccccaacgcaaccacaccccacaaaccccacaaagcacccaaccccacaaaaaccacccccccacccaccgcaccaacacaagaacacgcaccgcgaacacacaaaaacaccaccacaacccgaacaacaaacccagcacacccacacaagcccaaccagacaaagacacgccacccacagacagaagcacggcacccgacacacacaaggccaaaaacgaaccagcgagagacccgaggacaacacccacgacacgacacagccaacacccgacgacacgacgccacaccaacagccgccacgcgcaaacgacaacaccaaacgcccacccaacaccagccagaaccaaccgcccgcacgacaccccccgaccccagagagagaaccgccacacaaacgcacaaccacgacacaccaaaaaaaaccaccgagcaagagccacaccacaacaggaaaagccagacccaacccccaacagcgaccacagacgcgggagcgcacaccacaaaccaggacacccgaaaacgcaacaacagacccaacaccacacacacaacaaccacaaccaaaaaaaaaacaaacggccacacacccagaagcaccaaacacccacccacccgaaacacaagcaccccgcagcaacaccggacaacagccgcaacaaaaccacagacaaccacccangcacccgcgcgccaaccacacgcacgacaacaaccgacacccccacaa

SEQ ID NO: 130419 - DNA, 554 bp, Arabidopsis thaliana columbia
  unsure (1)..(554): unsure at all n locations
atcgctttttttanatcactatgagtgtttgcacgcgtacgtacgcttggatccttttaagcgggcggcccttttttttttttttttccctttttttttgaaattctttttttagtaaattgaaagatgatttgtgcaaatttttcacttttattccgcttaaatttattcgtttaggataacaatttgtttaatgaccaaactttatcataaacattatatttgactatgttcggtaaaaaactcccgcaacttacgaccagaccttattatttcgatcttctcacatattacgtctttattgatgctagccattttgaagtgcgtgcgccctgttccatagatccgtggttgggtggactgcttgtggggcttctcggtatctgcccgtaagtattcgattgggtcccataacaccgacactacgaaatttgctttgaaatttccgtgttaggatgtttgcgtggcttttgtttgcgctatattttgaaatggctttaacttatcatggttaacccattaaccttataaactccctgatttgcttttgcgta

SEQ ID NO: 130420 - DNA, 685 bp, Arabidopsis thaliana columbia
  unsure (1)..(685): unsure at all n locations
ttagccccgcggaaagaaggaaaggaantgggaaacccaataaggaaggccggaaggtgaaatggggtggaaggtcctaaatgtgaaccggttgggaaaaccggcgccggaaggcctgaaaaatggttgcccatgctttggggaagcaaaggaaagaaacaacccttaactaaggaaaatttgtaggggttcatcatccccgtcgtgactagacattgaccccgatagcaacatgttagccgccgccgtggtggtagaagccatggctaccgcggctggcggcaacggatggttatggtttccctcgtaggttgtaatcagaattgatctgtcttccgcgcaacgttgaacttgtttgcgaacgggacagcccgtggccatcgtgcagcggtaatatgcccgcggacaaggattccctttggccatcttctggccatattttctccattgacatccatcgcttatcatcggagcttccgatcgggcacgaacggagacacgggctttcctcatcgtagcttcagcggtttgatcaaatgtccgccgggtaagaaaattcaccttctgaattttgttggactcagtttccgggctttcttcacgcccaagtctttttcccgttactaaccctctcgggtgcagaaaaacccccccaaacgagttctatcttccggatgaagaaatt

SEQ ID NO: 130421 - DNA, 664 bp, Arabidopsis thaliana columbia
  unsure (1)..(664): unsure at all n locations
tgcacgcatacctacgcttggatcctttaaaacgggcggccctttnttttttttttttaaatatgtttaattnaancaaagccaaacttttacaatgaaggttttgggtttgccagggaaatattttaaaccaccacgttattattgtatggtagggaaaaaaaaaattaaaaatattttattttgtcaatttagaaaccccaaaaaattcgggttggtattaccacccaagaaaaggaccagaaggaccaaaaccccaatggcaatatgatggtgagaaataatttgggggtatgcttatttggcttctccattgctcataccgctctatctctttttatcgatccgaagctctttttccgtaaatactttgagtacaacttttggaacgttaatgacttgcctcggagataaatttgaccgagatgtagctggcatggcttcacgaatccttaaaatgcaccacatttagcatcttcttgcatgtcttgaagaagatcttaaatagcccgcatagtgggtaacaccaaaagaacggcgccccttttttctttgatatcccttgaaaataaaaaattggtcgaaactttgaagccattttcaactggtcccattgaacttggtccctttccttggttttctttccaagggtccccaaattttt

SEQ ID NO: 130422 - DNA, 733 bp, Arabidopsis thaliana columbia
  unsure (1)..(733): unsure at all n locations
gttnnnnnnnnnnnnnnnnnnnnnnnnnnnnnnnnnnnnnnnnnnnnnnnnnnnnnnnnnnnnnnnnnnnctttttttttttttttttttttttttttttttatatctgaaaatttctagaaaaatgagaaaaaaatataaactatatattctacagcctgcgtgactcctgtggtttttcttttccctcttgttttctctttttacccctaaaaaaattatggaagttgcaacaatctgtacaaatagagagagacttgtcccatatattttcatgtcacaacaaataagccttgactttccacaagatttcattccaaaaaatccttggctgagatagccaatggaaaatgcctcttcttcctctttcaaatatccaatactcatcttcacagctgtaatgccagatccggatgctgcgacgaggacgaaccagtctgctgattagagcccggggagtttggtgagactagcctagcgttaaggtctggcggaaaccggtggaattcttgtttggggtaaggaaacaatgagccttgttgttgcgagaccggtgtggcctcgttgcttacgtttggttgttgctgtctagcaattccgagcatctgatttgcattatggttgaatccgcggatgaggccgntgctgctctctgttttgattagcantcctgcttggtgaaaggaagaggatgggtgatcnatttctggattcaagacacgagcaggtgggg

SEQ ID NO: 130423 - DNA, 818 bp, Arabidopsis thaliana columbia
  unsure (1)..(818): unsure at all n locations
cactatcgaacagctatgtacgtcgcatgcacgcgtacgtaagcttggatcctctagagcggccgccctttttttttttttttttttttttgacagaaaattcgtagttgaagaaaaacagaagcagattacaaagaataacataagaaatacacagatattttatagcaagcacaccctctattaatcacatttaggacacatatgatatgcacctgacatggaatttcaaaaggaatagtgaaaaccagtgataatatcgtctcaatccatgtcagctttcttcaactattccgtctcatctcttcgtgttcgatctacctcgatatccaactagtcttcttactcaatgtgtaccaacgttcatttgattgaacataggaatgtaaagacaccaaaatcacatacagtttcaaaagattcagtcattgttattggcaaagtgaacaaaacatctactttcatatgcatagttgttcaggctgaagcaaagaatcaaagcgactcttttccagtttcattctcctgaaaatctcctcaagaacctgatagatctcataagatcttgggtgtgatttatcttccacagtaaatttatgaacatcaactccaacttccacaaaatagctatatccagcagcctttgtcatcgnttccttcttcatcaacttccgcatccttaaaactccatcccacttctcattggcggcgtaaatatttgacatgatcacacagttacctggatttgtaggttcaagcttgaacaggggcctacttgctatctctggtatcttaacattttcggggaaactacaagc

SEQ ID NO: 130424 - DNA, 825 bp, Arabidopsis thaliana columbia
actatcgaacagctattacttcgcatgcacgcgtacgtaagcttggatcctctagagcggccgcccttttttttttttttttttttttttttttttttttttttttaaaggaaaccttcttgctttgttaaagatacaaagacaaggagttatttgccataaactgaacatggcctttttcaaagtatacaaattccagttaaaacttccaattttaaaactcaccaaatttctttgggagagagacccagagaaagaacaaaacccaaaaaaaaaaaaaagttactgtcaattgagtttgacttttaagacaaacatttcccattactaataatagttaaaaaaaaaaaaaccaaaaaagtccttctttctgctttctcagctttcacttggtcggtccaaggctctcataaaacaggatgtaaccatggtcagtattgctcgaatactcctgagacgatccaaaaaatgtttgaacagctgattcttcaataatctcaacattcttatcaataaagaagagcccatggttatggcttttcacaaggcttacgtaatgaccatggtggggtccacttcccacatgaaccaccacttgaaacagagagtccttccacgtttgcgtatgggtcccactgtgttgcttaaattttaagctccaaaggggaaaaacaacctcttttaggaaaagcctttttttgtaaccggcccctaacctggttccaaagggtatttttggaaattcgcgttttaaagaaagaaaatcaccttagggaatgtgtgtgggggagggcttttttttggagatctttaattcccggcttt

SEQ ID NO: 130425 - DNA, 600 bp, Arabidopsis thaliana columbia
  unsure (1)..(600): unsure at all n locations
tttataaaacactctgactgcttgcacgccttccttaccctgggttcctttaaagcggccgcccttttttttttttttttaaaactattgtagtgttattacaactaaccccaagaataaaaaaaattcaagggggttttttgtttggaagttccactattcccctgtcattatatatttatgttataaataatttaaaagattaatatgggggaagatagaagtaatacaattagcagaataattacatgatatacctgtgttattttttttcataagaatttaccacatcaactttttttatttttcaacttttttaattaaggattgtttgaattcttattccttaataacactaccaccttattgcttgttcttttgcaagctttgaaatcttgcgggacatgtgagattttctttcttttttcgcgaacaagattcggcatggttttttatcatataaatcgttcgaccaaatgacattttgttgtattctccaaacatattgtaaataacatattttttatcncgatgatactctgatcgattatgcgttagtttatgcatgattgcttggagacacaatcacacccgtccacg

SEQ ID NO: 130426 - DNA, 375 bp, Arabidopsis thaliana columbia
  unsure (1)..(375): unsure at all n locations
ccactatgacgttgcatgcacgcgtacgtaagctgggttcctttaaacggccgcctttttttttttttttggattaaattgaattaatttggtttcctgaaattaccaccccattccggtngttggttttactaagggaaaaaaagggttaaggcccaattgtggttgaaaagcccatgaggcactttggacagttgcgggtttaaacggtacccaccgtgaaaacaacaggatggttcatttcactaacttatccactgacactcaaaaagtcctgcctaccacaagtgataagcgtgtcgacacatctaattccgccaatagccgggaacaatctgttatggggatggcatctacgtaattaaacggaaaaat

SEQ ID NO: 130427 - DNA, 713 bp, Arabidopsis thaliana columbia
cactatcgaacagctatgtcgtcgcatgcacgcgtacgtaagcttggatcctctagagcggccgcccttttttttttttttttttttttttttctcgtcaatcagaacattatttggtttcagagtttcgaaacatctgagttttttccatgagacaaaaacatggatccaagggtagtaatttaaacaaaacaatgaaaggtgaaacaaaagcctcatatagatcactaaggagtttcaattctgaaagagatgcaactggattctttaggctgaaacaacggcttgttgttttgcttccttctcttgcaagctctcatagtatttgacaagaacattccatccactcggacacataaatccatctggaggattctcccctgttcttgcataagttcgcatctttgttccagaaatgaaaagaaactcttttgcacgagaaggatcgaaaaacgccatcttcttctcgattgtatcgtaagctgcaaccctaaatggaagaatattgagtttctcaagtccaggggccatgcttaagactctctttccatgatcaggatcatatagatctctcttctcagtagggtggcccattcctgcaggatcacgacctacaatgtagaaattagcaccagcgttaatccttgccttggcgggccattgaacttcagttggaccagcatagtgcatcggtgacggaaagatcgagacaa

SEQ ID NO: 130428 - DNA, 414 bp, Arabidopsis thaliana columbia
  unsure (1)..(414): unsure at all n locations
cgtctctataaacacttgacgttgttgcacgcgtacgtaagcttggatcctctagagcggccgcccttttttttttttttttttaaaacggtcattatttcccgatacttgtttagattggaattaaccaagattcttccgtattcgattcagaataatagaaaaaccaaatctttttactgacattatcttttaaacatagaaaagtcactgaaaacaagaaaaaacaaaccctattcaaagggaaagacaacaanaaaaaaaagcaaagcaaggagatggggatttctttgattaagaggtctctcttacttttgatctttctttctttaggcccctcaaactgggtttgctttgtgaacccaccactttctttcttttccctggcaagtttgaacaggccttctttggggg

SEQ ID NO: 130429 - DNA, 507 bp, Arabidopsis thaliana columbia
atgagcacttgacgttcttgcacgcgtacttaagcttggttcctctagacggccgcccttttttttttttttttttttattgtaactggttcaatttcatccaaatttttttacacaattctttttactatatgaaatttacatttctttcacgaactttacttaacgttataattgtccaccaaaacactttagctatacaacgaattttaaatcacagccctaattgggttttattaacccctcctgtattggactgttaataattctcaacatgattttcgattgacaggagagaagttttgctttgtgaatttgctgctaaacaagttagcaccatacaacatttccggttgtccttggaccttatacttcttggttacagatcacactttgttacagcggatgccttagatcactgaattattcattaatgtgtattgtgcgtttgatttcctgttgttttctgtcatggaacccgattgccattgtgaagattgtccacca

SEQ ID NO: 130430 - DNA, 1122 bp, Arabidopsis thaliana columbia
  unsure (1)..(1122): unsure at all n locations
aagcttggatcctatagagcggccgcccttttttattaaaactttaaatttaaacaacccccacgcaaagaaagaaaacaggggggggggaggtccaaatccatctttatgagctcacaactacaaaacaatcatcagacttgaccccaacaaaattattcatacgcactataaaaacattcaacaaacaccatatacttgctttaacacacgggatttcgaacttggatccttaaaaaaaaattttaagaggactaacatgccgcttagaaaaaccatctgttggaaacccaaacgattttccactaattcctaacccttaacccactctttctttgtatgtgcctcccaatcccccaggagcgcggaaaactgagttgttttccccgacccctataaggcaacagatctcccctggggtcttatattaaaaccttaaactaatttttcacccttcgttgtttttggggtcacctaactccaaaaacttatttgcgaactattgcgtttttaaaaaccatagtttacacagttcactattttatacagttcccacgctataacaaaggttaaacacttccttgacaaactctttcttagccgctacagaggncaaaaccacacactcactgtttaacctctttaagagacttttcttaaaacgccttctatatgtcagaggacctcttctaagtgccctctttacataagaagaaatttcctggcactcacactattataccatatttatatccgaggcgctcttctatatctaaaggccccaacaccattatatttatagacgctcctaacaatacccctataaacggcttcttctatttattacaaaatatactgaaaaggcctatttcctccaataccgttaaatttgaaactggtacccttgtgttaaagggaaacccactctttaaacttttttggtagaacacacaacctttttcttaagacagggagccagcctttacaactcctccatttttccgcaataatttggagacattcacaagcctccaaaaaatgatttgtggctcaaaaaactggggaatttatggtgggaactatacgagagggctttaccaaaaaataacctaataagccaat

SEQ ID NO: 130431 - DNA, 1164 bp, Arabidopsis thaliana columbia
  unsure (1)..(1164): unsure at all n locations
gacgcctcctaagctggattcctctagagcggccgtcactaacatatacagttttgtaataccccccagccctagaaaaactgataggagtgagcattttcactttcaaacaataggtcctcaccttttaagtcggcaaaaaattttttacaatcgcgatgaccacatacaccactcacaaaaactattccagatgcgaaacatccttacaatattaaataaactatcgcccctagtttgtacaatgctgccaccaaaaatcaagcccctgacttcttctccaaaaagaacttttgttcccctggacaaacccgacatttctgccggcatatctcattccacccacccgcagcagaacccctcccgccttctcctctccaccccctgcatctcagaaacacagactcacaactacaggatgcgaacttatattctgcacacgaggcaagtgtaggtatcctctagccatctacttcacccctcggatgtatgttataaggtcttcattctcccaacacatatatctgtgtccaccaccgatataccctctgcggtcccccgatttctaatttaggatacaatctccccgcgtgataagattgtttcnccncacaaatatcctctaccctctcaaccccaataacaaacgtcaactttgtgccccccacccctcagctcgataaaccttcctccttatttcaggccatcaccctactacacacctttcccttcgcttgatcattctcacatcgcacccaatacgctcgctcccatcccgattttacatacaaagggtttgagtggcatagaatctaccactatctccgtgaccacctctcatctattcatcatgtatgcgcgcaagctatcaccttgtaggacaaaccccacttatgccacaccaagactttctgcttactcctaccacaaacacccacaaaccttaaagatactacgtaccgcacagaggcataaaccatcaatcctcttgctaccatctaactccacatatccagcgagtcgagtgactaatagccattcttcctcacagctttgcacggggaaatgcactccttcgattcgcctctttaaaaatacgtcccctagaatcaccaaatcagtcccacatatcgcgactcttcgctcgtaaaccacaacacccac

SEQ ID NO: 130432 - DNA, 271 bp, Arabidopsis thaliana columbia
aaaagagacgacacgcccaaaaaaaaaaacaaacgggaaagagcgaaccaggcaaagcaacgagcacaaagcaaagggacacagaacgaagaagaaaaaaaaacacaaaaacccaacaggaaaaaggacggagagaggagccccacagaaggcgcgaggaggaagacgcgaagagcacagagacaagaccacgagaaaaccggaaagaaccaacccggagaagaaggacacgcgaagccgcaccgaagcggaacaaaagaagaccacaaac

SEQ ID NO: 130433 - DNA, 416 bp, Arabidopsis thaliana columbia
  unsure (1)..(416): unsure at all n locations
tgtttgcacgcgttcctaaacttggattcttttaaacggcggcccttnttttttttttttttttttttttttaaatttcaatttttacctttttcaaaaaacattaacaccttggttttaaatttacttatacccaaaagttattaataggaaactataccaacaacaaagaattttttaaatataatttttttacatattttagtacttatagtcgtttaaattactcgttctttgatctctttttgaatctattaagatatttagttcatggttgattactcatttgacttgaatttttttcagtttgtgctttaattgacaaatctctttgactttagaagttttttctttatttcaacttaattgctagacacttttacccttgtgaattctgattacattccagattgatt

SEQ ID NO: 130434 - DNA, 590 bp, Arabidopsis thaliana columbia
cactatcaactcacactttttttgcacgcatacgtacgcttgggatgctttaaagcgggcggcccttccttttttttttgggtgtatcttttatttgaattaggacgaggttcttccactgaattggcaaatctataaaaaaccaaaaaatatccatgaaaaggaaaaaaacgaacaattttgaacactaaacctgtgacatgtggcacatgacacctacccgcgggactctatgatatacttttgactgcctcttattatctatgcacatatgcaagcttttcacgcattccatatgtatactgctgtgcttgcaaactgttatggcttgtaccgctacatccgattacctaaggatttactaccttataacgcttgtatattgcattctatatatcgctgatgaatagttgacaccttcggctggattatgaaactgttgtcaatgtaaacaatgaacccacagctggtaaagaggtctcaaaaaactacctttttgaattgggctcttgtaagaaaacttttcggaagatagcctatcgctgcataaggacttgaggtgatccttcaatactaacactttaaaactt

SEQ ID NO: 130435 - DNA, 696 bp, Arabidopsis thaliana columbia
cactatacaacagctatgtacgtcgcatgcacgcgtacgtaagcttggatcctctagagcggccgccctttttttttttttttttttttttttttttttttttttttttttttttttttggaaagaaaaatttctattattatgacttttcttttctagtttacacttcactaacgctaaggttaggttatttgttcttgctttgataaataagaacaaaagattttgaattataaatgcccccaaaacaaaaaaaaaaatcagaaagaaatttcttctctctatctatctaaaagatatgccattgttgtttctgttgttgttgttggcctcggagttggtacagtctttgttgtttacatcaaatctactccgaaaagttttcctttggttaaacttgcggaacagtttgatgatatgaagggatcttttgagtctgatgaagtttggttcttggggttccagtactcaactagtcgatggtttgggtcaagagcttcaatggcctgaactattgagggtgagaggaaaccaaacttttgaagcccgttgatactctcaaactggggtaaaataggaagaccaaaacttgttgatgtatttttaactctccgcatcaccatttcccagcattgttgggcaaagacattgaaaaagcttttcgttggagattcttccaaagtaacccttaacaat

SEQ ID NO: 130436 - DNA, 662 bp, Arabidopsis thaliana columbia
  unsure (1)..(662): unsure at all n locations
gggaggaggaagaaggggggcgcgcccacagaagaagacacccacatatttttcccgacaaccgcagcgagcgagcaaaacgccaacncgggaggcgggcgccgcagaaaaacaagcagagggcccccccccccagagagccaaaagaggggacccgacacacaacaaagaggggcgagaacccgcacccgcacaacgacaacaggagcagcgcaagggccccgaaaaacccccgccggcgcacagagaaccgcagcaaaaacccgcaggacacgaaggccagggcaccgcgcgaccgggcaaacagcgagggacgccaccaccggaccaaccaaggaggggagggaaggaaaaacgaaagacacaaaggcgcagaagacaaaaacgaccaacagcgcgaacaagcgcgagacaaccccggagaaaacaacaccaaggaaccccccccgtgaacggcacacaaacagagagacgaggacaccgcacaacgagacgagagggacggacaagagagaaggaaagagcgcaggacaagaccaacgacgacagcagagcgccgcgagcacacacccacgcgcggagccagaacaggacagacaacaccagacgaggccacgcacgcgcgcagccgacgcgcagaccacgcaccgcagacaggagaa

SEQ ID NO: 130437 - DNA, 1033 bp, Arabidopsis thaliana columbia
  unsure (1)..(1033): unsure at all n locations
gcatgcacgcctacgtaagcttggatcctctagagcggccgccctttttttaaannnattttgtttatttttctttacttttataaaatcaaatcaccttggatttaatttaatacaatatcgggccactcgcttgacctacaagcaagggctggtccaacaaaatttcccgcacctgcttaataactctatttcgcctcgcacaaaacaatgatcctaaaacgggagcacccaaagcttcttagctctgctatcaaaacgcaacccaccctcctgaacaaaaaaacgttattaactctctctatttgccctctcccttcctttgcctctctccatttcaaccgcccatctcgtcatcacgaaccaaaagaccccataccccttttccttccaaaaaggtacaaaagcgtaccctatttacctctacactctctcttatatgaagaaattcacaatctcccccatggtgtgacaacaatgcttcctctaccttggtgccatagagacaaatggtcgggaaaggagctggcattgtcctcgttatatcggagattgnnnnncatccttaatttaaatcctctttagtcctctctccagatcacctcttactcgactactcactcaccactacctattcttctcgccatatcgaaacccatctctttgtccttagcgcctgtatccatctcataatcaacagtttgcacaaaacaatatttattcattaaacatttctcattagctataatatcaaacacagggttctctttagcagcggcccctcccaaacctcataccttgtaagaccccacgtaacaataactctttcttattcaaaacctcctccctacctagcctccaacctgcatattgatcccgacctctgcaaacgcaaccaattctcctcctacaaggtcccaacacctccccctctctcttctggacgcccaaccaaccacgcctaacttcgtcttattttcactacacctacatcccattcaatatccccctcttctcttcttcctcctcccac

SEQ ID NO: 130438 - DNA, 410 bp, Arabidopsis thaliana columbia
  unsure (1)..(410): unsure at all n locations
tgacttcggttgcacgcatacgtacgctaggatcctctagagcggccgccccttttttttttttttttaagatttttaaaatgaacagagttctctcataatccaaggctttgcctttgatctggttacaaacatttcttatatatttccaccagaagaatgtatacccaaaacttataacaggtttggcattcccaagaaaanaatcccggaactntcaaaagccgaatttttccattaaaggccaacgaaagtttcaaaaccccaaccccaaccaagnaatggaaaaacccacnanaactttaattattaaccaagntntttttggccaatttccaaggaaanaaaaaaaaaaattttccttgggaattttccacaagnccgggggaaagtttttccaaatgggaaag

SEQ ID NO: 130439 - DNA, 940 bp, Arabidopsis thaliana columbia
  unsure (1)..(940): unsure at all n locations
gatgcacgcctacctaagcttggatcctctagagcggccgccctttnnttgattnntttttttttttttaaaagaaagggggagataaaattaacaaagcggacattttgagttacaaaccatattaaaagacacaacaaaggagacaaactttaacaaaaacaaaccattttaaacaaattctttaaaaactaagcttcagaaaaaggaaatggggagggaaatgataaaaaatggttcatcggataaatatgaatttactgggaaaggtgctcgacagcgggcaccaactgagccggttgaaccacgggccactcctccagtgtaccaacgtaaggggtaggaacgtcttgaaaaaataaacacatcaccggagcatctaagtagtcatgaaagttctcgttgatggcagctgtaagaactnnccccctctccaccgggttttttaacacttcctcaagaaaaaaaaaccaaggaggtttctttaccgagttttcaatttgtgtgaaaggtcgaacagggtttagaggaacctgatagtccaataaccctcggggggccataacccctttgtttcacccagaagatttttgcttgccctgcgatcaaacatggggtacccctccattttccgccaagttaaaattggaagggaatgggtaaattggggcctcccggcccaagggtcnnnnncacacaatattctaaagctattcatttaaacgggtgtaccaaaaagagttaatatttttatctccggggaagatttctccccctttggagaaatggagaaagacaagcacacgtggtgtcttaaacaaaaaaaataccaacgggcgtgtttcgccttttttttatatgacggcgtttttaaataaaacaccttttggggcgtttttcagcggaagtttgaaccaaagcacacccattttgggaaccc

SEQ ID NO: 130440 - DNA, 1056 bp, Arabidopsis thaliana columbia
  unsure (1)..(1056): unsure at all n locations
cgggagccnagaaaggggggcacaaacgaaaaaaagcaccataattttggagggggaccaccagaaacggcaaacagggggggggggcaggggaaaaaacaggggggggccccccccaggaaacaagaaccacggacgggaagaaagggccaagccaacgagaagcgagcgggaaagaacacggaacagggggcaaccccaacggggaagcacaaccaaaagggaaggccgaagggggaaggggggagggaaacggaagacaagacgggaggaacacgcacaagcgcgccccggagggagagggaaacgacgcgcagaacgcagccgcaggcacacggaacacacgaggcgcggagcagagaggagcagacaggaccgcgcacgcacgacaccagcaaagcggggaacggcggcagcgaaagagacagagcgacacagaacaccccacacgacaacacacccgggacaggagacacagacaaggcgcacaaagccaacgcagcgcacggaccccgcgggagcaaggcgggaaaaagggcggcggagggcagcgcgcacaaaagagggcgcgacgggcagaggcgcaaaggaaaaaaaggaaacagcaggagaagagagaggaacaaaagggaaacaggagcacacagaggaaacggaaacgacgagaggggcaaaaaccagagaaaaaacgagcgaggagagcggagaggcgcaacaaacagggacgcgagagagcgacaagccgaggacgagaaggcacacaagaggcgagggacgaagaacgcggagagcacccggagacaaccgggcccccagccgaagagagcgggcaggcgaacgaaaaaggggccagaaggggcaccgggggagagagcaacgggacggggggccgccgagaagcccacggagcaaagaaaccccggcaagagagcgggcgaaaaaggagcggacgggcgacggggccggaagccggcagaggggaggggaggcgcgagacagggaacaaaaaagcaaagcgacagagccggaaacacagaagagacagagaagaggagg

SEQ ID NO: 130441 - DNA, 572 bp, Arabidopsis thaliana columbia
gcatgcacgcgtacgcaagcttgcatcctagtaggagcggccgccctttttttttttttttttttttttgttcgatgaccgtgctgtggtggtgctcatgaactggtgaagcccttgcatctcgattatctctaggaagaagtctctcaccgtgtgcgtcaatgttgttgcaattgacgatgaactaccggttgttacgcctgagcttgagctcggagccataaccgacgtcgctcttgatagatcctaaccgctcacgtctgaaacggatacaaagccgctgcttggaacaacttgttaaggaggtggtctagccatcgtggaagcctgttgaacagcggccacgtaagacgacggcgaatcagcggcggcgggaaaagctaataactgaagctgattcgacggaccagcgatttgtggatatcaataagaaagctccgaccgtcggaatcttcgcatttgatgggaaaacccacatctggtacattccttgcagcagaaattgcttacccacagtggatgatgccagagcttgcggagggttggatcgttgtcctcctggcaaattggag

SEQ ID NO: 130442 - DNA, 991 bp, Arabidopsis thaliana columbia
  unsure (1)..(991): unsure at all n locations
caaaaaaaaaaacaaagtttttcaaaaaacaaagaaagaaacgcanagaggggggaacaagaaaaagggggaggacccccccaaaaaaaaaggaggaaaaaaaaaaagaagaaaacaaaaaaaaaaaagaaccaagaaggaaaagcacacaccaaaaaaaccgacagacaacacaaaaaaaaaacaaaccaccaaaacaagaacagaaaaggaaggggaaacacccaacaacccaagacgaaaaaaaaaacacagaaggaaaaaaaacccagggcccaagaggaaaaaaaaaagaccccgccaaacaaggcaagaaaaagggccaaagacccaagggaaaaaacagagacaaacccccaaacccaaacacaaaacaaaaaaaggggcgggaacccaaaaaaacaaaaggccccccgacaccctctccccaaaaaagaaaaaaccacaggaaccggaggggcaggcaaaaccaaggacgagagcaccaaacgcagaaaaaccgcaacgataaaagagggggggaccaacccaacaatacctacaaaaaggggcccaaagaaaccccccaaaaacccacatcccccggcaaaaagagacgtctccccaaaaaaaaagacnngngccaaaaaaaaaccacgacgaaancaaacagcaagaccggaaccaccaaaaaacaagcaaaaactccgccagagaacgccaaaacaaacaagcagccagaaaaacaaagcgggaacgcccaaaaagagcagacacaccaaacaagggaggaaaaaaaacaaccaccacccaggaaaaaaaagcccnggggggaaaaaaaaccccgggagcccccaaaacagaggggcgcccccaagggcaaccacacaacaaagcaaaaggccccaaaaagaaaccaaaaacccaaagcacaacacggcagaacaaaaaacaacagaaaaagaacacaggaaaacagaaacggaacaaccaaaacaacaccgaacaaacc

SEQ ID NO: 130443 - DNA, 575 bp, Arabidopsis thaliana columbia
  unsure (1)..(575): unsure at all n locations
aacccttttaaaggtagcataagctggagctccaccgcggtggcggtcgctctagaactgaggctcccccgctctgcatgtaattcgcggccgcaaacaatgctacatcagagtggttggttgcaaatccttcaacaacatcttctgttcccgtctcaataagcgttcctcttgttaaccaaggttccaattatttcttctcggcaaactatgatggctaactatgtaaattcagactgtattttatgatcaatgtaacacatggccagggcttaccagattcatcatcaccagatgatgctgttgcacctggacctaccgaatcctctcaatccggtgatgacgaagttagctcctgataccactcgatccggacaatgcggacgtnnnnnnnnnnnnnnnnnnnnnnnnnnnnnnnnnnnnnnnnnnnnnnnnnnnnnnnnnnnnnnnnnnnnnnnnnnnnnnnnnnnnnnnnnnnnnnnnnnnnnnnnnnnnnnnnnnnnnnnnnnnnnnnnnnnnnnnnnnnnnnnnnnnnncggctttggaggggacaattcccccactttttggcccca

SEQ ID NO: 130444 - DNA, 550 bp, Arabidopsis thaliana columbia
gccaaaacccttttaaagttatcaaaacctggagctccaccgcggtggcggccgctctagaactagtggatcccccggtttgcattttattcgcggccgccaattacagtgattcagcataactgattttcagaatgactagcctacacatcatttaacacaacacagtacgagatacataaatagggttcatagaattggggagaaagtttctgactttttgaaagatttgagaaagctaatttaaagctagccgtatggaccgatcttaagaggctcttgaggacctcttttactcggaagaacatctccggtagagttctcactaacatatgtaagcatagagcctcctccataaatcaaagattcgagaagtatatcctgtatttgcgtaaaggcagcagctccatggactttaaaaatgaacctcagctccttgaaatgtgtggatttattcacgtggcgtaaagggtctcccccttcattgagtcctccattatccacacatttccccccatttttgattccccttggtactggcgggttttac

SEQ ID NO: 130445 - DNA, 759 bp, Arabidopsis thaliana columbia
aaaggttatacaatacgcctggtagtctaccactcgctggatggcaggaccgcatctagtaacatagtggtatccccccgtttttgcagtgtaattcgcggcacgcgccaaactaccactaacgaggactggtgtggttgtacttaacagtgataacagaacattgactcgattatttaaatcgatgaacacaagtataaactagataaagaagcatcaagtgctatactttagtctcttgtcctgagcccttataagatagcctatttcgtgcgtaaagatgaacaatatctatcgcgaataactgatacaatcatctcaataaccacttcatacactagagacttcattcgttagagagttccatttattcgcttggatacagcgtcttattgaccaacctatcggatttctcggacaaattagaatctttgtgatgctgaggaacgtaccctactattgaccgaagagaccgaatatgggtcattgtctcttgttatcagcctagactccagatactctgatctgatgcactatatgcgggggtccaaccagctggtgactcatcgattgatcgatcgttgtcgaatattttgttcgtcttgaactacaaggaggaccatcctcttttgcggggccatccgagctggaataatacggaattggtaccacgattttagtgtattctcaggattacgtccactatccccatatggccgcgtacatatgtgccctaagtgactttcgaaattccctcta

SEQ ID NO: 130446 - DNA, 842 bp, Arabidopsis thaliana columbia
  unsure (1)..(842): unsure at all n locations
aaaaccccccccaagtttctaaaaccggggccccccccccgggggggggggcggcttcctgtaacacagaagggggaccccccgggtctgggaagtaaatttttccgcggccgcgctttttggaagaataaacccacagaccccccaaaagggtgtttcccactcttccacaccacaaaaacacgtgggggcgccnccaaaaaaaaaattttctcttctcttcctgtggggaccctcaccccacccaaaaggaagaattttccaggaagacaatttttctcttcttatatttaatcctggaggaagaaaaaaataaaaaacaattttttccggaacggcccaaaaaacaaaaaaaagaaaacactttttttgggtaagaaattttgaagatgaatttttccccttggaataatggacgggaggcccgggggctacatatggcagcaccagaacacaacaaggtcgggctcttaaatatcaaaccactgggggccctcttaaggtcacgcaacaattcttgggggaacccaacgccccactcgaagcaagaaccaccggtcgatcattccacctaaagtctcaatccaagggtcaacccgcggaagaaacctcgtaccgggtcacagaattcacaaggtaaccacatacacagactttttccctaatccttccaaattcccacccaaaactttttttaaaaaggggggaccggtcgggttttttgggggtctttccaccggggccaaatataaccttccaacccaatgggcccggggcccccaaaagccttccgggcggaaagccttcccgggaactcggggtcttcccccccaataaggccc

SEQ ID NO: 130447 - DNA, 810 bp, Arabidopsis thaliana columbia
  unsure (1)..(810): unsure at all n locations
attgaaattcatttgcactgacannnnnnnnnnnnnnnnnnnnnnnnnnnnnnnnnnnnnnnnnnnnnnnnnnnnnnnnnnnnnnnnnnnnnnnnnnnnnnnnnnnnnnnnncggccgcgcaaactacaagaaccaaactttaagttgcactaacaagtaacaaataagaccgttttttaaatgatgaaacaagaaaaactaaaaaaaaacattagtctctctttctctctgtctgagtcttaaaaatgcataagctgctaaagagaacaaacaaagcgaaaacgagacaacatccaacaacatacatcacagagcttcttctaatgttttctttttcctgcaacactcttttgtaaacgattgaatagggaagagagatcttggatgttggttttacctatatgattcaggacgttttggtttgctctgtatcacttgctcaatcttgtccagaacaataggggtcaacaatgggatcacatcaacagctttcatattttcttgaatctgtgactcccttgtgggaccagtgattacagatgacacattatggatttggaagcaccacccatgcgaattggcaaggctggagccccaagggttacacccctaggcttcattttggccaatgggggttttgaaagaaccgggttaaactttttcctttaaacaaccggttaattcccaacaaaggtggaattcctatatggggccaagggggttttttggtttagtttccttccaaaatgcacaaatattcgggcctggttcttggaaggggaaaattaagcctcccccttgggtgggga

SEQ ID NO: 130448 - DNA, 495 bp, Arabidopsis thaliana columbia
aaaccaattaggggtaagcatagaagctgctgctggaccgggtggggggatcgtcgtataacatccaggcgcccgctttctgcattaattcgcggccgccaaagctgtatctctctgacatgcaaggccaaggatctgaccggaagctgtcactggaacttataacaatcatgcagcctgggatgctaaactcgaggatgggaccatggaatcaccaagtgtcctttcaaccgaagagcttcatgtgggtgtcagtgattcccggctggcaccattgatgagcgaccacaccttgtgcccatcaagaatcttaggactcatgatcaacccgaggccgtttttttactcggggattgatactccgatatagttccccacagtttcgccagtgtttcgaggggtcaccaggttggtcttcgtaagaacggcgtggtacctgggcgttaacaacccaacttgtgcttccaaaggaaggtgacctgggtattgcaattg

SEQ ID NO: 130449 - DNA, 844 bp, Arabidopsis thaliana columbia
agggaaagcggcccgccgcagcaccggccggaaacccggaacgaccagcgccgattttactttaaaacggacagaacgaaccgagggcgggggacaccaaaaaggcgcccccccaaccaaacagaagaaagcagcaacaggaacagcccggacaaaaaaagacatcagacacaccgccaaagaaaccagaacgcacgagcgaaaaagacgcacagaaacacaaaacaaacgaaaccaagaggacaaaacaacaagacggccaagcaaagaacacaggcgccaaaaacaaccaaaagaaaaagaacgaagccaaaaacacacgacgacaaaaacgaaaacaagcacaagaacaccaacccggccaccccggcacaaacaacagacaaaggcccaacaggcccctcacacaacaacggaccaccagggaacactccacgcagggggaacaacccaaggacaatccccgaagcaatcgcagtcccacatgaacacaaaacaaccgagcaaggccgaccaaacaaagcgagaaacaccggacgtccacacggggaaacggacaacaacaaactggggaacaccaaaaaaaaaaacaacataacgacgaccacgagcggcaacaaggctaaaaaacaaaacacgagaacggagagactccccggccacacacaaagaacccagccaagaaaaaaaaccgcagaacggaaacagatgcacaaaaaaaccacccgaccccggaaacggacgaaagtacaaagaaaacccaccccacccaggggccccccaacaaccaacagcaaaacagaaccgggagcgcgacgacaaccacaccggaaaacgaaaaaaa

SEQ ID NO: 130450 - DNA, 682 bp, Arabidopsis thaliana columbia
gggataaagtatatctcgcagtgagctctgttcacctcgcaagaaccgggcactttttttttattacctgttaaactggacaaaggtaggaacatgcacgtgtacaaataaattaccaaagagggggtgtggatgaagttttacataggggtataacataacacacaagtgggagtcttgtttccaccgtctacagattcaatatggcttgagctattcaaaaactaggaaacgtgttaataataattacttactaaatcaatatggacgagttcaaaaggtaggcatatcgatatgcctatagtgaagttcaaaacgaagcggtttgagcacgcccttcattggtattttcaaagatcgaaagttaatcccgagccaacaaaaaaaatggaactacgaatagggccgtgaacgcaatgagatgtataaaccatacaattggggattatatttttatattatccaaaaataccattataagctaatgttatagcgtgtgagcactacaaatcgttaatccctgtatgagagaacacgtatgataatcttaaacagttcatggggaaaataatgtgaattgaaatataataaaagaaattggctacttccttacaattgtctttatgggtgaaattgaaatctatgtggagacaactccggggattatataaccttatcataa

SEQ ID NO: 130451 - DNA, 749 bp, Arabidopsis thaliana columbia
  unsure (1)..(749): unsure at all n locations
tgacannnnnnnnnnnnnnnnnnnnnnnnnnnnnnnnnnnnnnnnnnnnnnnnnnnnnnnnnnnnnnnnnnnnnnnnnnnnnnnnnnnnnnnnncggccgcccgaaatgtcattggaagagaaatgaaatttaccttgtggtttgaccctactcaagattttcaccattacgcaattttgtggaaccctaaccaaattgtattctttgtagacgatgtaccgatacgtacatataatagaaagaatgaagctatattccccacaagaccgatgtgggtttacggatcgatatgggatgcatcggactgggccacagaaaatggaaggatcaaagccgactatcgataccaaccatttgtggctaagtacaaaaactttaagctagcgggatgcacagcggatagctctagctcatgcagaccgtcatcgcctgcacccatgcgcaaccgcgggttgagccggcagcagatggcggcattgacatgggccaccagagaactttcttggtctataactattgccatgatcccgaaagagaccataccccaacacccgtatgttaatacaacatacaaagaaagggttatatattttatttttgattatcaacatacatgaataattgaggtcttggacnggccacactgaaactatattgagcagtgagcgtcggtccttatgattgagataaaaagaaaggtttggtttaatacttgaatgttccatttgatcttctataatgaatatgg

SEQ ID NO: 130452 - DNA, 849 bp, Arabidopsis thaliana columbia
  unsure (1)..(849): unsure at all n locations
nnnnnnnnnnnnnnnnnnnnnnnnnnnnnnnnnnnnnnnnnnnnnnnnnnnnnnnnnnnnnnnnnnnnnnnnnnnnnnnnnnnnnnnnnnncggccgctggatacagaacaatttagtatgtacactgaggaaattggttgttgaaaaagaatgaaaatttgcagactttttttactgtctatatagagtcagaggagaagatcataagaacataaagtgttttgagaaaagaaatggcaagagttcaaataagataatataacatgtaaattatgtttttttgcctttgcaaggcctccggacaaagtctcagggagcttcaaatgtctctcccgctttcgtatcgcctttttcctcttctttcccgcgaggtttcaactctatacttcataagaaccggggctttcgatcagcaggcttaagaatttggaaagagcacattaaactttcattaacactcatcatagcaccagcattgtcaaattcaccacagttgttgggagcagaaaaatatcgtttcaaggctgtcttatcggggaaaaaaacttaatatttcattcctttttacaaaccttgggtgggaccccgggccagaattaaagaaacccaataattcaattttctttttaatataggaaaaaaccttcccggggggaatttttttgtctcaagggggcccccaaaacccgtggttttatagaaaataacctttcccccacggggtctaatttttccatttacccccccccacaaaaccctttttttggaacaattactttttgggccttgtggggagatccaggcaacccccaaaaagggccgtaatttcacccaagatgtccaaaaac

SEQ ID NO: 130453 - DNA, 932 bp, Arabidopsis thaliana columbia
acgactcactatagggatagctggcacgcctgcaggtaccggtccggaattcctgtatacgacaccacgcgtccgctttctgcattaattcgcggccgcataaccaaactttatggacctgagtgaacctcagatagacccttcaacctactgcagagtatagaccgatgctgaacacatggatcattcgcaagctgaaatgatgggtcctgaacagagtccgtataaaagcggctagtttctcaatgccattcactaccctccgttctatcaatccctacgaccacaggttgtatttaggacaaaagtgtatcaacctactaccaccaacaacggaagcatttgccttgacaccctgcacgaacaaaggatcccgtgcctgacaataacctagtagaggctctctatatgaaacatgactccataggcaaaatcgagatgacacctcgttaccagttattgtgcagcggtacaagaccgacagagcaaaatacgccgcttcttcatgacaactggttctgaggaactatagccatgggtctcaaaaaaaaagatttgttattgcttgaagccacccatggttcttatagtacccccaatggcccttgattttgattctcctatggttgaccttgggtatttccaaaccgtattaaaattgaaataaatggcggggtaaacaaatcgcttcaacaccctttttgtattacccttggtacccctaatcaataacttggttttaaacggggggtttctccaaaccaattcaaattaaacaccctttttattggtgggaaatgtcccaagcttaaaaaaacataacgggtctttgtccaccgctctttatgaatggtttttcacagggcctgttccttttcaaggggatttcccattccgaaacggttaaacaaatttgcttttttataaagggg

SEQ ID NO: 130454 - DNA, 531 bp, Arabidopsis thaliana columbia
tataggcatatctggttctcctgcacgtaccggtccggaattgccggtcaaactaaagctcccggagcccgcttgtattttttttccccggacgcactctgaaacataaagggcgaacgtcatggatatattgatcaccacgcagtgatcggccaaatttcagagcatacaaacgattctcggatcacagacacactcgttagctataaaagttattagacttcaaacacatgctacttgtctaggataggttcgtaagttccagaatgcaactctcactttctaccatctcaatacctttactatttctatcgtctggtttctcagtctttatctgtactaatcattctcttattgcctctcttatgtttgtcttataaacccatctaacgctgggaatctttacttatcgtcactggccaggatactttatccctgtctgaaacacgactacggtctcatagttctaacaagataggatgctctagtcaaccacatcaatcaatcttctagttcttgtgagacattatc

SEQ ID NO: 130455 - DNA, 804 bp, Arabidopsis thaliana columbia
  unsure (1)..(804): unsure at all n locations
annnnnnnnnnnnnnnnnnnnnnnnnnnnnnnnnnnnnnnnnnnnnnnnnnnnnnnnnnnnnnnnnnnnnnnnnnnnnnnnnnnnnnnnncggccgcctcccgatctgtcgccgccgcatcttccaaatcggtgacgactcgtgccttttcaacggaacttccatcgacgctcgattccactttcgtcgaggcatggaagaaagtcgcaccgaatatggacccaccgcagactccttctgctttcatgaaacctcgtccttccactccttcttctatcccgacgaagctcaccgtcaattttgtcctcccttacacatctgagcttaccgggaaagaggtcgacatggtcatcattcccgcatcaacaggacaaatgggtgtcttgcccggacacgttccaacaattgctgagctaaaacctggcatcatgtcccgccatgaaggcactgacgtgaaaaaatacttcttgagcagtgggtttgcatttctccacgcaaattccgtcgctgacataatcgcggtggaaagctgtgccgttgaccacattgcccctaccaagttcaaaagggttagctgagttccacagaaacttggttttgcccaacagattttggaaaacaaggcccagattggtggtggaagtcacagggcattaacgccagtttttttgggcctaaaaagaagggttccctttcttttaatttcctccggagggaaacccaaaaaaaaaaaactctaaatccctttggggcttttttccaaggggaaatatagtggaagaggcccccctttttttacctaac

SEQ ID NO: 130456 - DNA, 889 bp, Arabidopsis thaliana columbia
  unsure (1)..(889): unsure at all n locations
nnnnnnnnnnnnnnnnnnnnnnnnnnnnnnnnnnnnnnnnnnnnnnnnnnnnnnnnnnnnnnnnnnnnnnnnnnnnnnnnnnnnnnnnnncggccgcttcaattctctcccttctctctcttctctttcttcttcttcttcctcgcgccttcttcaatctccgtctttcgcttctccagttttgagccttaaacccaacgctgtcgagtccaagaacagagtctctctcagtgcttacagcttgaactctagccatggaagaattgtggtgaaggcggctgcttctggcgtggacggggctgagcctgagagcaaggaggaaccaaagactgttgttgctgctggtccagtggataaactaccgttggaatcgaaagaagctaaagagaaactgctcttgaaatgaggctgaagatgaagctggccaaaaagattatgctacgcatgaaaccgcttggttcgtaggcgttagaagaggaaagaaggggtcgagggccccctttcccggatggaagaaaaaccagaatggcctaagtgacctcacccggttggctggcttttccgaaattccgtttttttggaaaatggcccctttttggggggggtcaaaaggcccccctttaaatgggtacccttccaaaaatggccaaacccatttgggtttttttggcggggcccccgaaaaaatttccgcgggcgccggccccagggggttttaaagccttcccaggggaaacagggggctgaaagnaaaaaaaaagcaaggcaggcgacaggggtggcacaaaaaagagtggaacgggcccagggccctttcggaggggatgttcccttttttcccggggaaaccctccaaccaagaaatatgccaaagggctctttgtggaaa

SEQ ID NO: 130457 - DNA, 778 bp, Arabidopsis thaliana columbia
  unsure (1)..(778): unsure at all n locations
nnnnnnnnnnnnnnnnnnnnnnnnnnnnnnnnnnnnnnnnnnnnnnnnnnnnnnnnnnnnnnnnnnnccacgcgtccgctctcccgcaaccttcgattttcgtttattcgcatccatcggagagagaaaacaatcaataagcgaccatgttggtgtaccaagatcttctcaccggtgatgagcttctgtctgactctttcccttacaaggagattgagaatggaatcctctgggaagtagaaggaaagtgggttactgtgggagctgtagatgttaacattggtgccaatccatctgctgaagaaggtggtgaggatgaaggtgttgatgactctgctcaaaaggttgttgacattgtcgacccacgcgtccgtctcaataccctcctggggcttatcctcctccctccgcttacccaaagtgatcactctttgcctgttttctctcccgattggaaaattttatttcatcttttttaatgctgcctggttcgggccagaaatggaacgttcgttgatggttttgaggtcgtggtttgtttgagattttgacctcgcatgttggtggttgtttttcggaaaccgcccttctgggacctaaaagatttcattgacttttttccttttcctttttaaattcctttctttttctcgaaaaaaaaaaaaaaaggggcgggccggttcttaaaggaatccaagctttacggtcccctttccttggcaaggcaatagcttttttatttggggccacctaaatcaaattaacggcccggggttta

SEQ ID NO: 130458 - DNA, 786 bp, Arabidopsis thaliana columbia
aaaagttgcagctccagcgcgcggcggccgctctagaactagtggatcccccgggctgcaggaattcgcttccgcatccgtttactgaagctgcattcttattataggagtctgatgacatattccacactccacaacagtttttgtaactaattgtaacgttgatactttgtcaaactcttgaacacatgatcatgatggtgcgccattgttatcgttcatctcagcttaacacaatccttggtatatcagttgcattccaaaggattcttcttggaaccttcttgactctacattcgctcgtaaacaagtttctcacacttgatgagcatatctgttgggagccaagctggtgcggtggggataccaacccatccaacaagtgcatactctcctgtctcaaagacacgaaagtccaagacctcgccgcgatcttcgtatatgttatcaaatcctttgtaaaaaaggaggatgtcccaacttgataaagtaaattgaatgccttgttggaaggtaactttcttttttttttcccaacaccgaaaccaaatttgggggcccctttctttcaatttgaagttaaaaacccgggattttctttggggggaaggggtctctttagggggggttttttggggtttggccaacctctgggtggaatggcttttccccccattcaaaaacctttggccccctgtggtggcccccgggtatccctcctttatctcttgcccttactggctttttgaccctgggaaaatttgaagggaaagaagaatcctattg

SEQ ID NO: 130459 - DNA, 1498 bp, Arabidopsis thaliana columbia
ccagccgcgaaacgtgtacgccaggcagaatctcagcagcacgaaacccatcaagacgaacaccacccgcgcttatccctctcttccaaccacccgagacccccgacacccattgacactcaacacccgatacatcctctctccacccacccacccatgcgacaaacttgaaactccactgcccactggccaagaacccactttggggttttgggggccccgctagcccgacaccggacccgagaatatccggggaacgccccacggcggtacggtttttttactttttcttgaagagaaacacgacccacaccccatacctgccgcgcagcgggcgatcccaccacccatcggtaaagcgcggacacaaccccctcccagcacaacaggcaccccgcaccccctgtacccaggcaaggcaacacccacaacacaccaaaagcgcaccgagcccctctaggaacccccatgcacaggcgaccagagcttacatcactcccgcaccttccacacgcgaaccctttggaccctacctgccctcacagcgtcccccgctacaagaactctcgcaccgccatcccgagggactacctcacatctactaacgagcaacttacctcatcaccagaatacgctgccgcgcggcccagaacaacacccattaccggctctggcccaaagggcaagacagctatactcagccgcaacatccatatgtcgcacgaccagacgcagagcgagacgcatttccctcattaaccacgagccgcaccatgacgacgctcacccatacacccgcactacgaccgacaaactacctaacacgcctcgtcccacagcagacacaatctacgaccagccaacaccccacgtaagaccacaacagggcgcacgatgaaagctactagtgcaaccagcgcgcgctaagtacaactcgcggacatcgatacacatctacaccagccctatgacaaccaccactagatctatcacccacacgcgcaataacaccacccatcactactcccgactcacgacgccagtcacgcagaatctctcgtaccacgcagcagaccgatctccgagcgtgacgacgcagacgcaccatatatcacctagcgtcccgtaggttcatcgacgcccacatacacacgacctacgatctcgctccagcaccactcacacacgcacgatcaccgccgctgcactgtcgtccacgacggccaccgtaccacagtcctacgcgtctggtccaacaatgcccctcatgtaccacctcccatgatacgccgtgctacacaacatcccaccattatctcacacacgcgcggtccaagacacccccacttaccatgctggcacatgcgcagcaccgcagcactccgcagcaccagctacattaccctcccctaacgaggctcgcaatgcccacccatctgcatgtcgtccactcctcaagtctctaccatgcaccaccacgctcgccacacctcctaac

SEQ ID NO: 130460 - DNA, 610 bp, Arabidopsis thaliana columbia
ggcacgcacacctcctcatatagcccgcccacacagggggggtgcgttgggacgcacaccacctaccaccacccagccacccctgacccaactaccccaacaatcccagacgtagtcaccactcggaacacaaaccagaagccccgcccaaaaaccaagggtcacatcaatgggaacacatccatctacaaagtgcgacacaacccgccggtggaccaacacccgcccgaaaggcgagagacccgcccccacgaggccagagctgagctacaaccacacatcgcaccccctcacacgagccagacacaggagcgacgacacccccgccacagcttagcctcccgaacacgaacacagagcagaacgatcagccaccacgccacataagccccacgcagactcgcaccagccgaacacggacacagaaaagccccacccaaccagacaacgacacccacgatgacccctacgcacaccaaacacgccaacatcaaccgtacgacgacgtaggctagacagacgaccgcactagaccgacagcccgcgcgcaatatcaacaccactcccagcctgtcgcaactaccatccccatccagatagtccgccgcaa

SEQ ID NO: 130461 - DNA, 606 bp, Arabidopsis thaliana columbia
cccggggccccggcggggctggcggagcagcccgggaaataagcgggagccccccgggtctgctagtttactcgacggaccgaggcaagacaaccaaaacccggcccgggggagaccaaagaggaccagcgaaagccccagagcccggacaaaggggaaacacacagagaacgcgaacagcgaacaaagaaacggggaccgaggagaaagaggcgcacacgaaaaaggggggggcgcaacaaccgaccaaacccagacgggacgaaccggggacacccgggaaagttcacaagagacagaacaaaaaagcgaacaaccgcgaaagaggaaagaaaaacaaacacacgccccgggacaagacaaacagggaaacaacacgacggagggaagggaagaaacaaaccccgccgaatccaccaaggaaagccacgggaacaaaacaggagagcgcaaccacaacacagaaacggcagccccgaatggcggaaccggtggacacaggaagccgcacacaacaggggatacgagcggggcaatcacgcaaaacaccaccgcgagctggaaccacggaaaaacaaagcagaccacgccgggagacaaaagaat

SEQ ID NO: 130462 - DNA, 789 bp, Arabidopsis thaliana columbia
cttgtcaatatgcgttgctggttcgcctgcaggtaccggtccggaattcccgggtcgacccacgtgtccgcgcccatttttctatcttcgcctccatcggcggtgacggaaagtctatcgagatccgtaacttccttggcgagaagaaggtgaggaaggtagagatgttggatggtgtaaccattgttcgatctgagaaggtgaaggatgagattgttcttgacggtaacgacatcgagcttgtttcaaggtcatgcgctttgatcaaccagaaatgtcacgtgaagaagaaggatatcaggaagtttcttgatggtatctatgttagcgagaaaagcaagatcgtagaggaagaatgaatgcccatatcatcgtcttagctcctattttttgtcttttgaatgctagattcgttttatggaccaaatccaccggtgttgcaaaactttggctatcccttgttccctttttgtgttcgagattttatttacttatggcccaggttttggagaccagctataatttctcacctttggcttaattaaaatcttaggagcggcataaactttgtcatgggaaggttttaactgggtgtcaagaattaaaatgtggtgccttgcgtatacaggaccccattctttttgtgtcccccttaattataaatattactgggcccttctttttttacaaccgttaatgacacttggggaaaaaaccccttgtggcgttttactcccaaccttttaaatttgtccccttggcacaggaaaaaattttctcccctttttt

SEQ ID NO: 130463 - DNA, 817 bp, Arabidopsis thaliana columbia
aggaaaaaatagggaataatataataaaaaatatatgttcaagatattatatgtgtggagaagtggaggttattaattataacaaaatgggaacatgagatagtttgtgtagtggaaatagaaaaagtttttcgtggtgaataagaaaggaaggaataatatattagtgtgtgaatgtattgataataggataagtgaaaaataaaaaagaatagtgtggaggtgtagaaaattataagaaaaggtgataagagagtaaagatggaaaaaaggttagatgggagatttgaaagattatgtgttaaaaaaagtctgggtgagggaaatatgaaatggagggtgaaaaattatggtttttatttatgagagataagattatataggggggttgtgggaagattaagtgtttaaatatagggggaaagagtattaatagagagtgtttttaagatagaaaagaagaaattcaataaattatgattggtttagggaaaggaaggaaattaaattgaggaggttgtaatgtaggggaggggtattaataaaaaaaatgagagagtttaaatgatggtagagggaaaaaataagattgggaggtaggttatgataaatgggctcttgtagtgaataatggaagataaagatagtaggtgggtagttgtatgattgaagaagcatgaaagtagtaatgttataatggtggaggtgtgtgggtatgtatattttaaaaacgaagaagttatgtattatagtagagggtaagcatgtaaggacgatgattggagtatatggttaggatatatagagaaggtgtgtg

SEQ ID NO: 130464 - DNA, 401 bp, Arabidopsis thaliana columbia
ttggccaaagaggccattaggggatagggggcacggcccgccgggccggaccggaaaacccggggggcccaagcgagcgaactaaaccatttttacaaggggggcaaaaaaacaaaacgggcgagggggaggcccagcaaaaaaaaaagctccaaaaccccatagggcacacaccacagacgcaggcacgggagagcaggacccacccacggaggcgggggggatgccaacggcacaagaccccaccccaacaaaatacccagacaacatataagacgggggcgagcgagcaaccaacacccaggacgggaaacggggccagcgccacaagaaaaccccgggaccggggacacaagaatcagaagagccaaggacaacagcggacgggagcccccacaaaa

SEQ ID NO: 130465 - DNA, 404 bp, Arabidopsis thaliana columbia
agccagcccgccaggaaggaggcagacgcagagcgagaaccagcacccactacgagacaagcaagagaaaacgcacagcgacgcagcagagagcgcacaagcgacacgagacacaacacgcccacccccagagaggagaaagtggaaatcgatggccattgcaaaaagcctttgagattgggacaaacacccaacaccaacgataacaggaaaaacgccgcctctgcctttcagaacaggaaacagagacggaggggggagccaaacccgagcgcaagggcagccacgagcaagaacaacgatcagaagagcaaagggggcagcgacacaccccaatcgaaacagaggcgaccacaccgacgaaagacgacgcacgcgcgggcgagacacgatgggcgcgcaca

SEQ ID NO: 130466 - DNA, 528 bp, Arabidopsis thaliana columbia
aatatctggagccccaccgccgcggcggccgctctagaactagtggatcccccgggctgcattttttcttttttcgcagactatatgcccccccaaccgctgctccgagtctattcgaaccatagtcctccatggaacccatctctctctgactctcgacgaacccttctttgttcggaccaacaatacgagatccgccacattgcctaactgctctccctccttaaccggcaatgacagctactgcatagctccaaaatgctgcacaaatgggttccacgggatcaggaggctcgttgcttcgcgggccaggcatagtttaaacacttctcatcttggacccagcaatcatgagcattgtattagctcctggccttggacttggaccaccttggtaccaccggcgggtagccggatcggggtcttaaaagagccccatggtggggaaacttcatcggtcggcttgggtccgaaaaccataccgaccacctcagaactttttctttgggggattcaagggtaaaaatt

SEQ ID NO: 130467 - DNA, 552 bp, Arabidopsis thaliana columbia
acaaccaaaccaggggggaagaaaaaccccaaaacaaaccaggccacacaagcagccaaccacgaaacaaaccccccaccccacacaagaccacacaagcggccccccgaaaccaagaagaccacacacaacccgggacaggccaccaaaacgaaaacaaaaggggcccacaccgaaacccgggaaaaaacaaggcagccgagaaggcacccaaccaaccacagggaaagcggcccccagaggagccaagaaagacacaaaaacagcaccagaaaaaaacaggacccaggcaccaaggggaaccacgcgacgcgaccaaaaagaccctccggaaaggagagcaaaccgagacaacaacggacagcccagacacgcaacacgacagcggagaaagcaccaaacagacgacagacacaagaagcggaaaacccaaggaccaaacccgaacaacacgcacaggaccagcccacaaaccgacaccaaagacaagccccagcaaccacagaaaaacacacgcacgccaaaaaacgagacaccaaacaaagcgggacg

SEQ ID NO: 130468 - DNA, 800 bp, Arabidopsis thaliana columbia
cttacacttctcactatagcgaaagctggtacgcctgcaggtaccggtccggaattcccgggtcgacccacgcgtccggactgcgttgcagcggtacaactcggtgaaggaagttacattcctcaggtgaattctgctatggatagattagaagctttggtcagtttcgtaaatcaggctgatcacttgagacatgaaacattgcaacaaatgtatcggatattgacaacgcgacaagcggctcgaggattattagctcttggtgagtattttcaacggcttagagccttgagctcaagttgggcaactcgacatcgtgaaccaacgtaggtttgagttattttgtaacaaccaaatgaagaaaatggaaagacctcaaaaaatgaagaatgagtgcatctgaaaacagaggactactctgaataaatagaggggttgctgctgatatttatttttactctgcggcggaattagaaaatttgaaaaacatcatgtattgataagttgtaaatatcagaaaaaggtgggggtgcaaaaatttgtactttttagcttttgaagaggcaagttttcgaatgttggttgatttgtaaaaaaaaaaaaagggcgggcgctctagagaaccaagcttacgtacgcgtgcatgcaacgtcataacttctctattagtgcaccctaaatcaaattcacttgggccgtcgttttaccaaccgtcggtggactggggaaaaaacccttggcgtttacccccaactttaaatcggcccttggaaagaacaattccccctttttcggccagg

SEQ ID NO: 130469 - DNA, 835 bp, Arabidopsis thaliana columbia
aacactactcactatagggtttgctggtacgcctgcaggtaccggtccggaattcccgggtcgacccacgcgtccgaatcgagacttttgaagctgaacggatatcagttgatcatgttgcacatcttaaaccatctgacggaggctcagcagcaacccagttggctgctcatcttactggtatacatagtgccatcaagatgcttaatagcagaatcagagtgctttaccaaaatcttgctgcaatgcagaaaggtgataaatcttgtgacaactcagttctgagacaagtatctagcctgctaagaagattgcctgccatggaatcagagagatttcaagataatttcttgatggagtacaacgacaaattactaataacttacctagcgatgattacaaattgttccagcaacatgaacgagatggtcgacaaattcaacaccgcatatgacagatacactcgaagaggtggaagaactgcattcatgttaaagatcctttccagcgattctagttctaaagatcttcttttggtttctggaaccctttttaacattgccttttgtgagaaatctattacctcaagaccggcaaggacttttaatcctcctttcaattggtttcttattatcctaattaggaaaccattctgggtttaatcttattccaaaaggcctcctttggttttgagaatctttggaacccaaagttttctcatattggttagggtaaaacaaggaaatttttaaaagggttttggaattctttaaaacaaaaataaccattatgattaattctgatcttactattatcatctctggggggccggggc

SEQ ID NO: 130470 - DNA, 1170 bp, Arabidopsis thaliana columbia
ttttggggattcaagcagaacaccacgcccaccccccgtgacgcgggataatggagacttccacccccgaagacgcatacccaagcccgacacagcatttttttagcttatatcaaccgagaaaaacatcacaatagcccaacacctccggagaggggggaaaccaaaacctacgaggcacgcaaccactcactggaggacccccctagagccgaccaaacaccaggacccgactctggagcacacaccaacaaggatactcgcccgtccccccctaccccaagggaggcaacatcggcaaacacaaacgggggaaactccccccgccaggggggcacagactcacacaacgcggaaaaaaatcaggggacatatacctagcaacgaggaaaccctcctaccaaagcacccagacccaaaacacacacctaggacgccaggcaaccactatgactaccccctgctcctgagcccgcgacgatgacaacaaacagatcttcagaactcaaccaacgaacgtactcctgacaacaagcggcgattcagatgccagcaagtgactacctctgctcggaccgcattcaaccgaaaagcgatcgactatacctatagcacaccaatgatgtgggcacggcaaccacacccaataaccacaaagacccggaccccttcgagcgtactacacgcgaacccggaacggaagccaactaaactcgtacacgccgagctacactccaccaccaactcatacacagaagtgacaccacaaacatcggatgaggacgccccccaaagcacacccccacagacacccccataacgaaccccaaactgcccactctataacagaccaacacacacaaacgtgcacacaccccgcacccaaacactaaccagccccaacaacaggcgtacgaggcacgcaggatccgacacaaaacatgacccccccagccgggggtgcgtaccccaaaaaagccccccaggacccagaaaatcacaaaccctcagcccccctcgaaaaaccccccctccaaaccacaaagcacgggacctaccccacacaagccaacccacaaacccacccacagacaaagagacgacacaccacaccaaaaaacgcccaacacaaaacgatacagccacccaccacacgccaaagccgctaga

SEQ ID NO: 130471 - DNA, 715 bp, Arabidopsis thaliana columbia
  unsure (1)..(715): unsure at all n locations
gacannnnnnnnnnnnnnnnnnnnnnnnnnnnnnnnnnnnnnnnnnnnnnnnnnnnnnnnnnnnnnnnnnnnnnnnnnntttgcattatattcgcggccgcagcatctctcacaacaagatcatttcatcaagggatcaatctttacggtatatgtacactattatagccaagccataggatactggcatagaacacacacatgaagcttacacacaacatcacaatacaaagacaccaaactctacgaggcattgaacattggccatagatcggtttcagctactacactactgtaccctcctttttcttcttcttcaacttcatacctttctgactggtctgcctctgttgaactggtgtctgtttcacaagcagaagccgcgacatcacatatctcaaaagctcttcacggtgagagaatgtgaaatcaaggtgagcatactcaaactcattaaacgatacatcgacctcggcatctctcatcacattgtagtgtttcttcacccttgaggaacggatcaccttgggggttcctttccggttcctaaattccacagggcacaatcggaatgaaccttggtaagaacctccccccttagaatcaaaacccgggtttcaagggaggaaagcccatttaaaacccctttcccatgtgttaagacctctggaaattcttggcgtctttccccaattaaaatatccaattaccccat

SEQ ID NO: 130472 - DNA, 659 bp, Arabidopsis thaliana columbia
cgcggatggcggccgcttctttagaactagtggactcccccggttctgcagttatattcgcggcccgccaacaagcaagacttcgtgatgtcatatggatcacgatgagggtacctcacttcacttctacaagcttaagagacaacgaagcagtcattggcctttcatcgggtcatagccgggaggcaactcattaaattctctctgggggcttacgtttggctctccttgacttactacatacttccgtctgacctcctagcacaagccagtctaaccggccatcttggttaagtgaatgaccggacacctgtactggtgactgactggttgctttaccgttgtggggtttaagaaagggtgtcacgtttaggaccaacgccccaaagaatgggacatccctcacgcctggcttataggtttttgtgttaccggaccacaccaggccccttgtagggaagggttcaccagggaagaaagacaccattgggcacaggaggttcctcctaactccgggatttccgaaagaatttccggaacctttggacttctccccaagctgaaataccattaaggcgggaagaccggatggccacttaattgaaataacatccctctggggaagtggaatgggctccagtcaattacctaattgcttc

SEQ ID NO: 130473 - DNA, 601 bp, Arabidopsis thaliana columbia
taaagttacaaaagctggagctccaccgcggtggcggccgctctagaactagtggatcccccggtctgcattttattcgcggccgcggctcgcaactaagactactacaatgatatatatatacggactatacatgaaataatattataccagttccaaagaattgaaaaactgatgatcagttccaaagtctaaaagaagatcagtgagactaattacaattttaccaatccaacatttgtcgccatcatcatcaaaatcacacgaacgtagaagcttttgaggtacgttgatcggtacctagagtgattaccattatagtcacatcgtcatgatatctccttctcctaccagccggaacattcgtcaattcttccaaggtaaagccagcacgagcagcagctttagctacaagacgttcaagcagaaactttgttgggatcaccaggagggttactagaaaccaaagaaagggccagccccaatcgctttccttggttggttggagaaaaatcaaaaaccaaaccaattggtttgggcaccttataaacaaaaagggggattctggaatttccgggttattttctttggtggaaaccct

SEQ ID NO: 130474 - DNA, 897 bp, Arabidopsis thaliana columbia
  unsure (1)..(897): unsure at all n locations
aaaaaccnttttgggtttagaaaaacggagccccaaagaggaggagaaagattgaaaaatagtggaacagaggtttgattttaagaggagaagaaatataagaaggagggtgaaaaaagaaaaagggaggaatgaagagaaaagaaaaagagaagaagaggagaaaaaaaatggaataaaggaaagaaataaggacatgttgaaatacgaagaaagagacagagaggagtggaaggaaaaaaaggaaattatgctgaatgtgagaaagggaaagagaggaggggagaaaaggacataaaaaagatcgataggagagtcattgggaaagtaaggagttaaagttggataagtgataaaatagagagagtggagaaatgagtagctataataaggtattaataagaaaaaggctagacttaggtggggggaggaaaatgcaaaaatgaagaaagagagcaaaatgaaggggattagtagaggaagaaagagagaaaaagttgaaaagatgatcaatatggtacagggaagaaaagtaaaaaagaaattgtaataaagataaaacagagaagaaagctaatatagtataaaaaaacaaagaagaatttttaagtaatagagaggtaaaaaggaaaaaaggagtaaataaggagaaaagagaataagataagaagttgactagaatctagtaagggaagaagagacgctaagaaaaatgagtaaagaagagaaattaaagtaacgaaagacagttgggtatacaatgtggggagagagatagaattatggtagaagaaaggaaacggagaaaggtaaagaattgggataaagtaaaaggttaaatcaaacagttagaggagagtgaaggaacagagttaaccaggtatatgttgaaagcaa

SEQ ID NO: 130475 - DNA, 660 bp, Arabidopsis thaliana columbia
tttaaagttatcaaaacctggagccccaccgcggtggcggccgctctagaactagtggatcccccggtctgcatgtaattcgcggccgcaaaaaagcgagatcttcttctctaatggcgacgaccttaagcagagatcaatatgtctacatggcgaagctcgccgagcaagccgagcgttacgaagagatggttcaattcatggaacagctcgtaagtggagctacaccggccggtgagctgaccgtagaagagaggaatcttctctcggtcgcgtataagaacgtgattggatctcttcgtgcggcatggagaatcgtgtcttcgattgagcaaaaggaagagagcaggaagaacgaagaacacgtgtcgcttgttaaggattacagatctaaagttgagactgagctttcttcgatctgttctgggattctcaggttacttgattcgcatctaaatccttcagctactgccagtgagtctaagggttttttaccctgaagtgaaaggagattatcatccgtatttggctgagttaaatctggtgatgagagaaaactgctgctgagatacttatcgctacaagctgtcagacgtgagtgtgacacactccatcacagctgttgtctacttaggttctcagattacctaagaagtgact

SEQ ID NO: 130476 - DNA, 607 bp, Arabidopsis thaliana columbia
  unsure (1)..(607): unsure at all n locations
tnnnnnnnnnnnnnnnnnnnnnnnnnnnnnnnnnnnnnnnnnnnnnnnnnnnnnnnnnnnnnnnnnnnnnnnnnnnnnnnnnnnnnnnnnnnnnnnncggccgcggctactattcagtagagacagtttctctattggtggcactaaaagtgcgatacagggatagacttacaatcttacgagggaatcacgagagtcggcagattactcaagtctatggtttttatgacgaatgcttgaggaagtacggaaatgctaacgtctggaagtattttacagaccttttcgattatcttcctcttaccgccctcatagagagtcaggttttctgtttgcatggagggctttcaccttctctggatactcttgataatatccgaagcttggatcggatacaggaggttccacacgaaggacctatgtgtgatttattatgggctgaacctgatgatcgatgtgggatggggactatctccacgaggtgcctggttatacatttgggacaggaattatcgcagcttcaatttaaatcacaaacaattgggactaaaggtctcaatatcaaagaagcggcaatcaaacctttggtccatggggaaagggtttt

SEQ ID NO: 130477 - DNA, 703 bp, Arabidopsis thaliana columbia
ataacggtagcagattctggagctccaccgcggtggcggacgctgtagaactagtggaccccccgggctgcattttatctcggccgcttccgattatgcccctctcgacaccaaggccaagggcacgtaaactcacggcatgatgaactctgggcagagctcgatgcttccgccgccgacgacttctggggtttctattccacctgcaaactgcatcccaccaaccaagttaacgtgaacgaggaggcagagaataaggagcaggcctcagagccggggaaacggacgaagaggaagaatgattatagagggatacgtaagcgtccatggtgaaaatgggcgggtgacattctagatccacgaaaaggtgtaagagcttggcttggtacgttcaacacggcggaggaggctgccatggcttatgatgttgcgggcaagcagatccgaggtgatcaagccaagctcaacttcccagatctgcaccatcctcctcctcctaagtatactcctacgacgaaatcgtcgcgaacaaccgatcagccatcagcgaagaaggtctgggttgactctcaaagcgagagcgacgtaagtaagacgagtttccccggtggagtgaataggaatttggaaatgcgggacgagttttcagaaccccggtgtttcccgggtttttggagcccgggatttaatgaaaccttggaaa

SEQ ID NO: 130478 - DNA, 629 bp, Arabidopsis thaliana columbia
ctaaggttagcaaaagctggagccccaccgcggtggcggccgctctagaactagtggatcccccggtctgcattaattcgcggccgcatgagatctacagaagcatccgaatgacttactactaaagaggaattgaaattgaactaacaaatttacacatcaattaaacccagaaactgagaaattctaccgagagttcttgaagaaaccatcccatcgccttgtgaaacttcgaaatcccaacacaatcagcacttgaatttcatgccgagaccatgcttaccacgaacgataccaggcttcaaaaacggagatatcttcgaggcatagaccttggcgattgctcttttccccagtatcctcatccttagtctccccaccttcttactcacgctacgcggaaccaactctttcgaaaagagcatacgaaacggtcgaactcaggaaacctcctcggccggcggtcaataacacctaacttccgtacggaatatgccaacagaaataaccccagaaaccttccacccgaagaaaacacataattcccggtggggtggaagaaccccaatgcccaaggaaaccagattccctcaaatgaagaacctcttcaaattcgggaggaaacccgg

SEQ ID NO: 130479 - DNA, 938 bp, Arabidopsis thaliana columbia
ctggagccccaccgcggtggcggccgctctagaactagtggatcccccgggctgcattatattcttttgccgcctaaattcctctatttaatcgttttcaaatcatacatccaaacaactaaaataagaaaaagacaaattcatctgcaaaaagctttagctctgtgattccttcacttgcacagcttctttctggtctctaatcattgtaaaagcccaaataaagatcaagatcatgctgttttcatcactctgccaacataaatgggtcaacttctccaagatctgcaaccaacggttctaattctgatggatcttcatcttctggagctaagtaagttggaaacggaagctttgagatgtctggtttcttgcaccatgcatcttttatgaacacaaagtttccttctgcaccaaggactaggtcctatcacccacatgaaggttccccctgaggaagcgatcctttgtacaccccaaacggttacttaactcgtaccccttgaatcttggaaccccaattttcttcccaaagccaattcttttttctggcctttttggaaccaccctctttttccagaggaagacatttctttcttttttgaccccctggggggaaaacacccccccgacgtttatctaaatgtggggtacccaatcttgaaaagcccccctccattgtttggaaattgaccccgggtccattttcccccacctgtgaaaaaacaccacggggttcttattattcgctaggcgcatttccccctctgaaagaaaacccctcttattcccttcagaagtgggattcccccagttgtggccattcacaaccgtgtacctgggtccccggggagcggtccccgcgaaatttcccaaataatcacaagactttaatttgaataccccgcggggacccctttagaggggggggggccccc

SEQ ID NO: 130480 - DNA, 1026 bp, Arabidopsis thaliana columbia
atggagcccccaccgcggtggacgctcgctctagaactagtggatcccccgggctgcttgaatttgtttccgcgacggattctccaagctccggttaggcgtgccccgtaccaaggatgtggcgattgacatcgctatgaaatggacaaaagttttaagaacaggagggataggagtaagatacatggctgaagatcgaagcacattgatgtccaatatgcaaaatgggaagcttgagactgagctaagggaattcgagctgagcccagatgaagcttactaggtcattatagggaagcacgagcttataagacccgtagatcctccattagaagatgtctttgaccaatctcaagctgtccaaaggaataatcacgaatatggcgattggcaacaatattgatcttactatgggatgaattataggtcaccacaaaaggcttctatacatgggtagaacctggaatgttcaacctccttttaacctgaaatcttaaccctaaaaccaaggtacagggtcttattagtcttcgcagtctggaaatggccccggacgggatctgcctaataatttccgatgggtcccgctctttttatttatttaacaacaggggtatattgggacattatctttcctaaaatgacatcccttggagtcccttctctcaatactaaatagttcgtctcgcgtcttacgtgtctgacgctaaggcatcccagtcgagggcgacataacaacaaacacgagacttcttataccaacaccaacgcctctgggcgctactcttgtgtgtgaaaaacagaggtaatgcacttgatcctactctacagatagagactccttcttatagtgatatagcgcacattttatttaaccttccaaagagttcccttttcatcatttgcatcatctcgttacaatcaacacattcacttgatcaattactaaacataatgtgtgcaaaacccttcactcacaaatgtttctatctgcgttttctacaggacattacctctgtttaaatt

SEQ ID NO: 130481 - DNA, 762 bp, Arabidopsis thaliana columbia
aactactcactatagggtttgctggtacgcctgcaggtaccggtccggaattcccgggtcgacccacgcgtccggaaatggcgatttacatgtcggaagcagcacagctcagaagaggtctaaagcctaaagggaagacttatgggttgaccaatcagaagagacgagagatcagagagatctttgatcttttcgacatagacggttcaggtagcatcgatgctagcgagctcaacgttgctatgaggtctcttggatttgagatgaataatcagcaaataaacgaattgatggcagaagtagataaaaaccaaagtggagccatagatttcgacgaatttgtgcatatgatgacaaccaaattcggagaacgagactccatagacgaattgtctaaggcgtttaagatcattgaccacgacaataatgggaagatttcacctcgtgatataaagatgattgctaaagaattgggagaaaatttcacagataatgatatagaagaaatgaccgaagaagcagaccgtgacaaagatggagaagttaacttggaggagttcatgaagatgatgaagagaacctcttacggctaagtataaatcaattagtaatgggttgtgaataatatttggtaatcacccttgatttataataataaagaagtttgatttgtggcttggtcgaataaaaatgtattggtgtataaaaaatataatggtaattcacatcccattattttgaatatgtaaatgtccttggacg

SEQ ID NO: 130482 - DNA, 622 bp, Arabidopsis thaliana columbia
aacccctgcaaaaaacccctacggagtttgggccaccgggccccgccgagagacaaaaccacccgaaactggggggagcaggaggttacaatgttattcccgggaccggacaacaacaaccgagcaagggggggacacacaacaaaggccaaaccagacagccacaacaagaagccaaccaaaaacccacacaaaagccccgcacgcagcaaccgaaagcggccacacggggcaaaaaagaacaaagaggacaccgaccaaaaaacacaggacaaacacgcaggcaagagacccaagaagaaacccgcacggaacaccaaagcgagaaaggaaaggaggacataccaacactacgcagaagaaacccaccacacaagacaccacacaacaacggacagcgaaaacccgggccccaagagcgcaaaggaagagaaggaaaaaggccccgagaaaaaaacaccaaacgacatccacccgaaggacacaacaagcaccaggcggagaaaaagtagacccaccccagaggagtcaaaaccgcgaccgtagagccccccgatgagaaccaccgcaccagcagaagaccacgaccctcacacacaaacaaacccaggacgcccacatc

SEQ ID NO: 130483 - DNA, 702 bp, Arabidopsis thaliana columbia
gtttgcctgcggtaccggtccggaattcccgggtcgacccacgcgtccgatcgattctttttacttttcccgaattgaaagtaaaggtttactacttcgatccggagattgtacggacgctgatctcaacctccgtgagacaagcgctcgagcagccgttgaattacgctcgaaactacctagctgaccttctcgagcctcgcgtgcgtcgcgtgatctacctagattccgatctaatagtagtcgacgacatcgtaaagctctggatgacgaaactgggatcgaaaacgatcggagctccctagcactgtcacgcgaacttcacaaagtatttcacaccggggttctggtccgacgagaggttctccggagctttctccgggaggaaaccgggctactttagcacggaagtgaaggtgatggttcttaaagagatggagggcgcgttaagtaacactgtggtgattcgaaaattgggatgggctatttcagaaagaatgattagggattttacgagcctgggaaattttttgcccgacccttccttggtgtgggggtcccgaccggtaggaaaataattttcccttatagaggctttcaggaggggaaccccaggccttgggacccttgggcggggaatttctaaccccttggagaacaggtaaagcctgcttttatagtatttttatcccattcccccgg

SEQ ID NO: 130484 - DNA, 650 bp, Arabidopsis thaliana columbia
ttgccaactacggtttcaaaatctggagccccaccgcggtggcggccgctctagaactagtggatcccccgggctgcatgtatattctcggccgcgtcgattgtagccgcccgaagaaatatcttctcctctctcgtttaaccacgaatttgctctgatattagtgtttctctagccatggcgaacgcggcatctggaatggctgtgcatgatgattgcaagctgagatttctggaactgaaggctaaaaggacacaccgtttcatagtttacaagattgaggagaagcagaagcaagttgttgttgagaaagttggtcaaccgatccaaacttacgaggagtttgcagcatgtcttccagctgatgaatgccgttacgccatttacgattttgactttgtaactgctgagaattgccagaagagcaagatcttcttcatcgcgtggtgtccggatattgctaaggtgagaagcaagatgatctacgcgagctccaaggacaggttcaagaggggaactaaatgggattccaagtagaagctacagggcaacctggatcccaaccgaagattggaatcttcgatggttttttcagggaagcccggtgcccacactttaaaaaaggttaaaaaaaccccaaagggttttaa

SEQ ID NO: 130485 - DNA, 346 bp, Arabidopsis thaliana columbia
gggacgaagacagaaacaaacaggaaaaacccagaacggacttttatcttttaccagcacaacaccacagacaaagaacaggggaggggggggacacaaacccaggcaacacaaccaaccaagaaacagcagaacgcgagaacgaggccaccggagaacacggagggcaccagcaaaccgagaggaacccaacggaacgaccaaggtgcagagacccacgacagaagcacacaaggaagacacggaccacaaagaaccgcaccagagggacgacaacagaacgacaagaccaaacgcagaatccagcaagcacgaaaaacgccagccgcacggagcgaaccccacc

SEQ ID NO: 130486 - DNA, 540 bp, Arabidopsis thaliana columbia
ttgttggttctggtgcccgtaccgctcgagaaatgctgggtcgatctcggcttccgggggcagctttttttttttttactgggagcccgatgaaaaaggaggaggtcttagcggcctctaaaacttcagcctaccccatgatgcagagaatggatgaagagaagatagctgagaagttccccgctggagacacggactatgatcgaggagcgtatatggcaggcgaatcactggcggatgggcgaccagctgctggcgggccatgagttcgcagaccttatgaatggagagggagagcatgtgcggaccatctaatgccaggatgccctagagagtatcgtggagtagcccgagtgcccaggacgccgagtgccatggacgtaagatgcccacagatttcaatgactgtgggggcctgcaccgttcttatcagagcgagggacatatcccctttcctcttccggtgagagcatcgctgattcccagcctagatatgggttctggacgtgcagatgctcttttgagaagatacactactca

SEQ ID NO: 130487 - DNA, 651 bp, Arabidopsis thaliana columbia
tttgcatgcctgcagttctgcactctccgatagaatggtcgaaacgacctatatgactctaatgtcccttatatcaaaaaagaataagaagaagaagaagaaaatgttttgctcttaatgggaataatagtgaaacagagaacgggacagcatttgtagtgttttcagaacacgggtgtactactaccattagtccatagaattttgatgttcagatgtttgttttgatgaaagctctttggcgtgttcttttgcaggctgtgatcaactatggtgcctcatggtatgcccctttgtctcttgcttgtgtggagacattcattatttttttttaaaaggctacacatacgttaaagctctatagtcctatggtttggacctaaactctctaggcagcctgatggtttgcgtatttacatttgttctgttgaaatatgcattccacacttcaattttttaaaggttttggaaaagtagatcttttgctatgccatggaagtctaaagttctgcttatactgataaccatatgtggtgattgaatttgcctgtccacttgaatctgcatgatcaatcaaactcacttcttcctatacgtaggtgccgtgtctgcaggtcgactctagaggatccccgggtaccgagctcgaat

SEQ ID NO: 130488 - DNA, 684 bp, Arabidopsis thaliana columbia
gcctgcacaggacccgcccgccgggatcagcggcgcgccgcacgacaacaacatcatgctctggaacgccgtcatattcgggtagcccgtcccctcccctcccccctcccccgatttcgttaccccacaaacgcccccccctggagtccgttaatcccgttcctgttctagggttagattgagggactccggatctcggggagggagacgggatctcagctattccttttgatcttactcttgtgttcgttgtgctgatgagaggttcgtgtggtttcgcaggccgtatgatacgccgtgggacggtggtgagattcccagctctcagctctgagcctctgaccccttctcttatctgttgctcatttggtgcttgctgtgtggtcgttacttgcttgaaggtagtttgattcggaattgtgcaggtggaaccgtagaaattcatggggcgttaagatatttgggtgccacaggaaccgagactcgtctggtaccttctggctgttctagcttgttcctgatggttaatctttcatgtccaatcttgggggagcattttggtatgcaaatctttagctattcgttggaagttgtcttttggagcatgtctttagagctgtaggttcgaggaattcactgggccgtggttttacaacgtcgtgactgggaaaaccctggcgtttc

SEQ ID NO: 130489 - DNA, 792 bp, Arabidopsis thaliana columbia
taacttgcatgcctgcagctcatggatgctggctctcctttacagcatgaataagctaaggctcggtttgaatcagctaaaaagttagagataattattaactctagtgcatttaaataacggctagctaaaacaatttactaccgtgtgaaggctgttaaaagttgcccggcacactctgcagcatttgagcggaaggcgcatgtgtaatatctaattcactatccacttgagactacaattgagatgtctgagagagggtagcacgtattaggtagtatgattaatgccgagaatgtaaatgaccacggacgcaagcaaaacggactacgacgttggtggtggccacgggccctagatgactgttacagtgcctgttacttcttcgatttggtaaaagatacggattaaccgtgggcaaaatatggactgagtcgtatttaggatctaaagctagactggctatagctaatgcaacggctaataatccagagtagctaacatttatgatattcggatcaatgagtgcatcgttctatatcaacaagctcacgctatggagattgaataaccataccaactttcacgccaataatggtttaatgcaatgtacagttattcgcgtaccactcaagtacagttaccacaggacagagacacatacttaattaaacgctttacagcattcaactgccataactacactagaaccatttccccccaaataccgtatcttcagcggtacgcaccggaccgtcaacactaaacgcgagaaatccaaaccgtcagcgt

SEQ ID NO: 130490 - DNA, 764 bp, Arabidopsis thaliana columbia
ttccgtttgcatgcctgcagctaatggatgctggctctcctttccagcatgaataaactaatgctcggtttgaatctgctaaaaagttagagattattactaactctagcgcatttaaataacgggtagctaaaacaatttacttccgtgtgagggctgttaaaagttgcccggtacactctggtgcatttgtgcggaaggcgcatgtgtaagatctaattctatatccacttgagacttcatttaacatgtctgagggagggtgccacgtatgaggaactatgatgatggccggacaggataaggaccactggcaccagcatagagggcgaccacttggtttgttgcaactgaccctacatttatgctacagtacttgtcactgcttacctttagctgacaatcatgattaaacttggcctatatcagcaccgagtctaacttgacatatataattatactgtgtggaggtactgcaacggctttcattaatcagaaaccagcatactgactatagacatgatcgaccagacaccaccgtatgaagatagtattccttcaggtgcactgaatgatgcctacattacgccaacaaaggttcttgcacgattagacatacgggttgccctgtaaacagctgctcagtacaccgaccatactgataaagacactgtggagaacgtgaacatgccgaatgatatggcagcatttgcctgctacaaactttacttgacagaatgcacgcgacggcgttcactgtgata

SEQ ID NO: 130491 - DNA, 732 bp, Arabidopsis thaliana columbia
  unsure (1)..(732): unsure at all n locations
tttggtagtggcaggacagctatccaagtaccgtaacgagcgtgcacacctcgcttgcacggctgtgtccttatggctgccccacgtggcgccgatactcctgcgtggaggcctgctcggaaatacccggcgctcactgttgtgggtgaagcatctcgtcgtggccggtgccctggagcacgtgtgcagattctgaagtagacatggggcacaagaagcagttccgggcaagatccatcaggcaactgatccatgcttccgaggggttttctttcatcgggaaccatgaacaacagcctaccctgggctatgatggctattggctactccgatccaatacgaccagtcatcgttgattaatgaatgctcacgctgctggtacccgccctagtattaggggaaggaagaaaggtggccggcctgggccttgctttattattcaccaaaaggccacaggacgtattgcggaaaggcatgccagctagctagtgcctgcgggcagctgctgactgagataagaaagacccggccgatctgggcttgcagctttatttgcccggccctttattnnnnnnnnnnnnnnnnnnnnnnnnnnnnnnnnnnnnnnnnnnnnnnnnnnnnnnnnnnnnnnnnnnnnnnnnnnnnnnnnnnnnnnnnnnnnnnnnnnnnnnnnnnnnnnnnnnnnnnnnnnnnnnnnnnnnnnnnnnnnnnnnnnnnnnnnnnnnnnnnngt

SEQ ID NO: 130492 - DNA, 719 bp, Arabidopsis thaliana columbia
acgcgcaccgcgcacccccggtgcggcgcgagcgcatgcatgagcgaccgcttttatgatattctgccgccccgcgttccgagcagagtgtacgggttaatatccaacgagacggcctgttcctgagcctctgagttgtagtctgggttgcccactgccggggccatggatcagcagcggaggagcagcatcaggttgtacgggtccaacgcctcgtcccggtcggggtccttcgactttgaacacgaccaggacaaggaacgcgctgaccagaccatagacggtgaccgccgggaggtcgtcgagactagctgctcctgggtcgtgctcttgcattgccttacctcggacagtggcatgtacagacacagctacaaggtcagcacgccgcggtccgtagtcacggagagcatgctctcggcgtctgtgttcggcttcgagcgggcaaacctccaacgctgggggccaagccccccgcttcggcgagaaggctgccgcgtactgcgcaagggctgaaggtcgacttctagaagatccccggatcccgaaattcgaattgactgggccatgggttacaaactcgggaactggaaaaccctgggggtacacaatttaatcggccctgaaatacaatccctttagacaagaggggtataaccacagaggaccttttcaaaccccctttggaacagtgcgtaacctgaaggaacaccggaacc

SEQ ID NO: 130493 - DNA, 830 bp, Arabidopsis thaliana columbia
tcgccgacctgcagctaggcttgtgttggtagagcaccgtgcgaaacctgagcggagcgatcgcatgggagcctcggttcatgaactccatgactccattaggtccatgggaatggagaatggaactatgccaagagacgtgctgttcctgagcagctgattcgtcgactggggtgcgcactgacggggccatgtatcagctgcaatgcagcaacctgaggttgcaacagagccctctgaatgtgactgcggagttctttgactgtcgatcacgaacaggctggggcttgcccatgaccaacccaacgacgggataccgaccgggaggtctgttgtgaaggatagacgcccgagcccgcactcagcaggagctgccgttccacgcatcccggtggtaatgcatcggagcacacatttccgcagaagagtcacgccagaaagcctggtgaacgcgggcgagccatgtcacaacgtcgtctgactggacggatacgaatcgcgtttccccaaccataagccggccgtggaaggaaatccccctttttgcgacagtctggccgtttttaaagaaacagggccccgcacacggattttcggtcgggcgggtggggggacttcaagcgaaagaatccgccggggccggctgaatgggcaggcttttctacgggaaacccagggggcccggttggcggatagactggtcccttggaaccctaaaatttgaaggtgggcggaaaaagaacaagggcgttcaccgcacgccaaacaaatttgggaaagaccttccagggtacctccgcctggtggtttccaggaatcccgggaaaccg

SEQ ID NO: 130494 - DNA, 903 bp, Arabidopsis thaliana columbia
  unsure (1)..(903): unsure at all n locations
tgcagcggggnnngggattgcttataaagcataaccggaccgaccggccagtaggcttggttgcttcctgggaggtcggtttcttcacatttgtacgcgttcggggggctttacctcggggggatcgggatcgtcccaatgcgattcgtgcttgtgtacgttcagcgcgaagccgaaaccaaacagggcgcccggcggatacgaaagaacaagcggtgctccttcagttgggtctacctcttttttcgctctatctggatccatttccggccttcttctctctgttggaaccagggagaaccataagaatatagctgcgggcttcccctcaaaacgtattccctgtgtatgagagagtgatgcttttgagcggcactctgtagctttgcctacaacccatttttgcatggcggatgacagagatacacccttttcatgaacgtgggacaatttccctcatctttgcttattacggggcccatggcccaatcaaaaggtcagccgccgccttgactcagtcggaccgttgactcattcgggtacaagacactcatcgctcggtctgtgccaagataactgccgccgccatatttccggagcgttctggaatacctcttcgtctgcagggtccattactttttacagaacggtggggaatttcttagacagggaccggaacgtttccctggttcctaaaaccatgtggaattcgctaagaccacctgtagggggcctttgggccacccctttggcgcggacaaggatattgtcggccgttcctaagtgttaacaggcctccttgatgcacccccggctttttacaatgcatggggaacggccattgtaacaaactgccctcgccgtgggggacaatcactcggcctattccccaactttaattgc

SEQ ID NO: 130495 - DNA, 720 bp, Arabidopsis thaliana columbia
atgacacattttgctaattctctaccccattgctctgatgtcatgtatgaaaggctgatgatgcacatgcattgctaggtaccctaacatcacgcaaggaccattcagcaccacgtaagaaactaattaatatgctacctgacaagggggcacgagtgttagaatcagcatacatgagtctggacaggcatccgtgtcctgcatgcacgttgcataataccattgaccgcctattgctaagcttgtgcaattccaagacacttgttggtaacaaagagttgggccatcggggggacaatacgcatcatgtgaaaatttatgtacccatgtttcctgataatttaaaattcggagtactcaatatctagaaggcctgttgtaaactgacagagtgatatagaccagaagagtttgtgctgtgaggtctttcacgtttatgacagaataggcatgccatatatcatatagtggtagaagtcacaatcataggatattcagaacctaatatcttgtttctgtgatatctaacagttacggtctgagtgcatctgaataaccgaaccgttaaactcccttgtcttcaggaaaaaggatgctggacccatatggtcagcaggtaactgcggtgtagatgaaaacgggagcctggacccggatttcattggtgtttcatttccgcgcaatgaccggaaaaagtctttggtttcaaagcttgttctg

SEQ ID NO: 130496 - DNA, 784 bp, Arabidopsis thaliana columbia
  unsure (1)..(784): unsure at all n locations
ggtttcgagtgccgggcgcaccgggagtcctctcccccgtcttgttcgattcctccggggttctcagttctgcattcccctccgggagaagaggactggttcggacgcgttcgttacggtcccgggggttttattaatctgcnnnnggcntttcagttttgtctacccgccgttcgtgagtttctcgatcgattcttcgggtgcgacgtaancanctcttcgagtgttattttttgtttctggatttttcttttctgtgagggttttaatctctgttgtgnnnctnacttgttgccacccctttgagacggtatcctgcacatgatggtctttggttttgggatttccttccccgttccttcatgaggaggtgtgcccctgaagacaacctctgcggagtcaaggaacaactggtggaggcaacaggtgataatgggtaatgatggattgttttaatcactttccgctgctgcgttggccttttaacgtttcgccacnnnncctttggagtggatgaactgccccattatggaattgctttgccttacttcctcttatggcttttggtgcacggggattaaatccatgcggggctcaccagcggtaacgcccttttcttttatacttggcttcagaccggaatgggagactgggcaattgtttcgcgcgtcttggcttatggccaaaatttgggcgtcaaatcttcggtttatttacccccatttggtcccccaactgggccttaaatgggccacattccctctttatttttaacgttttttgg

SEQ ID NO: 130497 - DNA, 733 bp, Arabidopsis thaliana columbia
  unsure (1)..(733): unsure at all n locations
tgcaggtcgactctagaggatattcagactccgagcgaacatgtattcttttcgaagggccctccagagttcagacaaaatccctggcgttacccaacttattcgacttagtgtgaatattcataatgtctatgaaatgttggtggtccgtgactagccgaagatgtatgtagctttctggaatctaccctttattttgttgattgacagagaggagcaccaagagaatgaagctactccgttaagaagatggaagatggtcagatggagcgtcaagtcaagacaccaaagcatgcagcagtcacagagacaaacatgggctcgattaggcccatgatcaccgtgtccatcacggctcgttatctgggtctttggcccactaacccaacgcactacctggcccgccacctgacccaattcaatttccaccccaactcccaactacctctttgcagatgcaccagtgtcctttcagatcccgccgagcgtctcctttcgcgacacgctctcagtctcacgccacagctcgtcgagttcgtcaacggtcgacccattgtctatggaaggaaggcgcgagccggaggcggacggcggaaaagcccgggggccttccgccgttggaagccgcgcacctgcaggtggactctaaaggatcccccgggtacccgagctcgaatttactggncggtgttttacaacgttgtgaattggaaaacccctgcgtttcccaaat

SEQ ID NO: 130498 - DNA, 531 bp, Arabidopsis thaliana columbia
gcaagcatgcaccctgcaggaagcggacagcatgggctgcttactcaagaggcgttgcaccatcggctggttgagcacgccggagacgtggttgatgaccacgcctgcaagcactctccacgaagacggtgaagatggtgccggagtccacgatcatggccccggagccgtcgtcacgcaggtcgaaggttccgttcgggatcggcatgcgtgcgtcgccgagcgatatgccctcgatggagacgtatacctcgacgggttgtaggggtcctgcacaagttgcgtcgactgcacggcggcgcgcgctattgtgctgggggcggcgagctcggcgacggcaccgaacagcaccgggctacccatgctggtgttgaagaagtcggtgagacagtatgagaacttgccgaccccaagctgcgccacgagggacaggctcccgcggcccacgccgactgtgccggtggagttgtacgagaggccgtcgttgtcgacgccgcaaccgaacgcgactccgccgacggaaacgccggt

SEQ ID NO: 130499 - DNA, 385 bp, Arabidopsis thaliana columbia
tgcgcccccttcacgtccatgcgacatctttctcaggaaacgccgaccagttgctcgtgtcgtcactccagcatcttcaatggacgaccaccctgtaaagcactctccccctggacggtccaaatggcgcctacgtccactgtcatgccccctgcccgatcaacagtgtgttccccaccctgctctgcacgttgcttgaactttctcgtttccctcaatttttcttgcctttctgcatttcttccaccccttcacttgtcaaactaacataactccaccatgccaggaagtcggcccctctgcgtgtacaagctcttaacatcaccttcccaaagcgccgcccggtaactaatttttctcctatctgacatactagctgctactt

SEQ ID NO: 130500 - DNA, 958 bp, Arabidopsis thaliana columbia
cctgcctgtttgcttttttgcaggacacggccgctgggcagttctattcctggaccgctccgaccaatcggtttttccagtttttatctccaagaataagaccataacgcgctgccggtgggagtgcattattattgacacatgtgcctggacggcgacgactggaacactggggcaatccagatggatacatttcttctgggccctaatggctgagatgattaccgtgcgccgcgaccctgcaggacatagcaaagcttgggacctggtcccggcgtgtttatcatacggttcagacttggctagaaacactgtggcgcatttaccgaacgttaactcaccctttgttggtacataccccttttattcgccaagctggtcgtatatactccgaaacaaacaatgcccctgcaagtggttgccccttcccccaaccagttatggggcaaaaccatttttgtggataatatgggccgccctgcactgcgcgtagtaaatgatcccattaccgtcattattggtggcgggtgatatttcaccacccccgcaataccgtcttgggatgtcggccctcaataaagacaccgccccccccttgctaaagctgggctctattttaaagcctcccggaaaggcatccttgtgtgggccctatccccccccatatgttgtgacctggcttacatcattggcccaggcggcaccttttgtaggcccataattatctttttagcgtttcctttcccattgccctttaactccggcccccagttgtgcccggtctttttcccctgtgacaaaccttgaatatgggggggggctttccttttcggggttcccttatttcagatggttgtaccggccactcttggaccccacaaaaaacttagtatctgggggtgaagggtttccacctttaaggggccccattcgccctggaaaaaacggttttttcctc

SEQ ID NO: 130501 - DNA, 629 bp, Arabidopsis thaliana columbia
atcccaaagctcgccatcgaattctcggccgcccaggtttaagcatgaggttttttttaatttttgcacagcctctgccgctaagaaagtgtcatttataatgacatcatttatgtccgggcactacacaaatttgaagaacggtcgcgccgaaagttagtcaaagtgtcaaaccctgcttcgagaacttaaaaatctatagtaagtacgattaatgaccccacattattatggatcgatccctaacttctcacgttatctgtccagaatttgattgcttattgcgcaaattacatttacaggcccaaacaaacgcttgataaagcccattaaacatctggcctaggtccgaattattcgctaatctaaacgactgcgctgcaactgtcgttaattgtggcggacaagaaaatgcgagaagccgatgaccacaattcattaatgctaccgcttacgagagagatgcatagatttctcttccattagtcgagtcttctttctttagcaaacggccacaattttctttaccttaattctcacattttacgttctcgcctttggaccttgatttccacccgcaaagtttctccaccggtttctctacgaagacctccttcgcaaaagaaata

SEQ ID NO: 130502 - DNA, 1218 bp, Arabidopsis thaliana columbia
  unsure (1)..(1218): unsure at all n locations
ggggaattgtctgccaaagctacacatcgaattcgtggtcgccttgtcgggaccggagagagtttttcctattttgcttgggaaccctacgcacatctgtcttagtatatggagtgtacactgtactagctgccccctactggacttgcgcgtcccaatctctagtactacgcatcaccttatgtgtagtagaatctacgcatgcatgaccctcgtgatctgtccgacagtactaaaacttgttctcaggaacacagacagcagatgctggtatggctgcaccacagtggaaaaccctgcctctcattgcatttacaaatccctctctctgtgaatgggcactacataccacttacaaccaactacacgctttatgcaatctctggggatggacatatgaaccccgggtgagacacaacaaaccatttgcccgcaatcgtacctaggtaaaggcgacaatatttactgttgttctgacgttcttcttggatcaacaaacccggttcgagtccggtggcaccaacgggcatagtgttcctgtatccacctttttacatccacaaaacccaatttgggggatttccattcttccctcccctccctggggggaaaagtccaagtgacacctcacggcctaggggagaaaagggtagccattcgtcctcattcgtttccccatcagggcgcctattattagagcaatcaaaaccctcttgtcctaacccccgctagggagagcccaatctcctattaacggaaagaattcccctccctggccaccaagcgaaattttttggccatcgagagntactggtctcctgcggcaggaattggaccctcgaggccatacccccctcacagtttgggagaaaacacgcctcgtccaagttattaaggggctaacccatattaccggggaggcttttttagcccctattcccctgtaagatgtgccaaccccggccaacaaaaagaagctcggttttcacacaccaaaagggtgggccccccccccttttggggggtgtaacgcttgtaatagccctccccgcgggtagtatcgccttacggggacaaactgaagctctgggagattatgggcgctctccctatagacaccccctaaaggggaactgggccaaacccaccggggccgggtgttctcttcgaacccccttcggggttcacccatattttccttgaaggggggggtcccct

SEQ ID NO: 130503 - DNA, 1003 bp, Arabidopsis thaliana columbia
aaagcatcgccatcgaatccgcggccgcgtttcctcctcaatctaccgtttcgccgttttctccgccatatcctcaggctaatcaggaatggggcaacccaaattgggggaatcaccaacatgggcacaccccctcaagctaatagcaacgtcgaggactgggctgagaaagccaaagaatgggcagctgctaacaaggatcagcaatcacagcatctctgtcacccgaaccacaccctaagcggtacataggtctaaccaaccaaccagcactcccacctccatgtggtaatccaaggatttttccatatcaaccacgggcaagtttcccacggtagataagggcttatcacggcagcaatcagtcaagttctcccagtctgcccacccccacaaaacaccagtacccggaggagaataattcccaaaatttaccgcaacccagggaaaaccgaggaagcttttccctgggagctctggaattgcccccaaagaaaaaaccctgggcctacccagaatttctgtcaaatatcaatccaccacaggaggggtgcccctaaaaaggcgaattgcctccctggtacaccaaaaacaaagctcctgggacatattaccaaccaccaaacccatggaagggggggccattaaataatccatattggccccctggcaatgggcggggggggggaaaccctggtttccaacccaccggggggggcacgaccacttattgggcccaaatcacatggcccatttacgagtggcgagaatcccaaattctacgggcttgggctccccacccctaagactaaaaccttttcaggggggaaatcacaccaaatgtcgctatggggactaacccccccataacaccacaccaagtggggagtgtgatcctatttcctcccaaaaatacctttcattttgggggcaaactaaataaccctcaaccatggacctcatcctaatgggccccaacccccctggtcttggggtcaaaaac

SEQ ID NO: 130504 - DNA, 1241 bp, Arabidopsis thaliana columbia
ggggccccaaaggagcagcccccgaaagaagaacagcgatcggacgcaagacgagatgaggacgcaacgatggaggaacgagcgaatgttttattatccggcacgtcttttcggaaacaaagcccgcgtgggacggcacaacgaacaccgaatgagggcgggcagggggcggaacgcctgaggagagaagggacatggcagccgcaagaggagacagacgaatgaaaaaggacacaccggacagagagaacgaagacagcgcgcggcgcacgatgaaagcgcaccaggcccggagagaggaagcgagcgcacagcccgagcgagaagggagaggaaacgacgtcgagcggacaggaagagaagcgcaagaggacgacgaaaacaagccagaggcaaggagacaccgggccacagggagagagcgagagtgcgaagcaacagcgggagggagggagagaggcaacgcagagagagggaaagcaaagacgagaaagagcggcgacaggcagcaaagccaacgcgccaagaaaaaacgagcaggagggccaagagggcaccggcgcagagacgacccacccacgtgacgggaacggagcggaagaccaaactgtgcacgaggccggccgcagagcaagcaggcgcgaccgaagagaacaatggcaagcagcatctgtgactgcaccggaacaaggtcacgaaggcgcgtacgtgagaccagcaggcggatcgcgacacagtggatagcgatcgcactgcaacatacggcgcggcagaacgaacgaggaacagatcgcgcgaatactcgaacatgacgctggggaagatcggacatactgcgatgacggcagagggacgaagacagatgcataagcgcaacgctcgctcgaagaggagcatcatcgacgaacagacacatgacagcgctagtaccatcacaggggcggaaacgcaacgaacggggcgactgaggagccggaaaacaaagcgcagaaagagacaagaggccgaccggagcagggggcaagacagctaaggggagagcggaggagcaaggcggagggacgggcgaagaaaccagaaggcagagggaggcaaccacggacgccgagaaccgcgcggaggaggagagcgaagcggcacccccaagacagaggcagcgacaggaggaaagcaacgagggaggacaaagaaggaagggcaggaaagaagaagcaaggacacgacccggaagagggacagcc

SEQ ID NO: 130505 - DNA, 684 bp, Arabidopsis thaliana columbia
gcacccccctttggtcgattgtatccataagcttgatatcgaattcgcggccgcgtttgcgggcaggaagaatactatttattttttccgaacggaaataatagcgacgccagagaaagagggtacactaggcaaacgcacccaagagcctgatagcaaatatggatacagcaccatcatctatctggcccattcattcatgctactaccttccggtggcagtcatagaagtccattggctcaaacagaaggatgggtgctcctggctcaactcttggcactaatagcgactgttcagcatcccttggcctcgtggcgcctctggtttaggcaccggtttaggatgggccaagataggcctgcaaagcttggccaatgcctatgccttgctgtaaacagtagctgacaaccatatgcgtggtggcatactagggaagagtgatctgctgctggtgctttacgcaaatgcatgcttatgctaacagaccctgagttaaaacctactgcttctttgacaaagcaaggtgaataaagttgggctcagcggacagagttgcctcagggactctgaaaatacgagagcctaagctggtcaaagaaccgacccgctcttttcagagaggactccctttgtaaccggcaccttgaaaatcagagggtttaaccccgagcccttgagtttga

SEQ ID NO: 130506 - DNA, 923 bp, Arabidopsis thaliana columbia
  unsure (1)..(923): unsure at all n locations
aggaaagctgccatcgaatccggccgccaaaatagcgagcatgccgagacttatttggttttaccccacgtgcatatggagtggtgctggggattacagacggaacaacattcgggcagatattgcgatagctggaagccgaagatcgacctgtagaaacccaccaccacgcaacgcaaaaaaagctaggggagaagggccataggctagactacaggtcaacgcttatggtgctgacagcacctcgaggcccacagggagacctgaaagggctgagatgtccatagggaataaccgaaaaactcatgtccatggaatgagaaccaaactctatgctggactgtgggcccatagctatgacatggccatctcgtaggcccatgaacaaaccttatgaaagtttcaccaagcacgggcaaccccccgatttaagagcggggaagaatcccctagaaggaaaatcctcacagaaacttctccagctgtaaaccaaangcacaaagatcgcgcatccttcttcctgggggaagagaatactttatcaccctggcaccacgaccacaaagtgtggtggtctttaccatcccttagtttatctcttagtccctcaagctcaagtctagagagacttatggcgccaacacaacgacgctcagggggaacccacaattctcaagacctcgtaataattgtggggtcctcacttcatatgtcgccaaccccgcgcacacatattagcggagaaaactctctctaccacagagaaaaaaacgttcaaaatcgcctcggacccccgtgtgaggtttcggcaacccccccactaaaaaagagggatcaatttcccgggagtaaccccaagcatcgtcttttcggcaaacgtgatctagaacccgggtgggtagaaatctcgcaagcccggggtt

SEQ ID NO: 130507 - DNA, 574 bp, Arabidopsis thaliana columbia
  unsure (1)..(574): unsure at all n locations
ggaattctgccaagaacccggccgccaaaaacgcaagcctccactagacatttttcgtttttcnccttccctatctcgagtgtggctttggtactactctccgactgaatcttgcagcagaataacgcttccttctttgggattatcgcccggtggaaccgctaactaaagaatagatcagaagtcagctcgcgaaagggctatggcattactcttcgatattgctgattaggctcatttgggctcagagctaaggggatccctagaagcgcgaggactccttacgtgcacaccgaacagctaagggactggatcacaaccaagtcatcttgacttggcccaaagcttcgtgatacaaaaactatgcacttctcttacttgagccagataacctctcggaaccctgcttccaaaggggaagcgcagaaaactccgacctcttactttaaagggaacatgggattaccgggtgaaatccccgcacgaactgtggggaaacccggccttagcctggaacacagcccctgggcatcttggggaagggaaccacatccagccgtaaaacccgggggct

SEQ ID NO: 130508 - DNA, 1407 bp, Arabidopsis thaliana columbia
  unsure (1)..(1407): unsure at all n locations
aagagggagaggagagagggacgcaggagaggagagaaagagagaggaaaaaagaaattgttgggcgatgttaaacaggacgggagaaaagaagaaaacgcaggggggagagcgggggagaaaacagggaggagaaagggagagggaaggaaagaaagacggaagagaaaagggagagagaggagagaggagagggaaggggagaggagaaggagaaagaaagggggagagagcaagaaaagagaagagagaaagaaagagagaaacgagagaagaggaaaagagcaaaagacacgagaaacgaaggaaggaaaggacgagaggaaggagaaggagagcagaacgagggacgaaggaagagaagagagaggaagaggacgcgaggtgagaataaacgaaaggagaggagacgagagaggagaaggaggggacgaggagtatgcgagaggagatggaaataggaggaaggaaggacgagtaggaggataagatgtcaggagacgtgcagcgaagaggagatgagacgaacgnagagagacggggatagcagggacaaacgagagaagaagataagagcacggagaggaagaggacatggagcacggagcaacgagacaggaagcggatgagagagagacgacgaggagggggaaggagaaagaggaggcaagagaacgaggagaagaggcgagagacgagaagagaaggggaagagaagagaagcagaagaagacaaaaggaaaggaggaggaaagaagaagaaggggagaaagagggaggaaaaagagagaggggggcacgggaggaaaaaggaggaggagggcgaagagaaggaaagagcagaaggaaagagaaaggaaaaaagagaggagcgggaaagggaaaagagaaagcgagagagaaagagggaggagggagagcagaaggagaagaaaaagagaggacggaaaaaggaggacgagggaagaagaaaggagaggagaagtgaaggcacggaaaatgtaaggacaagagagaagaggagaaggggaaggagaaaggggcgaaggaagaagaggagaaggacggaaagcagaggaagaggagagagagaaaggaaagagaggagaggaatgaagagaaacggaggaggagggagagagaggagcacaagggaggaagggagagagaggagggaagaggagacaaaagaaaggaggagaggcacgaagcaggaggggggcgaggtgcaaaaggcgaggtagaggaacagggagcaagaggaatcgaagcgagaggacgagagagagagagaagaagagagaagaggaggaaaagaggagaggagagaagaacacagagaaaaggagcagagaagggagacgacacgaggaaggaagcaagcagaggaagagcgcgagcacgagg

SEQ ID NO: 130509 - DNA, 648 bp, Arabidopsis thaliana columbia
aacccccccttggtcgactgtatcgataagcttgatatcgaattcgcggccgcgccaattgcagcaacatgttttttgcattcttatacacaacaattccaatttaagacactcacacacaaaaagttaaccaaaaacaagtcaagaacgtaattccatcaagctactggaaagttgacttgtttatggacgatcaagccatataaaacactctgccttgttctgattgcttgactagcttcataggtttgactcgtgcgatatatactctcaagaacaaacccaggagaagagaagctttaaaaaaaaaactctttaccgatatcttgtaccagagctctgtccttgagttcttgtagatggatggttattgctcgttttgcgatactttgccaaattcgttattagcatgggaaagaagcttctgagcgttttccagtctcttggaataatcagtatcagcaagtttaaatgacgctgtatcctttgttgtctgtggaacacgatggttactggcctgtgcattgtggactgttcgaacaagttcagctaacttccttagaaaattgctcttgggcatttcttaaaacattttggttcttggcataggaaaaggcaaaccttgaaaacctccgccttctttttggt

SEQ ID NO: 130510 - DNA, 1081 bp, Arabidopsis thaliana columbia
aaagccttggggaaaagggcccaaaaaacccaaggaggaagggggagaagggggacgcaagcaacgaagatttagacaatcagggagagggagaagcaccacagggggaagggggggaaaagaaaagaggaagaaagagagcaaagagagaaaaggaagcgggagaaaaaagaagggaggcaacaggggacggaaagagaagggggacgaggcgaaggcggaaaaagagggggggaggaggaagaaagaggggagaggaaaaaaggacgagagagaagaaaaagaagaaagaaaggagaagagaaggagagaaagagcgaagaggacagcgagagagggcgagagcggaggcagacagaggagcgagagagaacaagagagagagacgagagagagagaggggcgaaaagagagaggagcgaaagaggaggagcgggaggaaacagaggagagggaagagagacaagacatgagagaaggcagagaggaggaagaacagaggcggcagaggagaaagaaccaagagaaaaaaggggacaggagggacagagggagcagacaggacacgggaaagagagccgagagaagagaggcgagagagggagcaagagagagagacgagcgggagaccagggaagagagacacagggagaaacgagcgagacgaggcaagcgacaaaagggagacaagcaccaagagagagaagaggggaggagtgaagagacgcgcgggagaggcaagcagagagagcagaccgacgcagagagagaagggaaagagagagaagcgagaagagagagcagagaggagaagacagagacagagaaagacgggagaggaggacgagagagcagggaaagaggagacgagggcagcaaaagagcgagggagaggggagagagacaagcaacgagagagagggagccaccagaggagaggaagacggggcgaaggaacgggggagagagggagagaggagccagagaaaggagaaggaagaagagagagagaagagagcagagagacggggacgggcagagggaagggaaacacgggggggaaaagggagcagaggacgcg

SEQ ID NO: 130511 - DNA, 1054 bp, Arabidopsis thaliana columbia
ggggaaaaaaacccaaggtaaaattttgggcccaaaagactggcagaaaagaaaaaaaggaggaaggaggggagagagagaaggggagaggaaattttgacaaggttttttaagaggaggaggcaggggaagggaacgaggggggaggggggggaagaaggaaagaggaagaggagagaaaaaagagagcaaaagagaggagggaaagaaaaagagagggaaggaagaaggggaagaggagaggagaaaagggagaaaagggcgaagaggggggtaagaaagagggagggaaagaaggaagaagggaggaaaagaaatggaggggagacagaaaagggaggaagaaggggaaaagagaagggagaaaggtggagggggaaaaaaggagaagagaagggaagggaaaacaagacgggaagagagacggcagggggagagagagggagaggaggggaggaaaagagcgagggaaaaagaaagggagagaaatagagaagaaagaggggagagaatacagaggcggtgaaggcagaacaaggagagaaagaacaggggaagagggggaacggaggaggagaggggagaagaaaagaaacaaaaggaagagggaaagaagagagttgggaagaaggggggagaaggaggcaggaaatgggagaggagaaaggagaacgccggcaaaaaaaagaagcggacagagaggagaacaagggaaacaaggcgagggagtaaaaaggaaagagaagacgagggtgaagaaaaagaacgaacgatagaagggggagaaagaagcaagacgggggacaaaccgagaaaaggtagaagggagacgggagggaaagaaaattaacgggacgagaaaagaagtcacccgggaaacgaacaaaaaggaggatgaggagagaagaaacacagaggccaggaggaggagaaactggaacgcaagaagggggcacacgggaagaagaaaaaggaacgaaagggggagaaggaggagaacaccgcagaggagggggggaggaaaagaaaggagcaggaggaaaggcgaggaaaa

SEQ ID NO: 130512 - DNA, 700 bp, Arabidopsis thaliana columbia
  unsure (1)..(700): unsure at all n locations
ttcgagacgaccttatcgatttgcttgcatatcgaattcgcggccgccgtctttagcttgttaccagaggaatgttttttcacgtgtatctggaagatcgagaagatcggtgaaaatgatgtgtagtcagttacaagtgtctggtttaagaatgcaagggtttatgggattacgtggtaacaatgctttagacactcttggaaaaagtcgtcaagattttcattcgaaggtgcgacaggcaatgaatgtgcccaaggggaaagctagccggtttacggtgaaagcaatgtttgaaagatttacggagaaagctatcaaagttattatgcttgccaggaggaagctagaagactaggccacaattttgtgggaaccgaacaaattcttcttggtcttattggtgagggtactggaatcgctgctaaagttttgaaatccatggggattaacttaaaagatgcacgtgtggaggttgagaagattattggaagggaagtggctttgctgctgttgagatcccatttacttctcgngcccagcgttgtctttgaactctctctttgaggaagctcgccaaacctgggccaccaatttacctttgggaatcccgaggccaccctttttggctttggggatgggcttacccttgaaaagggtttgaacggggaagttttgccaaacctttcggaagttccccttt

SEQ ID NO: 130513 - DNA, 1208 bp, Arabidopsis thaliana columbia
gggaattttgggggcgcgaaaagagggagccggagtgaagaagagagaataagtgaaacagtaagaagagagcggagaggagagagagaatattgttaagagatatttttaagtgaggggagagagtgagaaaaggagaagaggggggtgaatggggggggaaagaaagaggggaagaaagaggagggagtggaagagaggggaaggggaaggaagaggagagaggaaaggagaaggagggagaagagggagggaggaaagaggggaggaggagaaggaaagaggggggagaagagggggaagaagagagaggaaaggggggggaggggaggaagagaggggggagaaggagggggaggcagggaggggagaaaggaaagaaggaagggagggaaaagagggggagagtaggagagaagagaagaggaaagagggaagaggagggaaggggaaaggaggggagagaggaggggaaagagaggggaggaggaggggggaaaggggaaggagtgggaagggagaatgggagagggggagggaaagtggggaggaggagaggggtgtaaagggagaggggaaagagaagaagggaaacgagaggggagagaggaacgaaaggaagaacggagaggagaagaagatgggggatgaggaagcatcagaaggagggtagagagaagaaaggaaagaagtggaagcggagaagaagggagaagagagaggacagagtgatgagggtgacggtctgaggagtaggaagaaaacaaggtaagaagagaggtgcgacaggagaagaggagcataaggagaagagaggaagaagacgtggatatgtaagagaaagatgtgaccggagaagaggagacaagtagagacagtgagaaggtgaagaggaggagagagagaggaagtcgagagtgaaggaggtgagtaaggaaagagggagggaagaagtagagatatggggaggaaatgagagaaggagagaaattgaggagatgtgaaaaggaaggagaagaggggaagggtggagaagaggggagaggagataagtgaaggggagaaggaagagggagggagggaaggagagggaagaaaagagaggagctcaggtgaagagtgtagggagtgatatatgaagcacgaagagaggagagaggagaagtgaagaagagaggagaagagaggagggaaaggggaagatgagg

SEQ ID NO: 130514 - DNA, 955 bp, Arabidopsis thaliana columbia
aacccccggggggaagaaggggcccagaaaggccccagacgccgaaacgaacacatcagagggcacagacaacccccgccgcgaatataccgcacatttgcacggcacccccccgccccgaccacacaccgaggcgacaccggggcgacacaccacgcgaccagagagagcccacgggcccacacccgcgcagcaacacaccgaccgagcagagacacgcgcaccgacgagcaacggacgcgaagccagaccagcaaagccgcacagacgcagagccagcccgccacgcgcacgccaccgagaccgacacacgaccagccagagagccacgcgcgcgcagacggcgaggcgccggcacggccagaggagaacgcggcccgcgagacccgaacaggcacacaagcacacgacacagccaaaagcagacgacaaccagcgccaccaagcacggcgcacaagcagcacccaggaacgacgcgacacacacactgcggcacgcgcggcgcgcaccgcgaaccgcaccacgacgcacgatgcaagcacacacacgacacatcgaaggacgcgcgacacaccacatagcacgacacgagacaacaacgcagacgatgagaacacaagctagcgacgacgagcgcgcacacagcaccacgcgcaggaagccacaaccacacatacccacgcgacgcagacaagaagggcgccgcagacagccgcgaagacagcaacagagcacgcgcagacgaacgaacgcacagaccgccacgccgccgcgacagagagcacgacgcgccagacgagcacacgcacaccgcggcacaccagccgccgacggcgcagccgtcgcacgaaacagacataccgcgaacgaccgacaagacgccggagaggagcaccaccagcaacagcaagcagccacgcgcgcaccgacacagcgccaccacgaacgcgggcg

SEQ ID NO: 130515 - DNA, 839 bp, Arabidopsis thaliana columbia
gaacccttgggagaaattgggcgccaaaaacacccccgcgcgcgaaacacaaaacacagcccagccaggacatgacaacaacgaaaacttttccccacctttttaggaaggcaaacaacaccacacccggacgatacggcagccaggggaggccaacggacgccccaggcgcctccccgaggcacaccccgcggaaaccggtcatcccgcctcctcagccgccccgcatgcgcccgcccgcccagaaaagcaaggccgggccgacaataaaggagaacgccaactccacaaggcaaaataccgaaacgctcttgcccgcgacgacaatcaccaccccactccaacgaacgcaagcaccgccactaacacggacgccccgtgcccgccaacccccgccaaacgggacacagaccccgtcctacaaaaaagaaaccgcagaccccgccaccaccgacccacgggccgacgacaacgcaccactaccccgcacgacgaacaagacccacgcgcaaaccagcggcaaggcagcacagactgaacccaacgccgccccgccagaaaaagcaagtgccccgggcgcgagcaatcactcacaagcgcgcgcaaggagaagcgctcggagacagcgcaacaaccgcggacccaacgactcgatcaactcaaaacacacccagggggacaaacaaacaacggaacagcccacaacaatctcctcagagaagcacccacgatacaccagagaatccaagcaacccccgggaaacgacactccacagagaggccggaacgcccacacacgacatcacacgaacacgacgagagcagacacgcacacgacc

SEQ ID NO: 130516 - DNA, 1195 bp, Arabidopsis thaliana columbia
agcccaaaacccgagaagaaaaaccaaaaccaagaaaaccaagtttccaccttcaaggagcacgagacaaggaaccacgggggaaaagggggacaaccgaacaacgagcccccacagccacacaccgccgacaggacagcgacacaagacggaggacaacaagccggacagaggagcaacgacagccacagaagcccgacccacacacgaaagaacccgaggcgacgagacgccccgagcggaccagaggaccgccctcacgcgacaagggcacgcccgagcggccgcgacgacagaccggcgccagcacgcgccgcgaacacagcacgagcacacacagcaacaccgacaaggagaaaccgaacagcagagcaacaagaacagcccagcacccgagcaacacgcagcaccagaacaaacgacacgaggacgacagccgccgcgcacgcccacgggcaccagaccacgggacagagcacggcacaggacaggcacccgaccaaccaaagaccgcacaacaagacaacacggagcccaggcacgcacacaccgcgcccacgacgaaacagaccacgaccgcacagaacaaccgagccaaccgcacgcgagggacacccacccacagacacaccaccgacaaagaaaaacgcgagcaacacacaacagaaagccgaggcagcgaaggaaagagacagagccacccaacaaagcgcaggggcacgccccgcaaacgaccgcccaccacaagccacagacgacagcacacaccaaaacaccacagcaaagcagcacccccacagaccaaagcgaacacgacaagacgacgcaggagcgagacacaccgcgaccagaaaacacacgaccgccacacgccgcaagccaccacgccgccgctcagacacacacgcacgagaacacagaccacgcgacgcacaacgccaaacgacaggcgcgacccacgcacgccgcgccgcacccgcaccgagacccgcccacacacaacacccagccgaacgcaaaagcgcagcacccagcagaacacaacagacgagcaaaagacgcacgcacacacacaccgagacagcgcacccacgcgaaacgggaagcggccagcgaaccggcaaccacagcacaccgagccgaacacaccgaacctcagacacaagaggagaaccacacacggcacacggcacga

SEQ ID NO: 130517 - DNA, 821 bp, Arabidopsis thaliana columbia
gcggaccgagtatattattttgtgatctacatcttatacaggatttttttcaagtttttgtggagcccagactatgacataccggcaggatctggactggtagatcctaagaaccgaatatgcgcacgagcattggcatacaccttatcaactattacagatggtaacaatgtatattccagagaaactcaacctctgaccatcaccgcataagtcttccgtgacggagctaacaaatggtgtagaataggatactggtgcttatcataataccacgaaaaaggaatggtgtctatagaccatgaaagttagcctgctaaattgcgcctgtagatatctagacctggctctattccgtaagggcgcaaactccatttctttattctaggagagctccaaaaaatagctgggtggcgttcatagatataaactttgcctagctgacatccttgtgatcaccccttcggcctctcgttgagcggtatttcaacacgtagataaccaatccctttgaaccttatagaacacctaccatgaaacctggcaagcccatgaattggacctaactgcagacttatcatttacccattgcattttggtgcctatgaagccttgacatcactctagtttctaatcttaggttcacccctagtgtatgaaacaactcggctatcacatacccctcaatagcctacggcacccacttttcgagatcgccaacagacaaacggtcgattcggaaaacaggcacgtcttcaacttgtattgccatattcaagagctcatatgtgctgccttgcagtaacggtggctcatcatac

SEQ ID NO: 130518 - DNA, 1180 bp, Arabidopsis thaliana columbia
aaaaaaaaacctaaaggggggaaattttagggacaaaaaaggaagacccaaaaaggggaaagagtggggggagaagggtgggggattgttaaaagatgaagggagttttttagacacgattttaagagagagagaaagaggagtgagggggagtgagggggagaggggagaaaaagagagagagggagaagggggaacgagaagggagaggaggaagcagagaagaggaggcaaggaagagggagaaaagggaaaaaaggagggaaaaagaaagagagaaaagaggggaagaagggggagaaggaggagggcagagaaaagagaagggaaaggagaaagaggagaaggaaggggagggaggaggggaaggagaagaggggaaaggagagaaatagggaaaggaaaaaaagagggaaggacaggaggaaaggagagaaagagaggggtagaaaataaaataaagaaggggggagacggaatgaagctgaatggaggacggaaggagaacgaagagaggagagagaaagaggagacagagacggaggaggatgaggagaggggggcagtagagaagaacgacagcggagaagcagggagacgagacaggggaagtaggtgaagtagaataagaggacgagagagaaaagggagaggagagtagtaaagatgagagaaaacgaaggatgaggagagagctgagaaagagagggaaaggagggaaagaggaaggaggaggtagagggaagaaaagaggaacgagagagaagaacgagaagggaaatagtttctatagagagaagaatgagaacagaaaaagaggaggtggagagatgcgtaaggggaacgaggtagaagagaggggaagagagaggagagtagaagggaggagaaagagagaaaaaggacggagaagagaaaggaggagaagacagaaggataaagatgaaagcgtggaaagagaagacggaaatgagaagaaggaattgaaggagagaagaaaagagaacgggagggaagagggaaatcttggaagagagaagagaaagagaacaggagaaaatgagaagagagcgaggaagaggaggtgggagagagaaaggaaagggagaggaggagaaagctatgagggaacaggaaaagagatgagaagcaagagagaaagagcgagaagggagtgggg

SEQ ID NO: 130519 - DNA, 524 bp, Arabidopsis thaliana columbia
  unsure (1)..(524): unsure at all n locations
ggacgattggagcgaaaagctccatatcgaattcgcggtccgatatctaaaaatagagtgcaacaattttatatatattttttcacgagccanacggggcaacaggaagagcataaatgattgggtaggtcagcctataaaccgcaaaagcaatttcctagtacacatctcatcgacggtggacatcgacctcgttctttattctaatctacttctcgtagtgcgaccaggcagaattctacactttaggaccagtaggagttgtaataagacttatcaatattcattaacaactaattagtaagtgaagaaccgtagaaccacaattaactatcaagaccgccctatgatgctagcgcttatgtgccaagcatatcatcagctatctgttatagtcgtctaatttccaaccctatgtgcatggacgatgagtatccgcttgagtgactacggtaactatcgctggtatagacctccatattgccctcttatctcttgccaatatgaggtcatgacacctcatc

SEQ ID NO: 130520 - DNA, 802 bp, Arabidopsis thaliana columbia
tcccataagctccatatcgaattcgcggacgcatgaattataacatgcaatttttttcccttttatagcataaacatcatgggccaacaaacaatacatatatcaatctcttgaacaagcataattcaaataataatgatagcataaattcattaaaaccctcaagagtagtaacttatgcgtctctgtcccttttacattcagctggcataaccgggaacctagtccggtcggcacagtagtagtagatggtccacttcatacgaacccatttgagacgacgccattgttcagcgtcaaggtcacggaactctttctgatcccaccacatgcggtcttgtgtggcacagtacttggcttccacagaagcttgggaaccatctatgtggaaatctttgtaagatgcaacgaaaggtgcattggcccaactggtcttctataaaccgcctctcgtgggccaatcatccgcgttccaaaaggcttgagtaaagcttcattggttggttgaatgggaaaacgtactcctagaatccttatgcatttcttgaacgtctcggattggtatgtttgcacaccaaaaaaaataccatcttggtacattgtctcccaaaggactggagtaaagtgggtattaagccctttacaaagtgattccacatcccagaagcatctggactttccgggtgggattccccttgctattccccccttttcactttacctgggtggaaatatacaatctggggcccttggtaaattattaagccttgggttttgttcacctgggttctcttgcttctcc

SEQ ID NO: 130521 - DNA, 490 bp, Arabidopsis thaliana columbia
aaaaaacctttgggaacttttgggcccaaacggcccttcgggaagggcctgagaacatgtggcgcagatgaggccaaccagattttttccaagttttttaccaagcgagacgtgtctgcggagagggtggagatggtggactagagaaaggagctattcagacggggaacgaatggctaggggagctcggaatgcggcagaattacgtggaggggttgaggaggggagagggggtgtggcaaaaggggagcgcctgaggaagggtgcaggacggggggagggaagggggaaggagatgggcggtggtgagagcggtgaccgagggatggatagcgaaggtgtggagagggagaagcagggaagagggacgtgaaggtcaggatgaatacacggaggagagagggggaagggaaagccgaaaggggaaggggtgcgcaggggggcgggggcagcaacgggacggggggcgatataaagggaggtgaaaggg

SEQ ID NO: 130522 - DNA, 1166 bp, Arabidopsis thaliana columbia
cccccccattgaaaaacctgaaggaacccaatgcaaaaagaaccctaagggaaatagaggccaaaacggaaccccgggaagaccacaggacaagacaggccacaagagaaaccacacttttccacagggtgccaccggaggaaacaaaaagagaaggaggacccaggagaacaccgaggcgaaagaaccgacagaaggcacaagcaaacggcaaacggaaccagaacgcggacgaaggcgaacgaaaagaacgacgaaaagggaagccgggggcacaaggaacggcggaagcaaccggcaggaaggagcggacgaagagaacggacggaaagaaccgagcaagaacaaagacaaacgacagcaaaatcaaggggcgcgaacagaacaaaaccactgaaggcaaaaggacggcagggaaagccaagacaaagaggacaagcccctgtacgcacacaggcaaagcgggaaacgagggcaccaaacagcacccaccgcgcccgagagacagcagataacacgagaaggcggaacacgcgcacgagggcagaagacgaccaagagaagacgaacagcacgaggacgacgaggcacaagaaagaggcgaagccgagggacgcggggcaaacctagcaggcggcgctcagcaacaagccggctagccacacaacactcgaggacgaagggaatagaggacaaaggcactcgaaagggggaaagaagggccaaaccaaaggacaccgagggagggaaaaaaaggaggggagggccccaaaccccaagagcaaagaggggacaaaaaacacgcaagaaccaagaacgcggaaggagaggcccccccggaaaaacgaagagggcgcccggggaaagaggcacaaaggcaagagggggcggagggacaaaaaacagggggcaaacccaaaacagagaacggacaaaacaaccacgagggaaagggacacaccaccaggaaacgaaccaagccgggggcgcaggccaaaaccgaacgagcaagcaaaacaggggggggcgcgccgaccaaaagggcagccaagaggctacaccaacgcagggccaaagaggaaagcccaaaaacaacgcaacaaaaaaccggagaaacccaaaacaccgaaacccaaatcgggcgccacaaacgagaaccaccagga

SEQ ID NO: 130523 - DNA, 620 bp, Arabidopsis thaliana columbia
aacgaccccgcggccgcgttgctttcatcgccgctgatgaccaggctttttccctgtttagctctggctgatgaatgcaaccaggattcttaaaaggtgactttgagtcttggactttgcgaccgggaaggcaacaattccgcctaagaagtgttgcgacgctgttgaagatatcaaagaaagagacccaaagtgtctgggtttcgttatacaacaagcgaatacaggaggaccagccttgaatgatcttggtgctcaaagacaaactattcaactccacttcttgtagctccaacgtacttccaatgccaagtttagattactactcgtcgaacatcgtattcaaacatgcacacaacaccggggaccgcagaaaagttcggcaactcagctacttccctgattagggaggatcatcttccgcacaggaaggtctaccccacccttttggttctcagcccctgccgccttttgatatgggccggtcttccttttggttccttgggaccccttatgggcccttaaagagcctattggtttatactccattctcaagggggcattgggctaaacaaccctctactttccatctataacatgaaaatatgtctcgggagctc

SEQ ID NO: 130524 - DNA, 561 bp, Arabidopsis thaliana columbia
aaacccttggggaaaatatggggccccaaacgaaccccgaggaacgacgaaaaacagcgcaaaacacgcaaccacaacgaaattttacacaaattggccccgccacccagagcaaacgccacaggggggggacaaagggcagagagacaaaaaaaaacccccccacagggcgacccggagaaaaaccgcaaaaacgggaggcagcaaagggccaaaaaaggagccgagccgggacggcagccccagggagaaaacaccgagcagaaaccaagggcgacaaaccaaaccaggggccgcccaggaagcccagggagaccgaagggcgcaacgggaaaagcagggcacaaacacagccaccaccgaaccaagacggaaccaccgagggggagagccagccaaaccggagcggagccgccacaaggcagcacgaacgacaaaaagaggaccgcacacccacaacagacggagagccaacaacagacgggccacgaggaacgacaacaacccaacgcgacaagacccagcaccacggacgagacgaccaaggcgacacccgagcag

SEQ ID NO: 130525 - DNA, 942 bp, Arabidopsis thaliana columbia
acccaaatttgcctttccgcaacaaccacaggggggaggcaacacggacccaacagcacgacgaacccacaagcagaaaacaacaaaaaacgaaaaaaccaagcaacacccgaaaacggacaaagacgacaggcagccgccgaagaaaacacgaagcaaaacgcacacagaaacaagcgaagaacagcaaaaggaagcaagcggaggcacacgacagaaacccagggagcgaggaaacaaccaagcggccacagcgagcgagaagaaacacccgacgcaacccgacagcgaacgtaacaaaacagcgccccacgagaaagccctcccaccggtggaagagagcagccccaagagacgacgcaccacaggaccacaacaggagagcttagaccgcggagggaggctacagaaggcagcatcgcgaaatatgagcaatcaggagaagccacatgacacaccaccgagagaggccacagacaatagatacacaccggaaaggacgggaacgacacacaccgaaccacacccaagcgagacctacggaggagaggaagcaacaaccacctaccccagagacccaaaaagggactccaacacacgcatagccacagaagagcacgacagagcccccacacacgcgggaacgacacaggaaggagaacagcgcccgcagacaaaagacacagggacagccggccagacaacgaccgcggagggcgagaaagagcgaacacccaagagaggcagaccagcaaaaagactacagcaaaggaggacaggggggaagacgaacagagacaacggagcgcaaaaagacagagacgcaacaggacgacacagggggagcaatagagaggagaccccgacaggggaacacagaagggagagataccgaacaaacgagcagccaccgcacaaccacagcgaaagcgacccgagggc

SEQ ID NO: 130526 - DNA, 987 bp, Arabidopsis thaliana columbia
  unsure (1)..(987): unsure at all n locations
ttggtcgatgtatccataagcttgatatcgaattcgcggccgcgtcgatttaaaattctatgttttgtatcttttccttgacaatcgggtaacagcgaaaaaggagcagttagtgaaggaggagctggaaaaggtgacattttgggataaaacattaattactgggggttttcgaaaatcctaacactaaacttgaatgtgttttctctgatatttgcaggtgaaataagcaggtacacatacaaccgacatctgggtcttaccaccggattacgtcaaaaattatacagaccggattgagaattttgaggaagtgactgctcccttgctgaagaagcttctggagaatcgaaaaagtccacaagcagaggaagtggtaaaatgaggatataaggcaagttcatgtcnccttccacttctatctttattttccattcttcacatttcatttatactcatatatcatcagtctatatctttcaaagtattctaccccctctttttttatcttcattctttctaatcttctatccctgaacattactacatatttttctcttttaatactcacctgatcactcattttttttatctgtcttcttggctgttactgcttgaatcttataactattgaatttagcttttttactatgtctatacatatatgacttacacgtcccgtctcaactactctatttcgtccttcgttgactcttcatctcttacacagtacattacactatcatctacgccttcacattcatctgttacactcatacatcaccttatctgtctcctcatatgattgggtcgagccttatataggattactncgctatgttaatataggctattctccctacgtacatcactgctatactcaatatctctaattcatattcactatatcattacactagatcatcattatctgtcttgtgacacatttatttctttttgttctaaatcaataattaatctcgacat

SEQ ID NO: 130527 - DNA, 955 bp, Arabidopsis thaliana columbia
ggccaaaagccccacatcgaattcgcggccgcctctatacagcccggaaaacatttgaacgttttacacggcggacaaagctgtcacgttgaggactaattagccaacgaagatcctcaacgaaggagcggcgagagatgtccagaaccgaaaagaccaagaacgacactgccagatcaggcaaaacaccccgaaagaggaagacttccagcagctaaacacggtcaaggcaaggacagacaacccccgaaggggaggacaggattaagatcaatggccccaacaaagctcgaaaagaaaacggagagcaaacttcctgaagcatatggcgctgatgtggaatccactctcaagggccatggcaatggccgaaatcaatggccactgccacggccccgaagaaggcaggcccccggatagccaggaatctgcaggccttaacaagccggacggcatatcaacacccaccctccatgcctaatccgaaagaaaaacacccggcctggggcaatggcatgcctagacctggactcctaaccaggacacggggaccaatacggctcaacctcaacacaaccccacataggatcctccgtcttaaacgcggaccatagggccaaacacagacgcggcgaggcttgtaaaaaccacacggtaaaagccactgggcgttaaataatctttgggcgtacacctacaagagcaaagaaaaatatctgagactcaaacccacgttataacacaacgacgggaagacaacaacttaactttccccagcgctggcttgcgcccccgctcataaccctcggaaaggggggaactcctccttaaaaagggcggtgaacccaaacgacgggctcctaatacacggggcgagagctcacccacaccggggtaacccacaggcacccccgcgggtgccaagagaaaaatattccccccgtggggtcgcaac

SEQ ID NO: 130528 - DNA, 571 bp, Arabidopsis thaliana columbia
cttggaaaattgaggcccaaagctcgccaacgaatacgcggccgcgtaaaacccttcttcctgaagttttccccatttcaaaaaaactggtgtataaataaaaatccacattgaaggcagaagaatatctacctctctctctcaatctgtctgactctgctctctctatctcccattgaatatagaactttctatcaagcacataagaccttgaagaataatcataaagtttccaaccgaaagtttgtacaaaggaagaagatagcctttccttttcttctgctttgctccagaggagactagagagacctatcagttcagtttgtgttggatttgacggcgaactgaaacgagaaaatccacgtacgaagcacccacccgatcccctgtcctctaccatatacgattggaaacaacatattcccaagctggatctccttttcttgcaccaattctaatggcgcaaggttaacgaacctttcttttggccttccctttattttccattttcaccccacgggctgaatctaggaaaccttttcctcttctggaaattagcacccttgtgact

SEQ ID NO: 130529 - DNA, 1188 bp, Arabidopsis thaliana columbia
gaaaaatttgggcccaaaaaaaagccccagagaaagagacaggagcccaaggggcggagaggaacgggcgaagtataaagaccattttcaacggagaaaggagacaggaaaggagggggaaggggggggacgacagcaaaagaccggaacccgaccagagggagagaaaggggaaaacaggaggcgaaagggcaaagaagagccagcaggggcaggcgagaggcaaaaaagcagagcgggacgaggagcggagaagcgaagacggggcacggggaggaacgaaagaaggagggagggggaaaggcagggagggagaggaaggagaacaggcagccgcaacacgagaagacgcgagaggagaggaacaagacggccacggaggccagagccgccgagacccagaccagaggcgcagcgagaagcgagagaagaggagaggcacagcgcagagccagcggaagacaagagacgcagcgcaagggcggcacagagccggaagcggaagggagaggggaaagaagcgacgagaccagggaggagaagaagcgcagacgcgacgcggccaggtgcagacgagaccgaaggacgggaacagacggaacgggaagcacccaccaaccgaagggccgacagacacacggcgaggacacagcgaacaagccgacgagcagcacacaacacggagacagagacgcagacacaggacgggcacccgagcagacgacggcgagaggcggacgagcgaacacgagcgcaagagaaagagccgagaccgagacgaggaaccgacagaagaggaggacgcgaagagcagaggaccgtagacgacaggagggcagaccggaagcgagggagaacacaggagagggccgcacgacaggcaagagaaacaacggagacaggcaccgaggagagacaggaggcgagagagagacaaacgaacgaggagaaacgagcacagaggcgcagaagcgaagacagcaggcgacgaggcgccaacagagcaaacgggacgacgagaggaacgcgacggaggcaccgacaccacggcaggcacacaacagcggacgggacgaggagacacggcgaggacgcgatcgggcagacccgagcggcgccgggacgaggaagacgaagcaaggcggagacgaaaggacggcaagcgaaggagagaagaggcgagacaaa

SEQ ID NO: 130530 - DNA, 585 bp, Arabidopsis thaliana columbia
gaaatgccgcaaaacacccccggcgccggcaccgtaaaaatcttaacgaaccaaattttttcaattttccccccaccagcctttgccgtttctggcataaccagaggatgatgataatccctgactgtgattggaaaaactccaatggagtcccagggccaaatgaccgccgcgtcgcgcttggagaatctgatagcaatggctcatagaccgggcttctgtacttgggctgagtgaaggatattggatacaagtccctttcaatggtccttggttgcgtctccacgcttcctagcgtcagtatcggaccacccattccttcaccttgcctggactatattgattttgccgggacctgtatcgtgaaccggaagtaccttcaatgcgaaaataaggaccccatgcctgcttccaacttatgaaaaaaacaatctgttttccccagtcaaggaaaagggttggagaacaccactagggccgcgaaccaatgcactgtgtgggtacccaattcccccctgatatgaaaccgggtactttgggccggcttgcacacgagaaaaacaggctctgcaatattggccccat

SEQ ID NO: 130531 - DNA, 844 bp, Arabidopsis thaliana columbia
aactgggaaagggccaaaaacccggaaaagagcccccgcccgaacacagtttaactttcaaaacaaaaagcccggggggaaggggaaaagaaaagcacaaacaagaaagaaaagaggacaagacaaccaaagaaacggacgcaagagaaccgggcgcaaggacaagacaagaagacgaagggcacgaaagagacagaagaacaaccgcagaagaaaccaacgaggagagcgaagaaaccgcacaccgaagggagggcaagcaagaaagagggaaggagaggagaagaagagagcacagacaaaagcacgccaaaagggaacagacacccgacaaagacaacggaaaagcaacaggaaggcgaaccccgaacagcgcgaaaaccaggaagagaaaaaaagaacaaagccagaagagagcaacgacacaaccgggaaaggcaagccgcagaccgcaaaaagaaaggaaacccaaccgacagcacacagacccaaaagcagaagagaacggcagagcacagcgggaccgaagaacgaaaaaaaccggaggaagacaagagacggagggggacaaaagacaggagaagggaaggcagaacagagacacggaggaaggacagcccacacgcaaccaaaacaaaaagagggaaaaaagcagaaaagaggcccagcagcgaaccagaggaaaggaaaaacacgacagcacgcaagagccgaacgagcaagaaacggcccaaacacagcccggcgcgcacaaggccaagacaaggaacaacagcgccaaagaaaacgacagagagaagagagggggacagccaccaagggcacgaacacgggaggcagaaaa

SEQ ID NO: 130532 - DNA, 984 bp, Arabidopsis thaliana columbia
  unsure (1)..(984): unsure at all n locations
ccattgcgaaaaaaacccttggangaaaatggaggaccaaaagacaagccaaaggggaaggcaacgggaccgacgcaacgaccacaaagaccaccggggattttttcccgattattagaccagcgagaagaaagcaggaagcaggaggcaaagagccaggcaaccaaggagacacgaacccagagacagaaagagaacgcagaacggacaaagacgccagaaggaaaaaaacaaggccaacgggagggccaaaaggaccgagggaaagcaaggggcgccgagcaaaggaagaagacaaccggaaaagaacgagggaagcagagccagcggcaaaggaaaaggcggagacagcagactgcacgatggacggccaccggaagggagagggggggggaaacgcataaaaatggcctgcccacaggggaaaaagagcagaggatgggagaaagcggacacaaatacacaagaaagcgctaaacgcaaaaagaaggcagcacccctcgagaaacgcggcagggcgaaacaagaggcgaaaacgagaggggcattcccagcaagacaaaaacagaagacgacaggacgtgaaacaacacgacagcaaagggagagagacaaaagaaaaagaggcacagcacggacgacgaacgagagggcaaaaccaagacagtgggggaaaaaagacatgaaccggagacaagacgatgcagggacgaagagagagcggcggcgccaactcagaggggaaagagaagaccggaagggaagagggcgagaggagagacacacaaagagggggacagacaggggatgatacagacgcgtgcgagagggggacaccgacaagagagcgggaaaaaaatgaacgacggaaggaacagggggaacgcaaaaaagcgcgaccaacagcagagtgaaggacccgagatcagggagcaaacagaccagagcaaagagcaaataaataagactgccgcacagacaaac

SEQ ID NO: 130533 - DNA, 1357 bp, Arabidopsis thaliana columbia
  unsure (1)..(1357): unsure at all n locations
ggggaaaataggggccccaaagagagccccagagcgggggacgggagaaacgagagaggcagagagagagacagaagctgtttacacgcggtttaggaagaagcgacaggcacacaaagggaagaggggggaggagggggcgggggacaaaagacaaacgccggccgcaggaccgccagccccgccaacacacggagaggaccggagcaccgcgcacacgagagggcccccggcgcagcagagaggcggaggacagaaagacagcgagcaagcggcacgaagggacaccaacgaggacccgcgcagcaagcgcaacacgacagccgacacacgagcaggcggcagcacgggaggaggacgaggcaggggagccgcggcggcaacacgacgaggcgacaagcgagccgacgcgagcagaagaagagaggaggagaagagagcaaggaaggaagcggaggaagaccacacagagagatgcagcgaaaggagcgaagcgagagagagatgaccacacnagacacaggcggcagcgagggaagtacgcgaacgcggcagaggacgagatagaggacggcgcatacgcaaccgcggaggcacgggaagtagacgacgcgacggcgcagcgagacgaggaggcgacacgcggacgagcgcaagacaaggagacaaggaaagcggcagccagagaagggcaggagagggaggagagcacgaggaggaggacagcgacggcgaggaaaccacaggggacaggagccgagggcgcagcgcgagagcaagaagcgcgcgaagaaaaacgggagcgacgaacacggcgcggagagagacagagagcccgagaccaccggcgcaagagaagcggggaacaaggcgcacagcagggcccggcaaagcggaggacggaccagcgcgcgagggaagacggaaaaggcgaagcaggcggggggaggcaggggagagccgccgcagacggccgcggaacgaagaggaacgcacggcgaggagacaaggagaacagagaagagaaaggaggggagcgcagggaagcggagagggaaagacgacacgcggagaggccgacaggagaaggggggaccaacgcggagggagagaaggagcaccgggacgacaaaggcagcagggagagaaggcaacgcgcccaccagcaaggggcacgcaacacggcgggacgaaggccgccgaaggacgggcgacgcggaacaaagcggcggacaggcgcacgccagaaggaagcgaccgaggcaaggccgaggcacgacaagggaggaaacggggacgggcgcaacacatgccagggagaccggcagaagaacgagagagccgaaacgaaggcccg

SEQ ID NO: 130534 - DNA, 710 bp, Arabidopsis thaliana columbia
cgactgtctcgatttgcttgatatcgaatccgcggccgccttcaatgcctacacaatcggggagtgatatttaaggggtttcgggtatccgcccggctgtcggtggcacagttggctctggaaaaccaaggcctatctcttgcctgctaggggaaatcccaaaaatctctggcgaagttagaatactgtggcgctactggctatgagcattaatcggctctgggtccgggcggggaacatcgcacacaacagtttatttggcagtccaacggagaaaacaaagtccgagagagctacccaagcatgttccctaacgaaatatatagggctgtggtgacatggggaccagactatcatccgggagagacggatcaatctcagccgcggccaaaagcagcgtgtcctacctgccagggcatactatcaacatgcctgcatttatttactagacgagcctattagtgctgttgaggcacaccctgcctgtgaactgccttgggattagattctatctgcattgcctgacaaaccgtggttatcgtaacccatccgggggaggttctcccctgcagctggagcctaatatctggtgcttcaccataacccgctctggcgagtgaaaccctaaacttcttatggttcaaccagaaaagggcctccctgaaaagataacggggcgggtggagtctcttaccgaaaaccggggccta

SEQ ID NO: 130535 - DNA, 736 bp, Arabidopsis thaliana columbia
gccaaaaagacatcgccaaaggaggaagtgagagagacaggagagagggtaagaggagcaacaacgggtttttcccggtttggcgacagagcccgcacaggacgcccccagagccagggggggaaaacacaacaagggcgggcgcccaaaacacgagcacaaaacgaaggggcccgcgaccgggaaagccaccggcagggcacaagcagaaaaggcgggacagagcaacacaaccagacagacgggacggagcggagacagggggggagccccagaccggacgaagagagcgcgcgcacccgagcatgcgcacaacggcgcaagcgggggacgggcaaacgggagaaaggcaggcaaggccggaacagggggaaacggcgcccagaaggagggacaacacgcaggcgggcacagaagacagacggcacagcaccagcggaaagcaagaagcaccggacagaggacagcaaggaggccgggcaaggacccggcaagcaaggcgccggcaggaacgaggcgaaacgcgcaagagagaacggagataaagggcggagaaaacggcggaggacagcaaagccccgaccgagggggccccgaaaacgacgggggagaaggacacagcggcccgcgcaaacaacacaccaagcaccggagaacgagccacggggcagcgggaggacccacaaagaagcaccgcccggcgacgaggggcgcaacacaccagccagacgggaga

SEQ ID NO: 130536 - DNA, 884 bp, Arabidopsis thaliana columbia
aagtcttgcataatcgtaatattggcggtccgctcaaaggaaagtacaacccgcaaacattttctcactttgttgggacacagtgaaaaatagcgtgaacaacagtgtaggattgacaagaaactagatgaaaaagcgcagatatacctaaacataacatgaatcaacatataaattacagcgacgggtgcgcacacaaatgaaattacatgggaaacagagataagatcttatatgaagactgagcatgtatgcatggctgaaacaatcaggtccaagtacaggcaaacctacaagaaggtgttaaacctcaacataatgatgctttatttcgtgagacacagggacgacacggatacatgtgcccttgttgccatataaaatactgagagctaaatggagaagtaaggctggatgagctaaacaaatcgaacagtcagcacacgccttacggctttctaagaatgacaagacctggggaaaggggggctttttttaagaggcttgggatgcggtatctaccacaaccaccaacaggcccccaggacaaccacattagtctgaaaaggggccctggacaacaggcgcctcaaatcaagaaggggcaccacacatgcacagaaacacggccatccaaaaggggaccaggcacgtaattattctggcatggccactaggcgcgctgcggccagactagtggcatcactcgtaggaacagggggcccagacacctccctctgaagagtaaaaccctggaacaccccacagggctcaattcaatccccccggggatattgcgtacccagttaaaaaggcttattgcaacaaggtattttggcccaaactgaactgggcctttttctgcctaaacaggttaaagaacg

SEQ ID NO: 130537 - DNA, 778 bp, Arabidopsis thaliana columbia
agccaaacccaacgaaggggcgaagacaagaacgatttcgtttcagacgagcagcagagagaccggaaaacgcaagacaagggcaacaggaaacccggatgcaaaaccccaggaaacgagggagaagagggaaaaccacacaccggaggccgccggggagcggccgagaaggggaaccagaccagaacgaaccacaagagagaagagacggccagggagcctagagcgcgccgaagctcagcaacaggactgcaggggacaccgccatggaccgagccaccaagagcgggcgcaccagggacatccgccaccggagaaggtatgaccaccacacggcagaaaacaaaagcaccgagggcacccatgaagcccggtgccggaaacctatgcacacatcgagctccagggggggcgccaataggcaacaccacaacccctcgaagaagcacctggaacaaccgggggacgcccgcggggaccgccgaaccaggaggcaccaccccacacaccgcaaggaccttacaaagcccgagccaagatgagaaacactcgggggagacagcagagggaaaagggcacggacccccacaggaccaccacaaaggggactcgcgaccccaaaatccagaggggcggggtgcacgggcctaccacccgaggggaggcgaacaaaccccacaaaaggggccggcacggacattgggcaccgagatcgcccaaaccgggttaaccaccgtctccgcgagagaggtgcggccgacctccaaccccggggcgc

SEQ ID NO: 130538 - DNA, 720 bp, Arabidopsis thaliana columbia
agccattgggaccccccttaggtcgattttatcgataagctcgatatcgaattcgcggccgcgtgcaatccagatcaaagaatttactaccttttcaccacacaactgtcctgacccaaaaaatgaacgcatgtttgacaaaaaaacaatcattacaataacacaccattttgtggttaagaatatgaagaatcaaacccaaaacccacccatgagaaagaagaaatatattgaaaaaccaaaacaataaaagagtaaaattgaaggaagaaaaacacaagaaactgttcattgtcttcatagctgcggcgctgaggtcactacataaccaaataacacaatggcatgttgctcttagtatatatctgacatggaggatcatgagatctaaggatgtttgtgatgtttccacctgctaattttttttggagaatccttagaataagttgaatttcttcttcagtaagtcttgtttccatccaggcaatttgtagaatgattctttctccatcccaaatacagtcttgaactctacctcagacaggtaagcctctctgcgtttgaagtcaatccctgtcacgggtttctcagatttggcttgtagtcgttcgtaggtgaaagttactccagttgttctacttcagaatcatcctgctttggttttgattcctcagcactcggttctgctgcaggtgacactttcttttcttccttggcttc

SEQ ID NO: 130539 - DNA, 587 bp, Arabidopsis thaliana columbia
  unsure (1)..(587): unsure at all n locations
gtgagattgtatgccataaagctctgcactatcgtaatttcgtcggcacgaccccagaatctgagcagcagcaacncactttttatttcaccttttttttacaactaccattctcccagcaaaatcattgagtgatgaattagttccgtctaatcttcgagagcactggggagctaacctcaagatgaacacaactggcaattactaaactgataaacactcgctggagaatagcgcgaatgaaagaacaattgtctccgacagacctgtgcccagattcttgttatcgaacaaatgattggccatagatctgtctgatcggcagatctgcacccgctggcattgtagattaacatgcatcattccccagttgtggcccgctcttgtctacgagctatgagaaggagaagatgcggaatcaatccttgttcctcagctgcagaaaccaagatacaaagaggcctcagaaggtgacgtcctgtctatatcctgtgtgactaacagaccgaggagtggccttatcttgatgtaaggcacctgtctgagcttcaaactacaccttcatgacaggcagaaaaattttccat

SEQ ID NO: 130540 - DNA, 851 bp, Arabidopsis thaliana columbia
ggattagctacacatccaatccacggccgctttgaacagaccacgtcacatacggggaatttttttgttatattccctcaagactggaagaagtacaaaacgcataatctaatttgttaccaatgtatacatgaaggacatgacagaatctctctacctgagacgacgcaatgaacccaacaacaagctcatgatttgctatctaacctgaccatctggagacagtgcagagtatcattcatggcatacccgaaagctacgttattccaatgtacacacaacaatgtatgcaggtgctctgatgtttctccagctctagtgagtcaagagctttgagtacaaagcagaccagtggcctattctatttgccgtcttgactctttttgcacttcccctgagctatgccgtgaagaacaagactacttggaactgcgaagctttgagtgctacaatgaggatagcttctcctctctgtaatagagagataacctcaagcggtttgcttcctagatccttgactcctatgcctaatccctgctggggtagaccctggaagaaaaggctctctgactcggttatatgactgatcctcccgattaaaatcggtggtttcccgcggacccaatgtccttgagaggattccaactttgaaaaaaatacgaatccgggttggagccatcccaactacggcggtttttatacccttgggccgggaatcacccgcatcaccctttttttttccctaaccctcaattttcctttcctttcaagaaccccccaacccttggggggggctgggcctcgtatcttttacacggggccgccaatttctctttattcaacatccccgg

SEQ ID NO: 130541 - DNA, 717 bp, Arabidopsis thaliana columbia
gaaggggactgtcgggattatcttcacatccaattcacggccgccttaggctcaccctaaagtacaccaagatttttgaatctttgtctggcaaagaagccacatgattgaagtcttacgggttttgattcgataaggaccataatgtgaacaacatgaggacatactatattaagctgccaccagatgaacaaaggtaggctgctatgaacctggttgacgagtctaccggtacagaacaccgacccagccgagaggatttactggattgaacatgctgccgtagccacggtcgaagacaccatcgaaaactgccaaaacaccgttaaatgaagcgtgatgtgcatataggcccataaacgaccccattggtggaagctgctttcagcattgtcccaaatgcaccgatacaacctttaacagacgcgtctaggataatgctgatgatgtcaccctgtcttcggacactacactacaagtactgtcaaaaccgatcacaatacctgcacatcaccagcgcttcgtgttggcccattacagcccttcgttgaaagccgctgccttttttatggtgcttgcccaatctgttcaggatcttgatattcggaagaggtgggcattcacattggtggctacagccggtgaagacccaggggttagtcccggcctggataaagggtggtttttaataaacattatgggggtgggggaccattt

SEQ ID NO: 130542 - DNA, 767 bp, Arabidopsis thaliana columbia
ggggaattgcagccatgacccacacatccgaatctctggcgccgacctgtgtgaacactggttttttcctatttcatgccgagaacatgagcgctaagctttaatgtctcaaacggaatagcggattgtcacatggataacgcgcctgttacatagacctaacatacaccttctgctaatgccatacactggtgactaatcaagtgctgtggtaccgcgcccggagcttgttgatctgactatggatcctcggcgagcgaacacaggagcgaccgttacagatgaaacaccgtgaaatgctttgcaataagaggcggatcctacagggatcctagcagtggggatggacgggctctttatgcgaatgaccgacccactgaacatgagagtagtttgtttgttcccggcctaggggccaccacgcgatgcagcagcagtcgcttcagctacagcttcatgagagaggaatattagaggcctcccctttttgctgactatactgagaccaaaccctatgaagcaccttgagctgaaggtacttggcattgcattaccatattgttggaagagataaaacgcatctaatggttgtagacacccttggaagacttttttgcggtaagagcgggtcccccttaaacgaaagaaaaaataatagggtggggcccttcttatggggatcccaaggttttaccgtccggccgggcctttcccgaggcccaaataaatccctcatattatttggggaacccccagaaccccagaac

SEQ ID NO: 130543 - DNA, 588 bp, Arabidopsis thaliana columbia
aaaaaacccgagaggaaccacgcaaccaacccaacaacacaccaacgtttctccagcatccgcacccccacacaaaagaacgccggggggccaagagcgggacaagcacaaagcagagagcccccccaccgccagcccaaaggacgcaaccacaacaaacaaccgacacgcgggagaacacaacagaacgaaacacaaccgcgccccaacaaagccggccacacgcgcagccacagcacgcaacaaaaagccggcgcccccaaaacccaaaaaccaagatcaaaccacgacgaagacacggcacaaacaacgaacaaagacccaggcagagaccaacaagccaaaaacaagcaccaccggcaacggagcgacagacgcacgcgcgcacgaagacagaagcgagagccgaacgcagacacgcacacagacacgcgcgcacccggccacaagaaccgcacggagacacagcgcgagggacaaagagcaaaccacgggcaccggaacataccgagcaacacgggaccacgacacagagaaagccgagaacacgcgcgaccgacgaagcacacacagcaccaccaagcacac

SEQ ID NO: 130544 - DNA, 612 bp, Arabidopsis thaliana columbia
accaggaatgggcaaggccccgcaaacaacgcaggggcccagagacttaaacaaaaaacggccaggacgcaacacacgcacccgccgggcgaacaaaaacagcaaaacgagagaacaaacggaagcacgacagagcaaaacgacaacacacgaggacaccccgcagaaggacgagaccgaacgggaacagccccgcacgggcccgggagaggaaaggaacggggcggcagggcgaaacgggagacaccaaaaacaggcccacaagaccgagagagcaccggcgcggcaagaagccccacccacaaggcaaacagacagcagcgcgaaagaggagacaaacagacaccacggacgcaagcccacaacgggagggcgaaagagcgagaaaagcaaaaggacgaaaggagacgagaggaagaacccaaccccgccgaaacgccgagagaggagacgcgagagcaagaacagcaccggagaggcagaagaaacaaagaaaccggagggccggagccggcgacagggacaccacgaaaaggggagagaaggacaagaaaagaggaaggcaagggcggacagagaaaccgaaggccggaggcccagggaaccaggaac

SEQ ID NO: 130545 - DNA, 735 bp, Arabidopsis thaliana columbia
tgggaaccccccccgaggtcgattgtatcgataagctcgatatcgaattcgcggccgcttattttttatttttttttttttttttttttttttttttttttttttttttttttttttttttttttttttttttgggggcccggaaattctggcccccgggggaaacactatttttaaagcggcccccaccgggggggaaccccaacttttgttctccttttggggggggtaaattacagcttggggcaaaactagactaagctttccccctggggaaaatggtattccctcacaattccacaccaaataccaaccgggaccctaaaaggtaaaaccccggggggcccaacgggggggcttacccccattaaatggggtgggcccactggccgctttccaaagggaaaacccttcggggccccttgattaatgaaaccgcccaaccccggagaaaggcggcttgtgcatatgggcgctctttccctttcctagaaactgactctcctggcctcggccgacaagctgtggggcgagcgggatcccacttactataaagggggggaaattccgttatctcccccaaaatacggggggggtacatcccccgggagaaaacaaaaacttttggagactaaaaaaggggccccccataataagaggggcgccacgcaacccccccttaaaaaacaaggggccccccctctatactccttctagggcgattctttttttttc

SEQ ID NO: 130546 - DNA, 1054 bp, Arabidopsis thaliana columbia
acggagccggaagagaaacagggcaaccgggcagacaagaggcgacagagttttggagacggaccacgcgaaaccaagggcgaaggcgaggggggggaagggggggacaccgagcgaggggaaccaggagcggcgcggagacaaaggaacggggaagagggcaggggaaaggaagcgaggagggacccgcacaaaacgcggagaacgcaaggagggggggaaggaggcagaagagggggcaacgggagcggaagcggggaagggaaaaggcgggaacgcgggcgggcgcgcacggaagaggcgcggggggagggccgcgaaggcacggagaaggaggagagagaagaggaaaaaagagggcgaggggaaggagaggagcacgggggcggcggagaaggaaggcagcgcggaccgggagcaccgggaagcgagccggagaagagagagacgaggacgcgaaggcgcgggacggacgagagaaggcgaagacgcagaaagagagcggacaagagagcaagcagggcagaggccgagagcacggcgaacgacagaggggccagcaggaggggaggcgcgcaaaagaccaagagggggagcggagacgaagcaacgaggaggcagcaacaaggggaggaacgagaagaagcagaggacgcgaacgggccgacggaggagaagcagcacacgagactgacaagacgacccggagaggacccgaacggacggggggagagaagagagcggagaggagaggagaggagaggccgccacgcagacagcgcgcgagcggggagaagagcgagagagagagaagaaagagacagaggcacagaagaggaaagcgaaaaagagaaagcggacgcacggcgcagaggaaggggagggagacgaacaggggcggaaagagaggcgacaccggaaagacaagaggacggcggaccccgagaggcgagcgccgcaagccacggggaggacgcaacagagccgcgcgagggcggacagacacagcaaagccgacacccgcaagaggggagcgaggaacgaggagacacaa

SEQ ID NO: 130547 - DNA, 837 bp, Arabidopsis thaliana columbia
aagagggacacagaaggaacacagccgcgggggggggcagaggaggcgaaacacgggaaaacaggaggagaaacgcgaagagcaaagcgagagaagagacgcacgggaacacgggagacacgagggaaacagaaggaggccaaagaacgggacgaacgacaagacgaaagcgagacaaaaaggaaaagggggaagggaaaaacggagagaacaggggggagaaaaggagaacgaaggagagagagagaagcgaggaagaggagaagagaggggaaagagagaagaggagagggaaggagagggagccagagaggaacgagccggaagggagagagcacgagcgaggaacgtgcgaagcgagcgaaaaaaaaaggaagaaaacgaggaacaaggcagagagagagagaaagagagaggagatgggacgagcgcagaagagaagagacgggcaaagacggcaagccaggggacaaggagagacaaggcagagagaagacacagcagaggcaacaggcgggaagcgagcacagacggcagaggagagcacagaaaagaggagagaggacgggcgagaagagaagaggaaaaccagcagacagggcagaggagagaggagaggagaacacaaacgaagaaggagccaggagacagcggagacgcgaaaggacacggagcgtacagcgagaaggacagtagacaggagaaacgagacgaaacgcggagagcggccacaagaagagcaggacgggacgggaggacgggagccagacgagcgagccagaggagagaggacgggaaagaaggagacgcggaggcagaagagaaagagcagcagga

SEQ ID NO: 130548 - DNA, 845 bp, Arabidopsis thaliana columbia
atcgaaccccccggccgcccatttcacgaaagaccaagggagtcctattttgtctttttacagagaactcttatcaaaccgttaaacctatctttgaccttgagagcacaaaaatactacccacccaataagcatcagtgaaagcacttctgtgtcctgggttgccacatttactttacagagattatagcagaccaactgtatgccgatataagcctctgtttctccacgagttaaagttatcatgacaaaaacctccgtaagacgagaatgagcctcgatctttaagatcatcattaataaggaactgaactgtggaccgacattcaactaaccagcctctcagacggctgactaccagaacctccttagtaaagagttaatggagtagctaggtggcgccaggcctcctgaactgatatatcaatacctaacggtgacctttgtccttatggccttacaaacacatactattctcccagtcccgaaaagtccgaaagatctgcttacaagggcctaaacctctaagcttgatacatctcgaatggccaaccacacatccttccttggaattgcagtactggattagccttcgcgccccatatgagttctccccaacgcacgcacctacaaagctataaccaaaccttcttacactgaggtctttgccccggtgctatttcccttgtaggccacccctaacgacatagacctggggtcaacagcaaattctctgctcagactcccaagaaaaacccaagatttccccatattgtcacataaataccaccaacccgatggcctatatgctaggcccccgaaaaaccaaaggcccgttcaaagaa

SEQ ID NO: 130549 - DNA, 1042 bp, Arabidopsis thaliana columbia
tggggcccaaaagacgccccagcggggagcaggaagaaccacagggaagaccgagggagaggggcatattgggcgctttttttcgaacgagacagagagaacgagcaacaggggccacaggaggaagaacacaaacaagcaacaagaaagacaggaaagaagggggaagcgaaagaggcagacggagcggaaaggagggaacagggaggagacgaagggggacaggcagacgaggccaggcagaggagaaaagcgaggaaagaaagaagaggggagcgagaagagcaggagagagagagcgaccgagagaccagggaggagacagcgggacgacagggaggagagaggggagtagaggcgagagcagagacgacgagcgaggagacaggcagagagagaagaggcgagaacgcaagagaacgggacgaggacgacgacgcgcggcgcggaggagcaggagacaacgacaggcgacgaaaatcaggaagagcaggacggacaaggcgaggacgaggacgacgagaggcacgcggcggaagaagcgacggcagaggacgcgaagagcacgacagacgaggagcacgagtggacaagagagagaagacgcaggaaagcgcagcaacagaagaacgagacggcaccaacacgagaaaagaggagggcagagagccagcgaggcgaagacaaaaggacgggcgacgaggagcagcgagcggcagagagaacgacgggcgagccggggagcggagaggcgacaacacgagacaagcaaggagaggagaggccacgcgagacgcgacccagagacgagagaagcgaggagagacaggcgggggcacagcagacgcgaggagcaagagcgcacgcggaagagacaacagcaacgacgcgcgcgagacgagaaggaagcgagagacgagagagggcaaggagaggagaggacagaggagagggacagaggagagagatgagacagaggcgaggagaaaggagaggacggcacacagaagagcagagcagacgaagaagagaagacgcagag

SEQ ID NO: 130550 - DNA, 435 bp, Arabidopsis thaliana columbia
acttgaaaacggagtttggtaaagaccttatgtggagttgtatgaagttttattttggaaaataaaattatgatttattaagatatttttagtaggttttgttagagaagaattttgattgtggtagtgggaatatttgttatttaaggaggtatatggttgttaaagatatatagaagttaatgatgtttggaagtagttgagagggttagaatattgttggatagtgtggttttgaaagtagttaagagggaaattaaatgtttattaaagggttattgtgaggataagtaggagttttttttataagttatgtaaaaatatgatgagagagtttgttgagtagttatatattatggtgtaaggagggaagtgatggtatgtagtgtttatttaggtaagataagtagttgtttgaaggttgtttggttgaag

SEQ ID NO: 130551 - DNA, 659 bp, Arabidopsis thaliana columbia
gttcccgacgcgaattgccgggtcgacccacgcgtccggtccgacgccgaacatgaagaagaagtcctcggggcgctgcgacggtgatatttttaacactgttcgccctgtatggccgtgatggtaccacgtgttcacctccgaatacacccggagctccggccgcccttatcttacttctcactgctttggccgatcctgtttcagcggtccgatgaagcttgcctcaaggaatggattgcttaacgttgaattgctgcagacaatatcttcttaagaggaaacctattccattgatgccaaccaactcatcacagatcagagggataagtgagatggacctgagaacaaatgtactggacttatatatggcggaggagccattgctagctgttggttatgatacattggagatggtgccatcaactctgatcctctgatgccgaaaggtatggaactaagcccgccatgagtacactggataggtcgtatacagatacattatcttagaggcaagcgtgaaggagttggataatgatgttgaatccttgaagaataatatcgcatgaagcaaatagatcatattcaagatagaccaggtctatctctgaaagtttgcctgtcagatcatgtaatagtatacactgtgactgtgtaac

SEQ ID NO: 130552 - DNA, 659 bp, Arabidopsis thaliana columbia
ctcgagtcgccggtatcgatgagcttgatatcgaattctcggccgctcgccctctctctagttccaagccctagccattcctctgttttcaccatttgcggagattatcaccttctccccgattccccggcttgtgattacatctacctctagagttgctggtcgaaattctccctcttttatctgcggactggcatcagattccgttctggatgtgtcggagatcgattttccgcggcggtgatgatagctctcggcgtcgacagtctggataaagaacgagtcaggaaacgtgctcgtttgacctgggactaggccactgctgaaccagtaggctaaccgggctgcgattaaaggtcatggaagcgatgggaggattttgctgccatcattcgtggaccatgatcgtgatggtcattatgtgtcgccgattgagggacaatctgcctcctagatataaaatacttatctagatgggtgaaggcacatttcgtcgggttgtggaatgtgcggatcgtgatacaaaagaatttgtggctataaagatgattggaagcattaagaaattccgggatgcagcaatgattgaaattgatgtgcttcataaactctgttagagtgatgaaggccgcacacgctgagtacacatgaagaactgc

SEQ ID NO: 130553 - DNA, 648 bp, Arabidopsis thaliana columbia
agtcgccagtatcaatgagcttgacatctagatctcggacgcttggactctctctacctacctaacctagcatttgttttgttattaccatctcatgacaatacaaccttgaccgcggttgatcagatcaaaatcgcgactgagcaaagccaatcagctgtatacttctactttttccaccgcagacagacaatggagtccacactctatgtgaacgaatggatctattggtctcttatagacctaccttctgctatataactaggggtgcaggaggatccacagctagatctcactctcaccatggcctataggctccacaatgccatatggcttagagactatgatgcatgtaactggaaccaacatgccgattgagaagactccacacacgctcgatacgactaaatgtaatgatgttcagaatgtgctggaccttagaggagatcgctctcatggactagacaagatgggttaacgctcaatgaggattggcttgtgctgtggagctcgtgaatcacattaataggaagcattgtgaatactttggaatctctgtagctgcctatactcaggctcatcgagagtgattgcttctgaaagcgtgcacatcggaatgtcacacacgctgcgtacatacaagaacaa

SEQ ID NO: 130554 - DNA, 1094 bp, Arabidopsis thaliana columbia
taacctagccgtgaacccccagccgggtgtggtctttctatgtctataacaccagagttttttattttttatccgccttccttcgaccgcgctggaagatggagacggcaaccctacatgatcaaaaccttaaaatcctttgcgttacgcttttccccccgggttatggaactgagctgtgtccatgaataccaaacatatctgccactcgttataagaagtccagatcccgccttttcttgggtcctgaaaaaaattgaatcatccaacattgggttgcaaaataggaaaattgggaatttttgggtttgagtaggatctttgcgccccttttcttactgacccattggtcagacctttctggcctaccttgtctgagtgttccttgtgtttatcgagccttcccgccgccttgccagttagacgcatgtgaatcgctcggaataataactgttcttccactctgtgtcgccgaatttgtgaaattaatcacgtgtgggcgagagcttaatcctctgtaaatatgagtgtgggtcgactcgctctcgtttcggttacaaccgcacttatccaaggcgcgccgggaagtagtctctgttcttataattggcagagccacgtatattttttcccgcataaacatggtcaccctttgcttccaacaaccttggtttttacaaagaaaggttgttgatccaaattccctcttgtatgaatcaggagtcgaaaacccacagtcaatttcttcccaccaagccccacccttagaggcaaattggggcagccacgccaaacgttgccataccattccaaccctgcatttgggttggggaataccaataccccttctaccccaaagaggaattccttcaaccttggctaatctctggccattttcccggagatatttaccccttcagcaattactgaatcccgaccgaaatggccattcttctccgacgaaggtgttcgatccccgcaggtagacggtctcccctcaaacctccatctttgttgagtggaaccatcgtgttaatcgttgttcttcggccgaccttggtcgcttgccattaagccggggcgttgttgctccc

SEQ ID NO: 130555 - DNA, 682 bp, Arabidopsis thaliana columbia
  unsure (1)..(682): unsure at all n locations
cagcacccncgagaattttgcatcatcctgctttcgatattcatgcgccgccaaccataccagggactgcgttttctatttagaacagggagtgatactaacccctgaatctggggttgggaacaaaccggattggaaacggttaccaccctcttccggttactttccctgtgaaaacaacgatgcataaagaccggctactgatgtggctctatcaaggttaaagatggatttcaattgcatcgttccgcttaagaataagaactgatttgggagaccatgcctgttttccgaccatgagatacatatttgagtcagtgtgcccaatccagttgaagtttttcttcttccaccattgccaattggttcttcaggtactgtaaaggctttcaggaatctgtagagtttagacctgattattagcaagtagacaaggtaactactccatcctggatactgtttgtaatattgttttattgtttcacatgccttaatatcggcttacgatgacaaaccacgattgtttgttacacaagagcacatggtttgtaatgcactatacttatgtatcaaaaaaattcttaataccttgggcggccactctataggatccaaggttccgtacgccttcttttatacttcaatagctttaactaaaagcttccctaattacaattcacta

SEQ ID NO: 130556 - DNA, 490 bp, Arabidopsis thaliana columbia
tgtagctggaggtggtgtacgatcaccatcccgtcctagctactgtacttctagtaaccggtttcagagctcgatagtgatagaacatattgacatgtatgctctatttgcaagatgatagcgtatgatagtgcaatttttgtatgggcgcctgggaccaatgactcggcttgtggacattattttttcacttaatcccaatatactttgtgacctttagtctacaaggacgtgggttctaggattactctcgcccgttccggcgcccgttgctatataaaaccgtacacccgcggggacactgtccgtgaaactttcttattccgcatgtgcaaatgcctccgggccgctttttacatcccccgttgggttattaccagccaaacacatggcgttagttctcgattctctccaaaaagttgaccttgtccgctctttcgcttagcaaagaaaaggctccataacctcttttactcttcccagggtgggg

SEQ ID NO: 130557 - DNA, 691 bp, Arabidopsis thaliana columbia
acccccccgagcggattgacccgacgacccagacgtacgataggagcccgcacagaagcctaccacccgggtcagttatcctttttacggagagcacgactacgccgcgccacatgcccagggggcacatcatgcggaccacgccccaggaccgctaggcggagaggaagcagatcaagagagcgcctgacgatgaaaggctcgaccggaagggtggacagtccaacgatctagcaggagcggacagcaccaccagcgggccgaaagcaaagcagcggcggacagcgcgacggaagcgagcaacgccccaccgaggcacgatggatcgagccaccggcgcgagtagccgtgccgccaggatgaacaccaacagcgcagcagccggacgccacagggcaaacgcaaagaagtccagcggcgtcgaatgacgaccaccaggcacgccgggtggcagtcgacaggcaggaccaccgcacgggaaacctcacaggacctggcccgcatcgaaccaatacagctggggccactggtccgcaatccacccggggcggggcgcgaggatccaaggcaattgggaaccgccaaccccccagaaggcccacaccgggaccccacagcaacatgggggccgcgacaaaccggcccagaaggcaaccgccctgcgccggcatgaaaccagccggagcccccc

SEQ ID NO: 130558 - DNA, 619 bp, Arabidopsis thaliana columbia
gcccccgaattagcgggtcgacccacacaatcctgatatctcatacccgacgcttagcctctcaaatggaggttacctcttatcactttaatctccactaccagatcttcaaagaaccttaccttaacttgctactctaaggcgaccctaccagcttgtactcttagacgtgaaagaatagctcggcgacatagcccttagtacttcttctcaaggaaaaactctcaccgcgctactacacacaagtattgcttgaaccttagacaccccctgatttgatcatagcctttcaacgatttgacgatcacatgcaccgtgttgctgtcgctgcgggatcagtgatagctgtcctacatagacaaattgctgaaaagaaaaggaaacttaccagccaggctggaacgaaaacaggtgggcttaaacagtgcttataatcagtcacaacctcaaggagatggagaccaatggaatccccatcatcatcatatgcggaatataaaggcttgggtagacaacttatatttttagcatgaagaataggcgatctgctccatgaggcactatgatggcacatacaacaggcttaactcttgagaataaatacgctgtggcccatgtg

SEQ ID NO: 130559 - DNA, 1180 bp, Arabidopsis thaliana columbia
caaccgggcccctttttaggatatattttcgccgcaaccagtcgcaggccttttgggacgacgtcgtgtgcccgagatcgaaactccgaagatcaatacgaccagcacggttttgacgctttttttgacgccggcgtggggccgacatgtcgctacgacgacgctatgatatcgcaccaccacggcccgcgtggacgagagctggcgatgactttggattttatacatgtcgtgcagtcagactgcgaccgagctatcagcctattaacgcctcttactgtgcttatgaggcactgtgaaccgctatgcgggctgcacagattacttaccgtctatgttaagtcgtcccgcgctcccaattataaatcactttcttggcttccgtcgctccgcctgcagtcgtgtaactaatccgtacggtcccctgatcttcgtctcaatgatccggatatgcctgttcatcacgctgctccgcgtacctgtgtcgctcgttaaatgcgccgacgttcaacctgttgaactcctgaagtcctcctctctgagcctccagtgcccgttacctccgcgccatctcgacggacggctatactctcgtcagccatgttatactcgccacacatcactcgtggactgtgtaggacaatcaccttctcctggtagaagatccaacgtcctcagtgtttgcaaccaacttacgctagatactcgcaagtcgagcgacaggtcgtcaatagatctcgagtgtacattcgaacggtctgataccgtagttcagcggcgtgtacacgtgcacagcttcgattcatgataacccatagtctcctgtctgatatctctaacttgctgctcgctcgatatggacgattccagtattcttctgcttaaactcctgctcgggctgactagttcgttcgacggtactgagtaggcccttctcgctgagagtcgagaggggggtatcacaggactctggcgcgctcacaatatctcttgaactatacttccacgccacatggcagcctccatatatatcgatggagacttgcgtgagcacgtactatccgctttactcgacgttgagaccggtatcgcaacaccctacacgtcgggtgtatatatgtccggtgtccaacttaacagttaggtggtccgctgaactgatcgcaacggaactggtctt

SEQ ID NO: 130560 - DNA, 657 bp, Arabidopsis thaliana columbia
gggcacccccccgagtcgacagtatcgataagctagatatcgaattcgcggccgcagacaaagtctcttctcccaccgccgatctcatcccgcagcttgctgctacactcgtcgctgctcttggcgctcaatgctaccgcctcacactaccgccgtctcctccgcccagaatcctgacgccgcaagtgccaccttcgtctgctaccatggcttcctccttcaatcctacccgaatccttgaccatcgcgcgagctctcaccggaatcgtcgtggggcttttccggctagcaaacgtcgccgtctggtcgatgagcccatcgattacccggatctctccaacccggcttaccaggttctctccactccgcttttcgcctctggaattgggtcgattcgcgagcttctgtcgtcctctcctccgccgacgacgtcttctcagcctccgtctgtctcgattccaccaccgtccgctccaccgctcgttctcagcgattctaaagatgccgaacccgctggtctcaccaatccgtctgctcctccgtccccgttggctcccaaaaacatcactccggttgcttcaccggtcgcagacgtcccgatgcctgatcctctgatttcgcccaccgctgagactgcagagggtgctagtgtgccag

SEQ ID NO: 130561 - DNA, 658 bp, Arabidopsis thaliana columbia
  unsure (1)..(658): unsure at all n locations
gggcaagccctcgagtngactgtatcgataagcttgatatcgaattcgcggccgcctgaaatcatggaacaacttggtttttattgtgttattttagctgatttgatctttgattcatctgtgatcataataactatgaagatggacaaaaagactatagtttggtttagaagagacctaaagattgaggataatcctgcattagcagcagctgctcacgaaggatctgtttttcctgtcttcatttggtgtcctgaagaagaaggacagttttatcctggaagagcttcaagatggtggatgaaacaatcacttgctcacttatctcaatccttgaaagctcttggatctgacctcactttaatcaaaacccacaacacgatttcagcgatcttggattgtatccgcgttaccggtgctacaaaagtcgtctttaaccacctctatgatcctgtttcggtagttcgggaccataccgtaaaggagaagctggtggaacgtgggatctctgtgcaaagctacaatggagatctattgtatgaaccgtgggagatatactgtgaaaagggcaaaccttttacgagtttcaattcttactggaagaaatgcttagatatgtcgattgaatccgttatgcttgctcctgcttggcgggtga

SEQ ID NO: 130562 - DNA, 297 bp, Arabidopsis thaliana columbia
gacccgcgagtcgcgagacagagaggacaccgcaaaacaaaagagttttgcaataaaacgcgcgcaaagaaccacaagaccccaaaggaaggcgaacaacaaagacggacacaaaaaaagcaaaacgccccgggccgacaacctggaaaagaagaagcgcgaagacgcgcgagaagacatcagagcacagcgccagacgccgcggagcagcacgaagacgacggccgaggctcggccaccttgtcgcccacgacaacgcgaagaagcacgccggcgtagactaaaaacgaacggggc

SEQ ID NO: 130563 - DNA, 615 bp, Arabidopsis thaliana columbia
tctcgaattgacccatccacccacgcgtccgatacacagcaaccgaaacacctcgaagacaggcaaattttatatttattccaccaaccaactctctcgtaagggcgactttggcacgtctccaagaatcaacccgctactaagactgctcttaactatagactcactactgaagccgaacccatttcaccgtgctgacgaaactgaactcaaggtatcgagagaccagtgcttactggatgagtactgaagcttttttaaagaaaacaccttccatgcatgccaaccaactcatcacggaatactccaatatttgcaaaggtcctaagaaccaatcttgtgtacgtttacctggacgatgagccatgtatgttgcttggttatgacacatcgctgatggtacgagcatctctgtcaatctgatgaccaaagtgaagaaaatagttcatcacggtgactctggaaaagttgcacacagatacattaactaaaatgtgatcatgaaggactaacgtacagatctctacttcctaaaaaaaactaacccagaagtcaatacaacattttcaactatgccgactattacctgaaaatttcctgcataacggtgagtat

SEQ ID NO: 130564 - DNA, 1301 bp, Arabidopsis thaliana columbia
  unsure (1)..(1301): unsure at all n locations
ccggcgggcggacaccgacgagaggacggagagcagaaacggcaggacgacacgagagcgaattaagaaaatttagcggcgggacggagaagaagcaaagacgcaaaacacgaaacaatagagcgggggggggcggccgcacccgtacaccacaacaaaangaccagggaaagacaagacatccagcaacgcggcgagagaagcgagacgcgggtgaaaaagagaatacgaccgcgaacaaaagcaggggcagcgagggcacaaaacacagggaacaagcgacgcaacggacgcatacgcaacaagcgagacgcgagaacaagaaagcgcccgaacgaaggcagcacaggaaagaaagaacagcggcacgcgcacaaggcacaagcacaaggaacgcacggggcgagacacgagcaggacaagaaggcgggaaacaacagcacacacaataggaccacaaaaaaacaggagaggacacgaacgggagacaccgaccaagaaacggggacaacgagaagagcgacgaaagggaaaggcgacgggacgaagcagacaaacaactgagcggcgaagacgacgggcccagacgcccaaacaaatgagagcagaggcggaggaacggggagaaaaccacgccacgaacgaagggacggagcaggcgaataaggggacgcaaccagcggggcgcgaagaaccggaaaacggaggagaggaaacagacggaagagaagcaccaccataacaagagcaaggcagagcggaacaaacacgtaaggcggggagaggcgaggggagagaacaccacgcgagcggggacaaggcaagcgaccacaggagccaggcagcgacaggacggcagagggaaccacacgtgtccgcagaactcggaagggagacgaaaacacctcgagcaaacccagcacgagggcggcgaagagaagaagacagaacgagacgaagcacacaaagccgaaatgacagaaacgacaacaccgagagacaagaagcgacgagcaaacgccaacagacgacgaagccacgaacggggcgcgccgcgagacgcaagagaggagcaaacgacgacatgagacaggcgagcacacagggacacccaccgaacaggaaacgagagccgcccaaacgccgcgcggaccgaaacccacaaacaggcgcaaaccaggaagcgaggaacacggaacaaaggagaacaccgaccggggcccacacacgcccaggaccgcagccacgagcacgagagaaacccagagcacaagcggagggcacgagagcaaacgaagcca

SEQ ID NO: 130565 - DNA, 725 bp, Arabidopsis thaliana columbia
tgcacctaccggtcctgaattcccgggtcgacccacgcgtccgcgcctacagaggtgtgcatctagtgggagcagggaggttaaaattgttgtaattcaagctcttactacaataaccatgacatctggtgaacctttcatgctggagatatactaaattctggcaccttagaaacggtggtgcacagtctcaacatttgtgaaatgcacctagaactatggagaacaccaaggagcgtagggtcacatgctttggggacaaaataacgcgcatgtgaaaatggctagatgaactgtctgtggtacagtacgaactcatcagggatatacgccgttacgataatgcatgctaataatggaaggactaggagctgactaaactgtactaaaaccatgagaggctgccggatttggcatcactgtgatgcttatataccgagacccaagtatgtaccactgggcccgatcagcgcaaagacaattgacgcagaccgtacacagcacaatctcactgcatatactgggtgcaccggtccatctggagttgctactgtgatctcggacataatccatgagtctactcagcctggccctgctggctcaaactgcagaggtctggatgatgacttggtgaatgcttgggctgcctaccttggagataatggccttctgggaacaaagccctagcgatgattggggtcaatggaaccattgccggaggcaga

SEQ ID NO: 130566 - DNA, 787 bp, Arabidopsis thaliana columbia
cgggtcgacccacgcgtccgcaataaactcttcttctgcctcctctgcccatttctctcattttttctctattttctcagtctctctctcagataatggcactgttgggcttggttttatctgttcttactacaattcttgcattgtctgaagcaagaatcccaggagtttacaatggtggtggttgggaaactgctcacgccactttctacggtggctctgatgcttctggaacaatgggaggagcttgtggttatggtaacttatacagtcaaggctatggtgtgaacacggcggctttaagcacggctctgttcaacaatggttttagctgtggtgcttgttttgagctcaaatgtgctagtgatccaaaatggtgccattctggtagtccttcaatcttcatcactgcgactaatttctgtcctccgaactttgctcagcctagtgacaatggtcggtggtgtaacccttctagaccttactttgatcttgctatgcctatgtttttcaagatccctgaatatcgtgccggaatcctccccgtctctttccccccagtgccactgccggaaatacaggaaggaattaaggcttaacaaatcaacgtgtttgccgcttatttttaaccttgggttcctagacctccctaaacggtccgcttgggccgcccaagaaaaaccactcagacgtcgggcctctgggttgctcgaaaaaggggaaaccacctattccctctccgtttgggcattgtgacccatttgagactcctcatatgatcttgggg

SEQ ID NO: 130567 - DNA, 656 bp, Arabidopsis thaliana columbia
cccgtctttaatttccgggtcgacccacgcgtccgcccacacgtccgcttgatcttacatgcgccgatggctctttcttttataccaccattgaacgcgcgtcaacaccgaaaccgtataatcagacgatactgaaatcatgttccatcgatgcctcccttccgattctcacgccgagatctgtatttccaccgccatggcgaaagctcgtgtttataccgctgttgacgtgagctgagctaatgattattgggattaccaatctgtagtggtgactggggggagcacgatgattaccacgtactgaggaaggtggcgagagggaactcccgcgtggttatagaggggattaacattaataagagtcacaagtgtattatgtggactctaacccctgttaagatcaagaatatcagaagggagactgaaattcctcacagatcatgcggcaggccacctattgagaaccagatggatggaggagagatcactagtcaaaccgccatcttgatttcagtgttaacagacacattactgccggatcacatgactttatacgtgcccgtcttaggacgagaggttcactttgcataccgatatgccgaatttgcaacatggctgcccaggcttggcaactaaatgcgactagttactcg

SEQ ID NO: 130568 - DNA, 486 bp, Arabidopsis thaliana columbia
aaaaccccccaccccggaccgaagacacgcaacgggaacgaacacccccaaccgaggcgcagacgccaatataagaatcaccccgacgaaagcacaccgcaaaacacgagaaagaagggggggggggcgaacgggggaggccaaaccacagaggagcgcagacaccacccagcaaaaaacaagaaccaaccacacaaaccccagagacaaccgcaggggacacacgacaaagaaagggaagagaagggaaacaacaaacggggacgacacacacaaaccaaggaccacgaacaagcaacagccgcaagagaaaagcaagcacagagagcgaagacacaaccacccgaagacaccccagacgacagaaaagcaaagccgaaacacggcaaagagacacaacccaagacgaaacagaacgacgcacaagacgagaacacggaacggaagcaagagagaacgagcgctaaccgagagaacacaacaagc

SEQ ID NO: 130569 - DNA, 727 bp, Arabidopsis thaliana columbia
gacccacgcgtccgctaatctatatgtttatcttcgcggatggaagctctatctgcttgtttttttttgtactccctccgaaaacaaaatagaaagagagatggtggatgagaataaagctccaatcagtgtttggactaccgagaagccattcgccaatggcggtgcctctggaatgctcgctacttgcgatatccagccgatgcgacatgatcaaggtgaggattcaacttggtcagggatctgcaacacgtgtaaccaccaacatgcttaagaaagagggcggtggtgccttctacaagggattatctgatgggttgctgaggcaatcaacttacacgacagaccgtcttgaatcattcaagttgctgactgcaaaggcaattgagtgtaatgatggagagcctctaccgctgaatcagaaggcactatgcggtctgacacctggtgctattggtgctagcgtcggaagtcccgcctatctaggccttataacaacgcaggccgacaatactttgccgttagctcaacgcaggaattataccaatgctatacatgcccttacccgcattaccgctgatggaaggagtttcaacaccctttggaaatggtggtggggcccccttgtggccaaaaaggcaattggtttttccaaccattgggaaatgcctttgcaatccttaatgcaatcaaaggtggctggatatccccttgaagaagaataatt

SEQ ID NO: 130570 - DNA, 752 bp, Arabidopsis thaliana columbia
cgacccacgcgtccgctattaactatcattgtgcctgctgagcgcatgtctcccactttttctttatttgctgcctcttactctcacataacggcgacggtgggcgctgttttaaccgctgccaccactgattctactattgtataaacctacactgctagcggtgcacacttggaggggggctgcaaactgctcacgcccctgtctaccgatgcttggatgcattcgtcacgatagggagatctcgagtttattgccacctatacacccaaggctatggtctgatgacgccgctacaaaggacggttctgtacgacgttgggcttagctgacgcgctcgctgacagctgagatgtgctcacgatccgaactggcgccatatctggtagatcatcagtctataccactaccactaaatcgtgatgtacgaacttttctgacactaggtactatggctgctagcgtaacccttctagaccttgctgtgctcatgctatgcctagcccattatagatcgccgatcacttagcccgaagctttcccaagcctttcgatgcgtttcgtgccataaagaggatgcagtaggtacacccccaaccgacttgcgctgtgcctacctgggtttaagatcactttaccttgcctggccggccagtgcacatcaatggcggagattcgctaatggacaagggaaaccccaattcctttgaataggttctttacgcattgcggcctctaaaaactttggtggc

SEQ ID NO: 130571 - DNA, 844 bp, Arabidopsis thaliana columbia
atgcaaagacgatacgccgagatatccatggagaattaggccttcctgctagtgagatgaccgcactacatggttggacatatcacctctctttgctgaatccctccagcaccttacactcaccttacatgattcgatcgtactgtcggcgtccatccacacaacgctcattctaaccactaacctatttgcattaccactagattgttttcatcacatcgaaccataatatgcatctgtggattacatacaaccattacccttaaagctccaagcgcgacgactcatcccttgataacttgagcaccatacaagctccgcgtcccgcacagacgacacctcctgacatgcggaacgcatgcattggatcctcttctaacgagaaatctcctgctgtgtttcatatcttatataacccccccgttctaaccgccttcgattcagttggaccttgcaatccaactgttctctctcagatccctctacggtgcccctcaactacaccccatggaaaccgtactcattcacgccggcaactttacaatgtctaaatttcttggccatacaccagactatggctggtagtcacaatataacagctcctccatttatgattcaatacatccgctttcccggttcaaagaaccgccttcgtgacaggctggcttcaacgaaccattcttacaaggggggtcttgcaccccaaacccttcccccaccctgtgtgttttatacccccctcccttcattctcaaacaccctgtacaccaacccgcaccgggtgtcctcactaaaaactcgggtcccatctcccattctgccagggttgcatcctacaaacatg

SEQ ID NO: 130572 - DNA, 708 bp, Arabidopsis thaliana columbia
gcccccgcgcccccctttgattgaccattcgatatgacctaccggtctttaatttccgggtcgacccacgcgtccgatgcttaatcttctgttgcctcgactgtcctgttctgtttttttatcaatgggtccagaaatgccaggttctattacgagtccaatgaacgcctgctgcaccatatgaagaacaatggttaatttgtgcgatggccttaggcggctacataacaatgttggatgcccgaatgtacgaaacggcccctttgtaaataggctccgatgctggtgaaccatttgaggcaaccggtgggaaatgtagctatgacggacggctcatgctggttaccaccgtggatggaaacactgatgtgctcgactctggatgtggcactctgctggcacatatcacgagaaaccagctgactgaagatgctacattggatgcagcctttacatctgcagggatgctagtagtttcaggcctacgcgatgggctaacccaagcgacgatggttaggagcggaaaacaactacatctgactatgggcttggtgagccaaccccccataataaaatggggtctcggacatcccatgttcgcgacatgttcctccgagcgtgctgtcggaatcacccgaggtattccagattcgccaagctacgggcatctcgtgcatattgggacctgggtatttccccgcatctaaa

SEQ ID NO: 130573 - DNA, 642 bp, Arabidopsis thaliana columbia
gttcccgggtcgacccacgcgtccgcaataacctcttactctgcctctgctgaccatatctttttatgtctctctatcggaccagcctctctctcagataatggcaacgttgggctcggctttatctgacttactacaatcgttgcattgtatgccgcacgaatacgatgagtgtacacatggtggtggccgggaaactggtcacgccacgtttctaccgaggctcagatgcttccggaacagtgggaggagctcgtggttatgggaacttatacagccaacgctctcgtgtgaacactgcggcttcaagcacggctctgttcaacaatgggtttagctgcggcgcttgaattgagcttagatgcgctcgtgatccaaaatggagccattctggaaccacttcaagatctatcactgggactaatatctgacctacgcactctgctcactctacacacaaaggcggacggagctacccatctagacctgacttacgacttgctgtgcctaagtacctcacgatcgctgaggctcgggcatgcaacgttcccgtgtctctacgccgtgtgccatacccgactatatgcggcacatgggacacaatcaagcgaatacgcgactgtaacttggatctccccacta

SEQ ID NO: 130574 - DNA, 721 bp, Arabidopsis thaliana columbia
taattcccgggtcgacccacgcgtccgcactaaaccctctttgtgtcacctctgccgaggcctctttatttttgtctattgactcacccacactataaaatgatggcactgttgggcttggttccatctagatctcacctacactcggcgccttgaaggacgcaaggatcccacgagtcaacattggaggtggttgagaaactgatcacaccactcactccggtggctttgatgctctccgaacactgggaggagctagagggcattgcaacctatacagtcaacgctatcgtgagaacaccgtggttctaagcacggatctgaccaacagtggcattagctgcggtggttgtatagagctctaatgagctagtgatccacattggcgccgtcctggtagaccatcaatgttcctcagtgctactaatttctgaggtgcaaactttgctaagcctgctgacaacggtggcaggtgtcaccaccctagacctcactttgatgttgccatgcccatgaccctcaagatcgattactatgctaccggaataaaccgcacttctatccgtgtaagtgccatgctcagaggatacggaggactaaggcaccaccataaagaggcccacgggatagtttaaaccgcggtttctataggcactaacccgtcgaactaggcaacgcgcgtaaaacaatattttgaccgtcttttggggtggctgaaaac

SEQ ID NO: 130575 - DNA, 850 bp, Arabidopsis thaliana columbia
aatttccgggtcgccccacgcgtccgcactaaactctcaatctgcctccacagcccattgctttttttttttttatagttgctgaccctttctctcacatagtggcaatgtggggctcggcattatccgctctcactacaattcttgccttgtctgcaagcgagactcccacgagttgacactggaggtggttgggaaactgctcacgccactgactacagtggctctgatgcttcggcaacagtgggaggagcttgaggttatggtcacttatacagccaaggctatggtgtgaacactgtggctcatagcacggctctggacaaccatgggtttagctgtggggcttgtatcgagctcaaatgtgcgactgatccaaaatggtcgccattctggaagtccttcaatctatatcactgagacgaatttctgatctacggactttgcttatcgctatgactatggtggtaggcgtaacccttctatatcctactgtgggcttgctatgcctctggcatttcaggaccgctaagtatccgtgccggaaatcagtccccggtgccttttccacacgaggtgcccattgcccggcgaaggaggggggacggcacttctttgggattccaccaaatcacaagccgtgggtctttccccgccctttatgtcttttgaaccctctcgggttcacctcaagcttaccacctttaaacctatcgcggcactgtgggccgcaccccgagaaaaaacccttcaatctgcggggcgctttagggttgtcttaaagaagggaaaacccccccatacccttttcggaggggaatctaaccctatgctcgtccccttaaacttt

SEQ ID NO: 130576 - DNA, 728 bp, Arabidopsis thaliana columbia
ccggtccggaatttccgggtcgacccacgcgtccgccctaatctcacaatctcctacgagatctatcagactccacgaagatgaaggttgttgccgcatacttgctcgctgttttgagcggaaaagcttcaccaaccagtgccgatatcaagactatccttggatcagttggtgctgagacagaggattctcagattgagcttttgttgaaggaagtgaaaggaaaagatttggctgagttgattgctgctggaagggagaagttagcttcagtgccgtctggtggcggaggtggtgttgcgggtgcttctgctacatctggaggtggaggagggggtggtgcttctgctgctgagtccaagacagacgagaagaaggacgaaaaggaagaatccgatgatgacatgggtttcagtctattcgagtaagctggtcgtaccatgaaaagcccggttttgttgacctcttttaatattggaaccttactgaaatctatatgttgctgttgttcatgatgcatacgatcatctttcttagacattgctgaaattctcaagagtttttgacccgcagaaagaaactgtgaacaaagagggcggccgatctagaggatccaagcttcttacgcgtcatgcgacggatagctcttcatagtgcacctaaattcactcacaggccgcgatttactacggcgaaactgggaaaccttgggatgcccaacgtaatcg

SEQ ID NO: 130577 - DNA, 758 bp, Arabidopsis thaliana columbia
  unsure (1)..(758): unsure at all n locations
aacccctcccgtncagaagaaacaatgcacttgcctcctctgcccatccctatttatttttttctacgacctcagtctctctctcagatggtggcaatgttgggcttggttttatctctccttactacaatccttgcattgtctgaagcaagaaacccaggagtttacaatggtggtggtcggcaaactgctcacgccactttctacggtggctctgatgcttctggaacaatgggaggagcttgcggttatggtaacttatacagccaaggctatggtgtgaacacggcggctttaagcacggctctgttcaacaatggtttcagctgtggtgcttgttttgagctcaaatgtgctagtgatccaaaatggtgccattctggtagtccttcaatcttcatcactgcgactaatttctgtcctccgaactttgctcagcctagagacaatggtgggtggtgtcaccctcctagacctcactttgatgttgctatgcctatgcttctcaagaacgctgagtatcgcgccggaatcgatcccgtttcttttccgacgagtgccatgcctgaagagaaggaggaataaagctcacaatcaacggtttcccgtattttaaccttgtttctagtcacctaacctcttcttgccgcccggaaaaccataactgccgggttaggcttgtggaaaagggaaaccccattatcttttgatggtattgaacccattgaagctctcttaaccctgggcggaccaaaact

SEQ ID NO: 130578 - DNA, 741 bp, Arabidopsis thaliana columbia
ggggacgacccacccgtccgccctaatctcacaatctcctacgagatctatcagtctttattatgatgaaggttgttgccgcatacttgctcgctgttttgagcggaaaagcttcaccaaccagtgccgatatcaagactatccttggatcagttggtgctgagacagaggattctcagattgagcttttgttgaaggaagtgaaaggaaaagatttggctgagttgattgctgctggaagggagaagttagcttcagtgccgtctggtggcggaggtggtgttgcggttgcttctgctacatctggaggtggaggaggtggtggtgcttctgctgctgagtccaagaaagaagagaagaaggaagaaaaggaagaatccgatgatgacatgggtttcagtctattcgagtaagctggtagtagcatgaaaagtccggttttggtgtcctcttttaatattgtaaccttttgaaatctatatgttgttgttgtttagtttgtattccatcatcttttttagacattgctgaatttcttaagagtttttgacccccgtctccgattaatttctattcacatatgggccgggccgtttttataagggaatcccatgtctttacctttaccgccgttgccatggccacacagtacaattaagccttgtcttccctcaataaggggggacacacccctccaaaaatttctcaacatatatccaccttttgtgcccccgatttcag

SEQ ID NO: 130579 - DNA, 751 bp, Arabidopsis thaliana columbia
acccgtctttaattcccgggtcgacccacccgtccgcaataaactctccttctgcctccacagcccattgctttttttttttttatattctctcagtctctctctcacataatggcaatgatgggcttggttttatctgctctcactacaattcttgcattgtctgaagcaagaatcccagcagtttacaatggtggtggctgggaaactgctcacgccactttctacagtggctctgatgcttctggaacaatgggaggagcttgagtttatggaaacttatacacccaaggctatggtgtgaacaccgcggctttaagcacggatctgtacaacaatggatttagctgtggtgcttgtatcgagctcaaatgtgctagtgatccaaaatggcgccattttggaagtccttcaatcttcatcgctgcgactaatttctgtcctccgaactttgctcagtctattgacaatggagggcggcgtaaccctcctagacctcactttgatcttgctatgcctatgtttctcaagatcgctgaatatactgcccggaatgcgccccgtctctttccaccgatggccatgcccgaacagaggaggcattaggtacacaatcaaccggtttccgtttttttcaaccttggtttcttagttctcctaaacgccgcctgggccgcccggcaaaccattaattgccggccttacggccgtgaacaaggaaacccccatttcctttccctgagaatggacc

SEQ ID NO: 130580 - DNA, 648 bp, Arabidopsis thaliana columbia
cccggaattttcgtttagacccacccgtccggcctaatctttctttattccaataaacccataggcctctgtcttgatattacaccgaagaaagttaccgaatcatcgtgcttactctggtaccgttatgacagatactacagatgctggtatggatgctgtgcagagacgtctcatgttggaagatgaatgcatggttgatgatgaaactgagcctattgtggggcatgacctcatgcatgatcgtcatccgaaggaaaataatgaagccgacaactagctgcacagggctttcaggggatggctattcaactcaaaggatgagctgacagtgcagcaaaggtctaacacaaaggttacgatccctctagtgtggactaacactagttgcgcacatcctctttaccgtgaatcatagctgatccagaacaatgcactaggtgtgaggaatgctgcacaaagaatgcttctcgatgagcttgctattggagctgcagacgttccaaacgatgagatcactcccttgggacggatgctgcacaaggctcctactgagggcaaatggggagagcaagaacttgaatacttgctcttgatcgtgcgagacatgaaagttcaaccaagccccacatgaacaaagctgattat

SEQ ID NO: 130581 - DNA, 724 bp, Arabidopsis thaliana columbia
ccacccgtccgtagtaaactaggaatctgcctgcacagcgaatcacttttttttttttttctagttgctcagtctctctctcacatggtggcaatgtgaagctcgtcattatccacccccactacaaatactagccatggcatcacgcaagaatgccacgagtgaacactggaggcggctgggaaactgctcacgccactgactacagtggctctgatgcatctggaacagagggaggagcttgaggttatggcaacctatacacccaaggctatggtgagaacactgcggttcaaagcacggctctggacaaccatgggcttagccggggcgctacgtgcgagctcaaatgggctaatgatccaaaatggcgccatattggatggccttcaatcttcatcactgccactaatgtttcgtgctacagaactttgttcagcgctaatgactatggtgggagccgtaacccacctataccttactgtgaacttgctatgcctcatgcctctcaagatcgctgagtatcgagcccggaatagtccccgtctcctttccaccgagtgccttgccggaacagaggacgaattatgtacacaaccagctgcttccgttaatttaccaagggactacttcctctactcgctggcgcccagaacataaagcggctacggcgtaaaagggaaccccatacttttgaggattaaccctgaattctacaacttgg

SEQ ID NO: 130582 - DNA, 723 bp, Arabidopsis thaliana columbia
gcactacccgtcctgaatttccgggtcgacccacgcgtccgccataatctctccttctgccacctgagcccattactcccaatatctttatagttgctcactctctctctcacataatggcaatgacgggcttggttttatctgctctctactacaattacttgcattgtctgaagcaagaatcccagaagtttacaatggtgggggttggtaaactgctcacgccactgactacagtggctctgatgcatctgcaccaatgggaggagcttgtgtttatggccacttatacacccaaggctatcgtgagaacactgcggcttaaagcacggttctgtacgacaatgggactatctgcggtgctcgcattgagctcaaatgtgctaatgatcctaaatggtgccatatcaggagtccttcaatcttcatcactgcgactaatttctgttctacagaactgtgctcagcctagagacaatggtggttggcgtgaccctactagacctcgctgtgatcttgctatgcctatgtgactcaagatcgctgactatcgagccgggatcatactcgactcttttcaccgagtgccatgccataagagaggatgactaatgttcaccatcagctgttgccgttattttaccttggttctagtcacttacgtcgctggcgccagacacataatgcggctaggcgtgaaatgaacacatactgcatggatga

SEQ ID NO: 130583 - DNA, 694 bp, Arabidopsis thaliana columbia
tttcgtttgaacccacccgtccgccctaatctccccttgggcctggggtgccagtgatccccaactttttttttttcgacgactctctctaacacatactggcaacgtgggactagtctttagagagccccacactcctgcatgtaatagagtgcagaaacaatccaacatgttaacatatctgcgtggttggataacagattactcccattacgacggaagcactcatgcatactcatcacacggaggaactcgaggttatgcgaacctatccagccagcgctatcgtcggaacaccttcggcctcacgcacagatctgaccagctcagtgagtcttttacacgctcttactgagctcatacgtgcggaacaatccccaatggtgccattctgcttgtcctccaatcaaaatcactgcaactaatgactgtccatcaggcgtgcgctcctgctagctacgcgtggtgggtggcctgtcccttcgaaacctaactgtgcgcttgctatgcctatgatactagtgcacgtgcagtaccatgcccgactggagctctacttctttcaacgagagctataccagatgcaccgatcaatcaacacacaaacagtggctccctcttatacatgatctatcactacgtcctgccctgcacattgctgtagcagaagtcactatccgtttacagagctgct

SEQ ID NO: 130584 - DNA, 738 bp, Arabidopsis thaliana columbia
tccggaatttctcgtttcgacccacgcgtccgccctaatctcacaatctcctacgagatctatcagtctccactattattatggttgttgccgcatacttgctcgctgttttgagcggaaaagcttcaccaaccagtgccgatatcaagactatccttggatcagttggtgctgagacagaggattctcagattgagcttttgttgaaggaagtgaaaggaaaagatttggctgagttgattgctgctggaagggagaagttagcttcagtgccgtctggtggcggaggtggtgtagcggttgcttctgctacatctggaggtggaggaggtggtggtgcttatgctgctgagtcccagacagacgagaagaaggaagaaatggaagaatccgatgatgacatgggttatagtctattcgagttagctggtcgtcgcatggaaagaccggctgtgacgcgctgttttaatcttggtaccatgagaaatctatatgatgtagctgtttagatagcattcgatcataaatcttcgacgttgctgaaactcgcaagagatttcgacccctttaatgaacgatactatccttaaggggtcgggcgcttatttaggaaccccaaggcttaactgtggcgctgtggcctttgcctaacgggcaattaagcgtggcttatccttatttggtgggaactcacctctgaaaatatttgcacctgtgcaaatctcgttgcttgggccg

SEQ ID NO: 130585 - DNA, 744 bp, Arabidopsis thaliana columbia
ggggggggaaagaagaaagacccaggcgcacaaaacgagcgaccactattcgtatatgtacagcgccgcagcacacgaacagacacaagacggacaagggcgccgacaacgacagccccacacaggacaagacaagcctccaacggcgacgacacaggaggccaacagagggggcgaaggctgaatgacgcgcggcgacaagaggaggcggaatgcacagccacacgcagacggcaaaggaccccgccgacggccgaaagccggcgagacacaggaggccatcgccgcacaacccggcgagaaagaggccatgaccaccgcgcacgaacatcccatacccacaagcatcaagacaaacccgaacactaacaacatcacaaccagcaccaacaacacaggcacgccagggccaggacccaaagaccccaagagccgcggaaaccacacccgacgcgaggagaaaaccatgaggagcagggggcccgacaaaagcaaggagaaaggatccgcgactacacaagagagaaaagagccccaccacaggacaggacgggcgaaccacacgggccgaccacccaaaacgccagaaggaaacgagccccaacaaaaaacccacgagggccaacaaccaccgagacaaacagacacagccaagccaaccagaaccgaggaccaacccaaaacacgggaacacacatcagacaaaacaacaacacacgggagcaccaaggcccataagcagag

SEQ ID NO: 130586 - DNA, 570 bp, Arabidopsis thaliana columbia
  unsure (1)..(570): unsure at all n locations
cgggtcgcaccacccgttcgaaagagactgtnnnnnnnnnnnnnnnnnnnnnnnnnnnnnnnnnnnnnnnnnnnnnnnnnnnnnnnnnnnnnnnnnnnnnnnnnnnnnnnnnnnnnnnnnnnnnnnnnnnnnnnnnnnnnnnnnnnnnnnnnnnnnnnnnnnnnnnnnnnnnnnnnnnnnnnnnnngggacgattgctgactccacgtaatatgccgcggactgtgacgctctttccaacaatggcacgagctggatggtatggggaactctccctgcaacggtacattgagcacaccgggggtggaggctacgctctgtgcgaccgttgcactagccgtggcgctagcgcccggttcttatgctctattgccttacaatggcgccacgttcggcggctttccctgttcagctctgagactgaggctctgtctacgggaccgagtcagtgctttagagaacctggctcgcgataaacttgctaaaggtgattgtgaacttggtgtgcccatggccccttatagaacgttgagtatccgctgctgaagttaggagctccacctttttttta

SEQ ID NO: 130587 - DNA, 478 bp, Arabidopsis thaliana columbia
ggaatttcgtgtagacccacccgtccgaaaagcactctctttatacctcctttgaccattcttgcgaatttgtatctatctgctcacacattctctcaaacgaagcttgtgaccaacctgacacctatcatagaaccaccgacacttcttgcattgcatgaactaccaaaacaaagattctaccggggccgcgtgtgacaaaatggtcaccccattctctactagtggctctgctgcttctggaacaaagtgaggagctggtggatgctgtaacttatccactcccagatgtacagcgaccactgggactccaaccacgggtatgctcactactggaactacctgcagcgcttgctccgcgcttggatctgctaccaatgcaacttggagtcatggttgtccaactaccgtgactatcaatgcaagtactaactgtgctatgcactatgctaacggctatgccacacatggatggttg

SEQ ID NO: 130588 - DNA, 798 bp, Arabidopsis thaliana columbia
ccgaatttccgttttcgacccacgcgtccggatgatactagctatatgaaccaaaattgggagatgcgactttttattttttagcctgatggtagcacataccatgctgtattgagcatggcctcaactgatggtactgaggttaaagcagatgagcatcgataagagcttagcaatgattcatgggaaccggctgttgaaaagatttgtgacccacggaggtgagcatccatctgaagtgctcttgacgcttaaagaatgcacttgttggcacatatagtttttggacagataggcttggtggatccatgatcgaattttttgaggtaacactgcgacctgtgcttttattggcaaaggttatggatgtcctattacagctaactatgatagtacaggaaacagatgatgagccattcctgagcttaagaacgtttatggaactaaggacgcgacgttcttctgtatcaaacaccttacctggtgctctgtgctgctccatacatatttagagacccaactgattgacctcctagaaatgtagaaacccgcttgttgtatgaggatacaacttcatctattgccctcgggttatgggctccaagaggcgctcgctcccggcttggattcacgctgatttgcttccacaaggggggcctgacacccccgaaaaataatccctcttgagcctgggtgggactcaaaaccctcattccccctatatattttaccagttgtacaccttggcatgggtctaccctcccaccatggtggtctcttctaaatcaaaaaacacct

SEQ ID NO: 130589 - DNA, 837 bp, Arabidopsis thaliana columbia
aaaaccccgaaccgggaagacagacaccaagagcgcggctcacgcccagaagacgcgacacggattttttttttcgagcgccacacgacgacacggggccccacaggggggcgacaggcgcccacaaaggggggggcccaccgagtacacgcgaggcgcagcaaaagaacgcagagaggccggcacaaaacgcagaggccccaacccggcgcgggccgcagcacagccccgggcgaaggccccgcgagcgcagaagggacgaggcgggccacatacgccaggatccgggggccacacgcagggagccagacgcagggcgacgcccgccgggacgcgaccctcacgggaggagcgattcgccacatgacgaggacccgagagcgaaagacagaggaacaggaaaaagggtggagggaaagccgccaccaagaaaaggctcacctagtagaacctgggggaaatggggagcagaccccaccgaagtgaagatcgacagccggtcaagcaggagcccggattaaacaggaagcgtcaaaacatggacaggggactgcacagatgtacggggcacccgataggctgatccgggccaaacgcgggagggttgaacggcaacgacagttatgcccgaccgcgacgaaacggagcgtagcagccatcgcgtagggcaccacgtggatggattcatgtacgcccaactcacagcgaatagtgagacggaacacaaatgatgaacgggaaatagtagcggatctatgagaaagagagcacggaagtggagagagcgctaagaatcggaaggcgaggaatcgtcacatggccgcgcggccagcgaga

SEQ ID NO: 130590 - DNA, 683 bp, Arabidopsis thaliana columbia
ccggtcttgtattcccgggtcgacccacgcgtccgcagaaaactactctactgactccagtgcccacagatcttaatctcactctattccctcagcactgatacctaacataatggcacatgtacggcttgtccatatccgccctcaccaccgggatagccttgtcctacgccagattaccaaggatatacaacagctgaggcttgcgaaagagctcacgcccctttctaccgtggctacgaaggttgtggaacagggtgctgagccggaggatgtggtaaccaatacagccaaggatctccagcgaacactgcggcttaaaactccgactcacgtgccacaatgaccatagctgtgagcgctagtttcgatctcaaatgctgctatgaacccaaatggtgccatgctggtagtgcttgaagcttcatgactgacgactgactgctgctgataaagccttgcttatcctaggaacaatggtggtagtggtaaccctactagacctaactaagaccttgctattgccatgctactcaaggacgctatcatgcggcacagattgccccgtctatttccgtggagagactgccctcagcgaggacgacgcattgacacatccgacggttgccgatatcatagctaggtgctaataactaaagacggtagcgccggaaacactaagc

SEQ ID NO: 130591 - DNA, 680 bp, Arabidopsis thaliana columbia
gaccaccgtcgggttgttgccagagaacaactgcactacaccccttttttttcctgagaggacaagacacttgtgcgcattattcaacatccagatctcacctctagactgagactgaaccatcctcgttacgaacgggactacacgagcgcgactaaagaccgtactcagagtctcggaagagacatggattgatgcctgcctgttgcagatgtagttttcacttctagagagaagtctgatccgaggggaacttgaatggttttatcagcagaaccgtatcgttgctgtgtcggtcaggactatgcgggaactacattactctagtgtactgtacgaagtagaggattgactatcttgctccccgtaaatgcggtgccgtgtagcgcgctcctgatcagactatcatagtctgatgaacacgaggcggcggggagtttgttgctcatacgttgacgctattagggtttctttatcagggtcacgctccccagaacccgaattctaaatctaaatcacaatcaggagtccggtggaatactattccctggatggggagaaaacttttcttgggaagccgggtttaaaaaccggctttgaatgggccctaaaacgaaaaaccgcattgaattggggccacccagctactcaggcaactttcctcgtctttggggaagaaa

SEQ ID NO: 130592 - DNA, 694 bp, Arabidopsis thaliana columbia
gccggtcccgaatttccgtttcgacccacgcgtccgccatattatccccttagaacactagatcatgtcgatcgcaccatcatttttgacgacgcccctgacttgcacgatcttgcggggacattgttttcactggcgaccaccattatcgaaacttgtcatgcttcccacgtggatgagacatgctatcttcggagggggcgcctgcttatggaatggctctgacgacagaacaatgtatgcactgccgctagccggcggcactgcactcgactgacctgcattctcggtcgtgttgaatcggaagcacacgtttcatgactgtgacgaagcgggctttgcgatgataggatgagatactattagaaccaacgccgcgcggaaggatcttactcacatcatgagagctaactgcgactaactcggaaagctgaacctgactgataaagtacaggtctgctgcgtatatctgataaaagcgccatgagaaatctatgtgctgctgtacgatatactcgagcaaaagtagatatgatcggcatgatcaatggatgcaagaggatgcgaggctatagaaagtatgatgtatctattcgggcgctttcttttgagaacgctagcttgcgttcttgtacctgaaaaaaatagtgttgaaacttattgggcagccattaaagcacttatccgaatcgtg

SEQ ID NO: 130593 - DNA, 738 bp, Arabidopsis thaliana columbia
ccggtcccgaatttccgtttcgacccacgcgtccgccctaatctcacaatctcctacgagatctattagattccactatgattatggttgatgccgcatacttgctcgttgttgcgagcggaaaagcttcaccaaccagtgccgatatcaagactatccttggatcagtcggtgctgagacagaggatcctcggagggggcttttgtagaaggaagtgcaatgaaaacagatggctgaatggattgctgctggaagggagaacttagctttattgccatctgttcgcggaggtgttgttgcggaagctcccgctacatctggaggtggaggaggtcgttgtgcttatgctgctagctcccataaagaccagaagaacgaagaaagcgaatattcccatcatgacatgggtctcagtctatttcagtgagctgtaagtagcatgaaaagaccggttctgatgcccgttactaatattggaaccgtaagaaatctatatgttgctgtggtctagctaggactcgatcatcattgatagacatggctgaagatccgcaaagagtttctgaccctttcaatgagatacatagccaaacgggcggcggcttttgaggacccagcttgcttgcgcgggcttgctaaggaatagctctatttattgggctgcctcaaatgaatttcaccggggccgtgggatttaaagggaacgcgaccggggaatacatgtggcctttacccca

SEQ ID NO: 130594 - DNA, 696 bp, Arabidopsis thaliana columbia
ccccacccgctccgtaataggttagcggagtatatgcagcagaacggccgccttttttttttgtaacaacgcaagctgaagcttatcggcttccgtagcgagtggacagagcacgactggttatagacgttttcaaaaacatggataacagaagttagccaacgagagtgtaacttagttgttaatggtgctactcggagtatgaaaaattcttgtagatgtgaattgcagtctcctcagtgtgacgccgtcggatccaccgctgttgtatcggttgtcacgccggagaagatcattgtttctaattgcggtgattcacgggctgtgctttgactgaacggtgtagccattcctctctccgtagatcacaaggtagttaaaattatgccttatatagaattaccaattggttagtatgaatcaagatggcatggttctaacagttttcgttttgcgatgaaccagccggatcgacccgatcaattgattccgatcccacaagctggtgggccgagctatatattgggatggagctagggtccttgcaggtcttgccatgcctagagcacttggtgagcgaatctctcttgtgatttgacttttttaggccttttttgaattaccacctttgaattttaaatctgatgaatcatttgctctttcggtcttgtaccaggggagaataaatttaacctt

SEQ ID NO: 130595 - DNA, 728 bp, Arabidopsis thaliana columbia
cccacccgtccgcaataaactcttcttctgcctcctctgcccattacttttattttttctctattccctcagcctctctctcacataatggcaatgttgggcttggttttatctgctcttactacaattcttgcattgtctgaagcaagaatcccaggagtttacaatggtggtggttgggaaactgctcacgccactttctacggtggctctgatgcttctggaacaatgggaggagcttgtggttatggtaacttatacagccaaggctatggtgtgaacacggcggctttaagcacggctctgttcaacaatggttttagctgtggtgcttgttttgagctcaaatgtgctagtgatccaaaatggtgccattctggtagtccttcaatcttcatcactgcgactaatttctgtcctccgaactttgctcaccctactgacaatggtggttggtgtaaccctcctagacctcactttgatcttgctatgcctatgtctctcaagatcgctgagtatcgagccggaatcgtccccgtctcttttcgcctagtgccatgccggaagagaggatgaataaggttcacaatcaacggcttccgctattgtaacttggcttctaatcacctcactcccttggcgcccggaaaacttaccgccggctcagggggtgaaaaggaaccacctatcttcgtgggatgacccatgaagtccctcacctgggggac

SEQ ID NO: 130596 - DNA, 629 bp, Arabidopsis thaliana columbia
ggggacgacccacccgtccgccataaactatccttcggcctccagagcgccagattttttatttttttaaagacgatgacgctctctatcatattgttgcgaagactgtctcatcaatagccagcaccactaccaatgacttggtatgactgaagcaagactcccatatgtttacaacggtagtgggctgggaaacaggtgacgccactttcgaccgaagcactcatgcaaacggaacaatgggaggagcttgactttatggaaacgtatactctcaactgttcggtgtgaacaccgcggctcttaatctgggacacgggacaacattgtgtttatctgacgagcttctatttagctcaaacgagcgaaaaatgaccaatgtcgcacttcaggtcgtacctgcgatctacctcactgcgcccaatgactggcaaacacatatgactgatactatggacagtggagggtggcgtgacccatgcttcccttactctagacatgccatgccccaagtttcacaagatcggcaaagaaagtgaagtcggcaaagaagaccccctcttacttctcctcgctaggggcatcgtgccccattaacaacaccgcagggcaacttattggtgtcaaca

SEQ ID NO: 130597 - DNA, 646 bp, Arabidopsis thaliana columbia
ttcgacccacccgtccgctaaagacggtcgtaggggctcctctgagcatgactgccactttttatttgaacgacgaatgtaccgctcatatcatggcgaggagtttctcgcagctgctgaacacccccaccgtgcctagccattgcctgctcgagaatctcagtagtgcacatggctctgtgcgagacatctgccacgccactatggccgtggctatgacgctccttccacactggaacgagctagcttctatggttacctataccggaaaagctatcgtgtgaacaccgcggcttatcccacggcacgggaaaccaatgactgccactgccgagcctgcatcttacacgaaagatctgcatatgccaaatagcactgatgacgccctccttgcatataccaccatgcgacgaatacctgtccactgcatttgggatgcggtatggaccttccacttatgcgtagaacttactacacctgactcacaggttggtatgcctatgttggtcacgaacgatggatagagaagccgactccaatacgctttcatccttccatgtggctgccagaagctcggcggtatgtcgtcacaaccgacggattcctctatttcacgttggtactcgtgccaaggtaactgacgccg

SEQ ID NO: 130598 - DNA, 576 bp, Arabidopsis thaliana columbia
ctgactcctgcaccgtcgtagctggatccttgagcggccgcccttattattttttttttttttttactaaaaagatttctttatttccaacaacactgatctgcttgatacaagcttctcttctttggatgtgatgaaatttgctgtttttattctttggatggatgtacaattgacttactaattgatcggcatttttttatcaacaactcaagcttttccggagaccaaagagacggatcttatctgcgatcacagctttcatggctgcttttgttgcggacatgacattaacaatggcggtcttcttcccacagctaagagcttccatgtaagccgttcttacttctgtgttcacgtagaacttcctcactccatactaaatgcattcctgatctcattcagtaaacaattttcataccccacaaagacgttaattcagttaaattcatatcaagacccccatcaaaagaaaaaatttcccgccgatttttattagttttttattaccaaacaagaaactttcaaacatgatcgactcataccttgataaggttctaagaaaaaccataagct

SEQ ID NO: 130599 - DNA, 597 bp, Arabidopsis thaliana columbia
acgtcgcatgcacgcgtacgtaagcttggatcctctagagcggccgccctttttttttttttttttttagagtgattcggttaatctttttaagcttttgtaacaacttatcaggattcagctgagtgttcctcgaaagtcactttaagaatgaaaaaaattgatgtttgtttggtatcaatcgtccatgttcttcatgtactccttggaaagctttgtttccataataagtttctgttcatttatgagtgagtaccctgattccagcaatgcttccaccgtttgctcaggggcagtgaattgaggaacctcttgggtctttttacgtctgagaagaactttccctagagtctccattcctccagcttcatctacccacttgaggatagacctatcatatgtgcgtgacctcaaagctccatagaagtcaagtgcttgatttggaaacttatctacaatgcttataacatctttccgcgatataccatctttctcgtacattctgctaacaatgtttacgatatcttcacgagttggctgccagtagaacttctccattcttccttcacggatcagtggagcatacagtgtagagaa

SEQ ID NO: 130600 - DNA, 604 bp, Arabidopsis thaliana columbia
  unsure (1)..(604): unsure at all n locations
nnnnnnnnnnnnnnnnnnnnnnnnnnnnnnnnnnnnnnnnnnnnnnnnnnnnnnnnnnnnnnnnnnnnnctttttttttttttttttttttaaaaaagaaaatacagaaggttttcacattggagagaagtgaacaccgttactggacaatggtgtgaaaaaagttacacaaccgatttaaggaggggcttaaacgtattgccaacaaaatgagagtaggtggttaaagtcgtggtgattgtaatgtaagactgatacgtacaattggactgtcttcgtgagcacagggattgcaattatgcgaactaatattaagtggcggaacagtacctaccaaggttgcatcatttaaagcattgttcctcgtgatggcatcctgggaaaaaactgtggctgtataaactatccacaacagcatctttgaggagaggtgaccattctattcactgcgggccctgagatatgtcgcttttaattcataattgcttcttagataacaggattgtggaaaatttgtgtcaattatttcaagtgccacttaggagccacggggagtacttttcccgccccgagaaggtttcaaaggtcatttcaaattttattt

SEQ ID NO: 130601 - DNA, 608 bp, Arabidopsis thaliana columbia
agctatgacgtcgcatgcacgcgtacgtaagcttggatcctctagagcggccgccctttttttttttttttttttttttttttttttttttttttttttttttttttcaaaaccaagcttggcctaggttgatttaaagcgaaacaaactcttttaagcatccaagggtggccttatggatggtaacagttccaaaccggggacgggggtggcttcatcaggggcaacccccccggggaggacttttccttccaacaggtccaagctggctccccccccccgggagatgtgacacaggactccggcaactccaactttctccactgcagccactgagcctcctccccctattatcggggccacccctttttcactaacctttgccagttgactgcgctgccccctttgatccacccgaaaacttttccctcccgaaagctcccatgggccctttccaaatgactgtttgggatgggcccagcgctcctataaaagcttgggtagaggagggaccattgtccattcccatccatcccgcctaaatgccctgatgtcggcccaattgttcctgggggcctcaggagaaaaccttgtcgggaactaccccc

SEQ ID NO: 130602 - DNA, 604 bp, Arabidopsis thaliana columbia
  unsure (1)..(604): unsure at all n locations
tgacttcgcatgcacgcgtccgtaagcttggatcctctagagcggccgccctttnttttttttttttttttttttttttttttttttttttttttttttttttggaaccaaacttggacattttttattttaaaagtcactgagacaaaacaacagtaatggaaaatacaaagcttttttacaatacaaaactggaaacaagtggttccagacgattttaaccacaaataaatgaggaatatgacagaaatcaggaagttgcagtattgcaggtcccaactccatttttacaatcgtttgtaaaaacgttgaatgtttcaatctgctttttccctttcaagaatacttttgggtcaacagatgcttttatgtaaccattaaattcgaccgggttgcctccattaagcttagtagtttctgaataccactcactggttttatcccaaagatctttgtattcgtaaaggaaatgagtggcgtacttatttttcaaagggttgaagaaggataattctccttcatttgttgcgatgtaaaaatgcctttctttttcaactttgtcctgcaagggcgacaaaagagcgctcggggaagtatcccctta

SEQ ID NO: 130603 - DNA, 588 bp, Arabidopsis thaliana columbia
atgacgtcgcatgcacgcgtacgtaagcttggatcctctagagcggccgccctttttttttttttttttttaaatacaatattcaagtttattcaactgataaagtacatgcagtgtggtaatactacacacaaagtcgccagcaaacaacatcaaacaaacaagcaaaaacatgaaaaaagctttggggatattcaattcttaagctttctagttaaggagttggcttcatcgtgttggaaacatcaatcacaaatgggtacttaacgtcagcctttgcaagccgttccatggcggtgttgacataatccgcagagatgagctcaatatccgccgtgatgttgtgttttccagccaaatccaccatctcttgcgtctcctttatacctcctaccatactacccaccaccattttccgcccaaagatgagaggaaaaacaggaagctcgagcggttctgctggtgcaccaaccataacaagttttgccttatttttaagcaaaccaagcagcggtagaagtggatgggtcgcacatacggtatcaatgataccatccatagtccccattgcatcctttatttgtttcg

SEQ ID NO: 130604 - DNA, 599 bp, Arabidopsis thaliana columbia
tgacgtcgcatgcacgcgtacgtaagcttggatcctctagagcggccgcccttttttttttttttttttttaaaaaaaaccattcattacttttttccacatatgtggaacacatgacacacgcgccatgctttactacatatatgttatcctcacttaatttttttactggaaaacgtactttacatacattagagactctcgggaatacacactatgcctagcattttgaataaactcatccacaaagtttggagtttgcttagatcattgaaatagagttggaagatgttatagtggtactttcttgaccattgtaagagggccaactccttaaaaacctgtatctataagagtgaccaaatcacgcacccttcagtgaaagactgaaaaaaagttcaagagcctcacttattccttcgatatacacttcgaaattccgcgacatcataaccctgcagatccaaaccgaaaaagctttaaatgctgtcccctataatccaggagactagtgctaaataagtggggtaagaattaacggaacgccgagactttttaatcaaccactatcgctccgcgtaaaccataaccgtattttc

SEQ ID NO: 130605 - DNA, 963 bp, Arabidopsis thaliana columbia
gaacgatgaaatgacacgacgaacgtaaagcatgggatcctgcaaaaagacggaacgcagctataaaaataaagaaactaaggtattaggtgattagagcgaagagcaaaagagaaaaaatagaaaaagcgagagggggaaaaaacaacgaggaacaaggaggaaagagaagaaacataaaaagcggagacgactaaaaagaagtaaataacaagggaggaagtggggagaagaagctaaaaacaaggggtatgacagtaggcgaaaagaaagaacgggcgcggaattgacatcattgggacgcaaagaaaggaagatggaaaaagaaataggacaaaggggaaaaaatggccacagaagaataaggaaacgtgaaaataggaaaggaaaatcgaagaggaggagggaaaggaacaaaagagggggacaaacgaaaaaagtagagcagaaaggcgcatgtgaggcggagaaggaggaaaaggagggggactaagaagagcgcctccgatcgaccgggcaaacgaaagaagaggcaatggggtgagaaacgatgagggggagaaagaggaggagcaaaaggcacatcgcggaacagaacgaataaacggcgaggcaaacggaactggggggcaacaaaagaattctatccatagacagacgagagggaaaagaccaagcccataatacggctatagacaatcaagggagaaggggaaaactatggggagaggagacacagcagatcagggagaagaagtgaatggaaaaaacaaaaagaggtggcgtaagaaaggaataaaagaaaaaccttagaaaagagaaagggcataaaagaaggaaaaagaaaaatattaaagaagtccacgacgggaaagacgtagaaggggcaaacaaaagaagccgaggtcacgagaaggtctgaaaaaacgacggaaggggggaagagccaaaaaagaggaaaac

SEQ ID NO: 130606 - DNA, 625 bp, Arabidopsis thaliana columbia
  unsure (1)..(625): unsure at all n locations
ttccnnnnnnnnnnnnnnnnnnnnnnnnnnnnnnnnnnnnnnnnnnnnnnnnnnnnnnnnnnnnnnnnnnnnnnctttttttttttttttttttagcgatataaatttagtggtcattcttcatcatcagtgacatctaacaaatcaaaatactcattgagatgcaatgaacaagaatcgtttgatgttgttacacgacacccatcaacacgatccttttgatcatcaatcatatctttagacatgccccaatccaacatctcttcttcactgtggtgtatcgcgaaagtgtactctccgctcgcacccaactccatcactctgaactcgcagttcccaaagttattcaaccgctcgaactctgccaccgtccacttgaaccattttgttagaaacactcgagatgtcagtccgtgggacacaatcactaggtttagttcacttgatggatccacttgatgcctgttcatgtccacgtctctccacatagactccagaaaactagaaacacgatcgtagacgtcggcggcggattcaccttcgggaaaacgatagaaaaatctaccgaaacgttccctcgtctccttcacaactctcatcctctcttccacttgaaaattcccaa

SEQ ID NO: 130607 - DNA, 613 bp, Arabidopsis thaliana columbia
agcatgacgtcgcatgcacgcgtacgtaagcttggatcctctagagcggccgccctttatttttttttttttttttttttttttttttattctttttttttttttttttttttttttttttttttttttttttttatcttttttttttttttttttcttccccccaaaaaaaaggtgttttctgggaacacctcccccttttttaaaaaaaaggggcccaaaaaaaaaaaacccccgaaaaaaaacatggaaaggttccaccgcctccccaaatttctccctttcccctgtaacccgcggaaaatggggtcaaaaatgggagggggggaaaaagccccaaaccaaaaaattggggtttttcggggaaaaaccccccggggggggggtttttttacaaaaaaattcttggggaaaaaacccctgttccccactaaaaagtctaaagaaaaagcggccctataaataaaatattgccgcgtataaaaccccggggggaaaaacaaacacggggggccttgcctctcggcgcggaaaaaaccacccaaaacccccttctttgtttcccccacaagcggtttatataggcgggattcttcgataaaaaaaaaaaacc

SEQ ID NO: 130608 - DNA, 619 bp, Arabidopsis thaliana columbia
  unsure (1)..(619): unsure at all n locations
nnnnnnnnnnnnnnnnnnnnnnnnnnnnnnnnnnnnnnnnnnnnnnnnnnnnnnnnnnnnnnnnnnnnncttttttttttttttttttagtcaacttgtgagttgtgacatgtaaagttcgtatagacagacaaaatatacgtgagcataccaaaaaacaatcatttctatataacaacagcaaaccggaaaacgagtctaccggccggacataagactgactaaatcttcgttttggaagtttccaacatcccaatttccggtagacgaaaagagagtggataaagcaaccacaatgtatctcatactcggacgtagctgcgcattctcttgtgtacatgctttccctaattccgccatcttgtataccgaatcaaacgggtaactatcaccgagcctcgggtctataatcttgcgtagtgcttcttctttgtcggtttccttgaatgattcttcgaacacaccaacaaggcctctaaattcaccaacggcttctgtcattttgacaaccgcacctttcgcagaaatcaattcgtaaaggacaactccaaatgcatatacatctacttttgcagacacttctccataaacagtctctggtgccatgtaaccaaatgta

SEQ ID NO: 130609 - DNA, 578 bp, Arabidopsis thaliana columbia
  unsure (1)..(578): unsure at all n locations
actaggacgagaggagacacgcggaccggaggaggagaaacaccaggcagggggccgaaaagagggaagagaaaaagattttagaggaagccaagaaggagggcagaaaaaggggggggggcgacaaaagcgaagaagaagaggaagaacacaccagaacaaagggggaacaaccgagaaccacccggaaaacaagacgggggagacaaacaggcaacgggcgagaaagaaaggacagcagggaggacgaggcagggaaaggcagggaaagaggaacaagggagaaaaggggagaacagacaagccaggcaagagagcgacgaacggaggcagggaggaaggaaaacaggaagaaggaagcgaagggaaggagggagagcgaagggcgacgggggaaagagaagaccgaagagaggaggcgaggagaaggcacgagaacaggcgggagcaagaccggggacaccgagggcgagaacgaaaaagggaaccaagggaaggaacagacgcaaaaagaggngacaaaggcgaaagaagaaaagggagagacagacaggaggaaggaatgaacagcacagaag

SEQ ID NO: 130610 - DNA, 695 bp, Arabidopsis thaliana columbia
actttggcttggcacgacgtccgtaaagacttggaatccttatagtagcggcacgcgccttgccattgattacagtttgttttttttttgttccacagctcctcggcattctcaaaaggcacaccttttcccagtattttttttatcctattaaacttgccgtaaagcgtgatggatctactacacaaatgcgtaactcgaagttactagaaacttaggagtatgctcatcttagttcattaatgttacactgcaacattttgtatacctatgtctcttcaataattaatcaaatacacacctgcaaattttaaacatacagcccataattctggtagccacattatgcttatctttcttacacgaaaaacttcataattgacgcgtcttggcttcttaaacacttatgggcggctgcaccttttcgaaaatctcttatgtagtcttcacaatatatgtttttttatcaccataatgcaatacttaactatcctgggaatattcgttgctaatcatcaaatagcttctatattataaataggctctgtgaaaacatatgtatttcctatagataacccttaattcgcataaagtgtacaattcattgtgaggtggccataccctgggataaacaagaccttcttttttgactgttctaatcaaggtaagggggctgacacatcaaattatttacc

SEQ ID NO: 130611 - DNA, 601 bp, Arabidopsis thaliana columbia
tgacgtcgcatgcacgcgtacgtaagcttggatcctctagagcggccgccctttttttttttttttcattgaccttaactcaaccaatcgctaacgaccacccgcaccttttgtaattgatgacttgcgactcctccaccacaaacgtccagaggaagcctgagcgaccaggcttgtggtgttatgaggtgacatacgagataatccatactttcttactaagcatccaattacaaagtctctgctatggaccgcacccaccgaccgggagcttttctctaacgactggaccacctttataccatgatctaagctcttagacgttgccatcggtgaaccctacttgcagtacgcaaaaaccaaagtgcaggtactatgcataccactgccgacaaagagatgcaagtgactgatcctgtggagcaaaaccttgggatctcccttactaccctcgttgaatacagcttgatcttctccactgagcaggagcgtcatacgcttaactggtttcttaatgctagcgcacgaaggccttacttggataagccggacgctcccgtggactgaaggcgtcttctcttatagcgaccttttttgtaga

SEQ ID NO: 130612 - DNA, 602 bp, Arabidopsis thaliana columbia
tgacgtcgcatgcacgcgtacgtaagcttggatcctctagagcggccgccctttttttttttttttgatttgaattgtcagaaagaatccagagaaagctattaacgttcctgagattttggacaagtactacaccatctacagaccacaacaacgagcacacggaggtgatttaaggttagtctcttcattattcacaggcaattctggtttcaaaactgctcaggcagatagcaaacgcttgaaacgcagaaatcggatatccataatccatggtaaacatgtccttcccaactttcccaaactggagtatgatcctctcagatgtctgccctgcttcacagtcactaactgccacaagctgaaagttcttaaccgaagccactgtgactcgaccatggaaatttaagcaccagcaacgtaactgctcatgccaccgtggagctttgttgctcagcaccaatggtggatctcccaggttgttgcctgagtcgctacatgatgcactattactgcgcaatggttttgagtgagacctaaagactggtgatgaccgactggaaaaagagcttatggatgttgaagctactactcctcgcgac

SEQ ID NO: 130613 - DNA, 617 bp, Arabidopsis thaliana columbia
tacacaccacacgagctatgacgtcgcatgcacgcgtacgtaagcttggatcctctagagcggccgccctttttttttttttttttttttttttttttttttttttttttttttttttttttttgcgcctagaaaatcatctactttgaaaaatatgcctcattaactctttaaaaaaaccatttaaccaaaaaatcattgcattctaattcttcactttgtcttcaagggcttgacaagctcatttaatgcattgcatgaggagcctccacctttaatagaggctttgagctttttttttaaaacaggggttctctcccttatgcttgcaccttttttatccacaataaaccttttgacagttttttcgacgggtccttttttcaggtcacctcctacctgaatccctattctccatacactttttagatatattgcatttaacatttggtccccttgataaggcctgcaaataattggaactccttccacaatgctttcgagtggtgagttccatccacagtggctccaaaagcctcccactgagggatgtactacaacatgttttttggggggcccattttacaatgtattcttggtttgaaaccatcatacta

SEQ ID NO: 130614 - DNA, 599 bp, Arabidopsis thaliana columbia
  unsure (1)..(599): unsure at all n locations
ctatgattgcacacgtacgcaagcttggatcctctagagcggacgcccttcntttttttttttatttagattcaaaaggaatacattgacgttaccttacaaaaaggttgttacactaaaagaattcattttgaagaatacaaaaacaagcttcgtaggttcttgtctaaaatcagtcattgaaaatcagaagacgatgaagatgttagatcaggatcttcaaacttattaaaccttttccgagtcgctgcatcgttgctaatgctaatcccatgctgctttctaccatacgagtcttcgtttatgtaatcttcatcctcatcatcaacaacattcacatccattttcatgttcatgtcttcttcttcttcctcttcttcttcgaattcatcatcactatgtaagctaaattcccccctacctactaatttacttgattcgccgccgccatcaaaatcatcaatcggagccatgacatcatcatcatcatagtcctcatactgaaacgatctccccgagctgctagcttctccgtcatcgacttgcagttcaagggtttcgatccaatcgtcatcgttttcaggaagactggttttggc

SEQ ID NO: 130615 - DNA, 621 bp, Arabidopsis thaliana columbia
ctatagacgagctctgacgtcgcatgcacgcgtccgtaagcttggatcctctagagcggccgccctttttttttttttttggcaacctatataaatagtgaaaacaaattctagttcattcattacaatttcccaaaacgagtataagaactcgcccaaaccaacaaataagtaattgactaaaacaatactctcctcccctctctgggcaggacagcatcaaacacacctaaagccattctatgacaaaaccaaaatggcaaacaaataacccctgtgagtttccataactacacagggatgcaaagaatgaaataaactcggcctctccacaaatacaaaggccggagactgaaccccaaaacaaagaagaagaaagaatggaaaccgaaaagaagataatatacacaaaatgcccataggaatgcagcggctcacacgatgtatttatgtatatgcggtagatgcaatcgtatttgatggaccataccgagttctccgagggcagttacgatgtactgccttctttacgtgtgagcaagaatccgaaacccgagttttcacggattagttgaggaggttcaatgtcatttacatccacttgttgcatggactttgata

SEQ ID NO: 130616 - DNA, 226 bp, Arabidopsis thaliana columbia
gcacgccacacgcaacgcgacggtagccattacagtgtgacgctcctaagtcatacagcacggaggatttttatttattatcccatgccctgcaccactaccaccggttctcagggggcgggtgggcgataaccgtcgtcagtaacatctctataacaattgtctcagctcctcaccactagaacacagaagactagcttaggcgatctccctcaactacatggaa

SEQ ID NO: 130617 - DNA, 624 bp, Arabidopsis thaliana columbia
  unsure (1)..(624): unsure at all n locations
attccgtgtnnnnnnnnnnnnnnnnnnnnnnnnnnnnnnnnnnnnnnnnnnnnnnnnnnnnnnnnnnnnnnnnnnnctttttttttttttttttttttttttttttttttttttttttttttttttttttttttttttttgggcaatctaaagccctttcggggtttaaaaataaaagacgtttcaaggaaacataagtagaaactcttttgggacaatcatgtcaacatttttaaactaaggggcaggatcatttttgtttaaaaaaaaaaataaaaagctttaagatgaaaccctttaagtttcctttaaaaacccggtcaggatcaaagaccccgtagtttgttctcaaatccttcaccattttgtattggggggaaacataagttcgtttttggtttccccagctgatctttgttaaggaacgggtttgttgggcgttcactgatgtctgacgtcccctctttagttgggctaaccgggattgaagaaccccttttgctgaagccttgttcatatgttgggacctgcataccaaaatcgggggttggcaaacaaacccacccccaaattttgttttagaataagaagagggttagaaaaataataaaaaatttgcgactt

SEQ ID NO: 130618 - DNA, 607 bp, Arabidopsis thaliana columbia
gcctaacttgacatgcacgcgtccgtaagcttggatcctctagagcggccgccctttttttttttttttttttttttttaggggagaaaacaaacaactttattatcatctagaaattacagtacaaaggaagatttgttccaatcttagcataatcaaacatcattaaaagatcatctggagacgctgttgacaagcctagcaccaaccttatcaagcttcttcacagaagcaacagatttcaaatgaccaactttccaaaacgcttccaccatcttctctccaatcacttgacccttctcctccgaatcaatcaccgcaactgctgttggtccagctccgctaattgtacatccaaacgctccagcttccaaagctgccttcttcacagcttccatccccggaatcaaaggcgctctagttggctccacaatcttatccgacgacaatgccttcccaagcatcactgcgtcaccttctaacacagcagcgactaaagcagctgcttggctactgttccaaacatgatgaaccattggaatctctgtaggcaatgcagctctcattttcttagttggagcttcaaactcagggcttactagaacaa

SEQ ID NO: 130619 - DNA, 774 bp, Arabidopsis thaliana columbia
  unsure (1)..(774): unsure at all n locations
nnnnnnnnnnnnnnnnnnnnnnnnnnnnnnnnnnnnnnnnnnnnnnnnnnnnnnnnnnnnnnnnnnnnnncttttttttttttttttttttttttttttttttttttttttatttttttttttttttttttttttttttttttttttttttttttttttttttttttttggggttaaaaaacccctccaaaaccctcgggccccactttggccccggggggttaaaaaaaaaaaaacctggccccgggggggtaaaacccaaaaaacccccccaccccaaaaaaggggggagcctttttcggccccccaaagggaaaaccccccccaggggtgggattccttataacccctttccggaatacccaaacccccaatcggcctttttagaaaaccccgggttttcccccccccacaaacccaaatttcccaaggggtcccctacaaacaaaaaaaaatggggggccggccactggggggggaattacccccccaccctctccgtttaaaagggttttgggaaaacccaacccaatttccggaaaaaacaagaagtacaaccgggcccggggggcgtaacccaaccccccttaaaaactccccaaaagccccccccacccccaaaaaaagtcccggccccatgaaacccccccccccgggaaaaaccccccccaaaaaagacaaggcccccaaaaaaaaaaacccccaccccccagggggggcacaaggggaaaaaaaacaaatttttccccccccccccaaaaaaaaaaaaaaggg

SEQ ID NO: 130620 - DNA, 706 bp, Arabidopsis thaliana columbia
cttgacttgcagcccgtcgtaactggtcctctatagggcgccccccttcctttttttttaaacacttccccctctaaaggtcttttgaacaaggtgtcaggattccactttcagctaaaaaactcataggcatctttctttcttcctggagttatcgccccactgttttgtctaaactccctcgtagcgccttaaaaaaaccgtgtaaacatggtgctcaccgttacctttcaagccggtctttctgtgagaggcgacataacattatctttatccttatgctctccttggcgtgctttatgttatgggcctactccgggtgtcaccagaaagaagctgtcttggcacaaaatattctccggtccgttctttagctaagtcttaaaagctgctctctttcgtgggaggcctctaaaacggctcttcgttacgtccgtataaaaagaaacatttatggtctctttgccctcgctttcggtaaccaattttgggaaaattttatttgtctcaccatcgtctaatccactggtctgttgccaattactgaaccaacctgggggagattcaagcgctccccttttcgctttgggcaaaaacactttttcgaagctttttccgccaagccgataatccccccgcttgggagagcacctataaaaattcttctacacctttgtcttaggtcacgttctcttaaaagccctcc

SEQ ID NO: 130621 - DNA, 764 bp, Arabidopsis thaliana columbia
ctgactcgatgcccgtctaagctggacctctaagcggcgccccacacttttttttttataaaagaccgccttacatagggtattactcgtgcctccggcaccggatcaacattttagtctgaagatatcatatggttgccacccactcttgaattggatagactcatatctacactgtaacacctgaactataaccccccgacttaatatctttcaaaaataccacacccacacccccttaaagctcaatgcttgtcccctatgggagaccgtgctgtcatcctttatcaacccccttctcttctcaggagcatccccccaaaagatcggcaccttattttacccgcgcatccccacatataaccgcctgcacctagcgtgaacctgtcatcccctattccttcaaaaaagaaatccgtgggctccccccccccggtcacatattctctttcactacggcgttcctcttggaatagggggagaaaacccaccgtgggcccccccatcaagagcgcccctctcgtctctgggaaaaacaccaaacccctcccaaaaacaaccaccagcgttttaggggggataggttcttctcctcggggcacagaaaaaccccctcccctgctatagaaactccacacggtcctttaaatgtggggctaataaaagaaatcctcttccaccccccccagaatggggagtttccctctctgtctctctctataaggggggagccccctcacactatttttttcttctcccctcta

SEQ ID NO: 130622 - DNA, 638 bp, Arabidopsis thaliana columbia
tataatagatgttgatattaactcaggtgtgagatgtatcatgttggatgtgatggtgatatttacgggtctagaagagggttatataatataatattattggaaaatgggtggtgacgcggctatatctaatatgtagaggaagtatggagtccgatgagtattatattttcaatacctattacgatatgtttgtggggttaaaaatttattatgaagcacaagaccttttttatagtgtgagcgggatactgaaaaaaaaatttttttttattcctgattacattgtgaatatgaaagacatccacacgttgggatgttttaaattttattgggggaagtgaaaaaaatattatttttgataatgtgtatataagaggagacttatttctttttatggggggaatgttaaattgaatttctttaaaaagattggggggtgggtctcttcatggaatacattattgttattctcgaggattggatgtgattataatcagaataagaaaagaaaagtatttattaatatggtactataagggggggtgtggggcttaaaaaatgaaatagttccttttttcctaagggagagatgattatgtggcatgtgtgttcttgatccacttctgtatgtaaaa

SEQ ID NO: 130623 - DNA, 1091 bp, Arabidopsis thaliana columbia
cgatgcgcatgaccacgcgcaacggttaagacctgggaaacacaccgggagacgggcacggccaccaatgacagaacaacaatcactagattttttcaacaacaagaggggcacgtgcaccaaaggacagaacagaagagggaggggcaaatacccacagagcaaaacaaacacctacacaacgaccgagcgaccaaagcaggtacccgtgacgccggaacaagcgacataaccaaaacccacaagacataactcgagctaccgaaacacagcggcccgagcaacagaggaacccgtcgaaacagacaggacaaccctacaaacggatgcgctccgaccacgagcccagcgaacataccaacaaactcacccgaacataacaaccagtgggaacaggactaaatgcgcactacaagatctaatgatgacgacataggcatcacagaccgcgaggaccactaagtctcgcagagaacctgaaacgacgagcaccgtatcaaccaacactagtggcgggacaaagagctgcccatgggtagaagccgaaacaggacgcacccccgccaaagagtcttgacattacaagaaccagaccgcacatcctgcgtcgaaggaaagcaccgcagacatctcagagggaaacctcgcacgaagagcgcataccgcatggccaaaaccaacatgggatggccacatggaaaaacagaacaacgggtgggaccacacaataaatggcccaggggaaagggactaatccacacagcaaagagcttactgtgggataaccaatcggagcgggccttataggacccttacccgcgagtccccaaaactatacaagggggtaaggggcagaggcaacagacaccagccttcccctttcaaccgggggcccagattcctcacaaatataggagccacgccaaggccccaaaaacacccagaccgacgaatggggatcaaaaccccccgcgcaaaatatccctggcaaccggggaaaccacaggcccagggcatgaacacccccagaacgtttcagcacacccaaaaaagacgggggaggtgtggacgaacttcgcaagaacaccgca

SEQ ID NO: 130624 - DNA, 761 bp, Arabidopsis thaliana columbia
  unsure (1)..(761): unsure at all n locations
nnnnnnnnnnnnnnnnnnnnnnnnnnnnnnnnnnnnnnnnnnnnnnnnnnnnnnnnnnnnnnnnncttttttttttttttttttttttttttttttttaaaccccaaaatcagttaaataaatggtttcggcccaaaattccgtttagattcattattaaccaccaaattctttttcacccgcgggtccaccatttaaaaaaaagtttttttttgaaaaccgtttttccattttgggggaggcacccctttcctttgggggttttccggcagggttttaattttttacaaaatggtttttaaatacccagtttccggttggattccggtttactagggccatgatcttccggaccttatttgacttaaccaaaagttgggtctggggggctcagggaagggtcctggatcccccatggcctaaaactggggaccccctcaaagtctccagttttagaaaacccttttttactcgaccccggttttttcatattagcccacccccattcttttacgtggtccacatgtccccttttaagggtggcaaagggagcccttactccttccccgggggggaccaaaaccaagtttttggaaggatccttataagcaggagtttttttcaaactaaaaaattttttgggcggccttccaaagcttttcccatgggggcatttttttttaaccggggtctctccttttgaccaacctttccattcggaaaaaaacgctttaaagttctgaaatcaggaaatcaaattt

SEQ ID NO: 130625 - DNA, 623 bp, Arabidopsis thaliana columbia
cttatgaaacgttgagatgatgacaacgtcgttaacggatgaggcatagggaattcctgtttaaaaaggggagtgagggatcatgtagtggaaggacatttttttatttttttgaagggtagaaagcaaggaataagaaaaatgatcctggtgaaaatcaggaatataagggttggaagaggaggagtgggggtgtgaatacgtaaaatacatatgagaaaacattttggtggcgaagaaaaaaaagggatgtatagagctggaaaagagtattatttattgatatgaaaatttggaggggttagagataagttaatgggagaataggagccacaaagaaaagggaaactaattgacgaaaaaggaggaaatgaaaggtgaggatgaaagaaagcaatgtacacagaagaaaaaaaatggtgtataaataaaggagaaatctcatcggggggagaaaaatgggtatgtatgaaagaaaagggggttttcgagaaagggggagagaaaaaggggaaaaaataagggattttggaggagagaaaaaaaagatggtagaggtgtagacacccctaagggatatttctgtatatattgtaaaagctgataaaaaaacctgtggggga

SEQ ID NO: 130626 - DNA, 656 bp, Arabidopsis thaliana columbia
  unsure (1)..(656): unsure at all n locations
cgttnnnnnnnnnnnnnnnnnnnnnnnnnnnnnnnnnnnnnnnnnnnnnnnnnnnnnnnnnnnnnnnnnnctttttttttttttttttttttttattaccctggttttttttattctcctgggaaaaccaaccaccacttaaaaccccttccaagggctggcgattcttttgtaccccctggaaattggttttcatcttttttttgcttcgaattaaaagaacattgggaagatatatggtttggtcttggggttttaaaatccaacaacttgagtatactgggaataagcatcggactggataacaattggggctcgagtaacatgatcagggagctcgaacgccttcactaattccttggccacattccttacttgaaaactcaaatactctgtcagtttatgaatcgccttaactttgttaggcgccacataatccacgttacgggacgttcctatatttttccaaattcggtccaatgcgtaaagaacacatgctagtttcaaagcaacttttgcacttgggtccgggccgtttttaacagcttccatgaacttggcaagaatgactggttcaatgggagaatctgcaagcgttaaaagatgattcaagcatctgttccatgccccgaaaccaccaagagactttgaatgct

SEQ ID NO: 130627 - DNA, 712 bp, Arabidopsis thaliana columbia
agacgtcgatgcacgcgggcctcagcctgttcctcttatagggccggcccagaccaagatttctttttttggagggcgcaacacgaaacaccgttgtcaggaagaatgggggccctttcgggatgtaagaaatcagtcgaaaaggaccttccgcctaagagggagaattatacgttacctggaaagatttgtgcaaatcaacaaaagccaaaaatcatcagcggcgggggatcctgcccataaaaaaaggattgcgttgtgaccttgaacacccagtaaaagcaggaccgatatagccttcctttcttccccgttttttctacccacggcccctctggctcctttgggtgcatgaattagctttggccgcaccttttgatggtattaccttttcgttaaccactctactaaaacatagccctcttttggcgggagacccccttgggttccccgggcggcgagcggggattagccccggtggtgaaaaccctttccctttctaatttcccccccttattaggggaacctcttgggtggtctggggccccctggctttatggctgggtgggtcaaggaaaaatatacccgcccctgggagggaaataccccttttctgaggtgggggaaatacgtatttaatatctatatcgtctcctatgtagtggctcgcagacgcccctctcttctgacgctcgacgccgatcccgctgcg

SEQ ID NO: 130628 - DNA, 773 bp, Arabidopsis thaliana columbia
  unsure (1)..(773): unsure at all n locations
attccgttnnnnnnnnnnnnnnnnnnnnnnnnnnnnnnnnnnnnnnnnnnnnnnnnnnnnnnnnnnnnnnnnnnnctttttttttttttttttttttaaagacaaatgaaacgcattattttaagtgaaatacacgtatgaagcaacatattttttatcacagagtttcattgcaaaatgtatggaatctgtctaaccttattttaccagacttggggacaaaatagtctagaggagcctactgtgaagatactgaacttgattcttgtgaatgacatggaaaatggagacccaaacacaacatgtgggacttttggagaccgtcataaagttttgaactgttcctacgtttaacagaggctttacgcttgctgttgcttcacatatcacaattcctagcgctggtgcattgatcgccttaattcctttcatagatgctgtgaagtccatagaatgaaatacctctgatccagccactatattcatgtgcttgatcctcaatacccttgcacgcaatggctggactgactccaccataaacttctataactggggttactaccttttatcacacattattccggactcgagaatcgccccgggaattctggaacggttcctggtgagcgtacacctttgtctttaataagacgaattaaaaattgggctaattttggtccgtgcaacttcctgtttatattagagatcccactcacaattcgaccacaatataacaaacctgaaactctaaggggtacaacctgggggtgcct

SEQ ID NO: 130629 - DNA, 713 bp, Arabidopsis thaliana columbia
tcgcatgcccgcgtacgtaagcttggatcctctagagcggccgccctttttttttttttttatatttaattttctcattttcttactatatatgggttataaggtgaagcaaacatgcatccccattatttaaacatcattccaaaggaatttgtttgttttttaattatacattttgcctttctatatcattatttttataaaatctctaatggaaaagatgcagaaatacaaaatgtggataatagaacttagctaaacaaaaggaattataaggaaaaaacaaaagataatttagctaagcaaagtatcctgatggtgagcgttgacaaaagaatcattcgtcttcttcaaaagcagtgacggggaaagtacgtgatactcccgtaggactagcaaatgtgatttgagtcgcatcttgatgataaacaaagatctcagagatcgtaacccaaatcaaaatctatttgctcttgatggccgggagctgactcatccgacgattctcaaggatcgcagtagcctccgaatcgtacgatacgattcgtcaatggctttaactcgagttgaaccttgttctgatctgatccaacataccggtgattgttggccgatctctgcctgtgtctagtgaaaaaaccttgggtaattatggtgataaacatttggtttttttgcgattgtctccatgatatcatgttctctattgattg

SEQ ID NO: 130630 - DNA, 977 bp, Arabidopsis thaliana columbia
gaaaaaaaaccaactatgaatttcgcatgaacgcttacgaaaagctaggtatcttttaaagaggccgacccaattaaaagtatttttttttaagctatgtgggtaaacaaggtagagttggatgtcttacgaagagggaaaaaaattagaacaagctaaaagtcgatactgaaaattattgggaaagttaaaaaacaacatgcttgtaaagtacaattgaaatatattttggaagacgccaacaggaaaaagatgtggttttctttcatgaaaaacaaaagttaggtgttggccgaaatttatgaattacttgaggaacagagtggcgggttaataaaaaaatcagttttttgtaagaagaacatacatttttggtggaaacttgttttagtacattcttttgggaaaaaccacttggttggggaaatgaaaaacgggtcaaaggaggggaacaacccattgaatagcttggtggaaagaaacttatttccacaagattgagggggtgtaatagggaatttccaatttgggacggtctttttttgaaacctttaattctgaagttccatataacattatacttggggggttatgggtaaaaagggtaaatacaaccttaattaatgcggttaataacctggggaaagagtgttttagaaaataatttttggagatcttataaagggactattgtaataacggggaacatgagtgttggggaccggaatactctggggggagattaatacggggaagtcgtgtttaaactgtcataggacgagtatccaatgactgttagcacctcaaaaaatgaagaagtggttatttaataagcatgggcggttaaataaaagtggaaaatgtactgtatctctggtgtgataaatggatattatccctaacaaaattctacacaaaaatacttagcccggaaagtataaaaggaaaagactgggggggccttaagagagaactta

SEQ ID NO: 130631 - DNA, 765 bp, Arabidopsis thaliana columbia
  unsure (1)..(765): unsure at all n locations
ctttcgttnnnnnnnnnnnnnnnnnnnnnnnnnnnnnnnnnnnnnnnnnnnnnnnnnnnnnnnnnnnnnnnnnnnctttttttttttttttttttttttttttttttttttttttttttttttttttttttcaaaaaacattaattcccatttttaaaacacattccccatttaaacttacaacaacatgaacaaaatttttcgtatggggaataatcaagtttttaagactttttttaaagactatttttatatatatatatatatttattaaccagttccatttctttcacccgggggccaagggtccaacattgtgggccacagtggtctccatagctttcagggcttaaaaccttggttccttggcctgaaacttgacagcaaagtaaagtttcttgtaatcttcaaacacaaatctgggataggtctttttcttctccttctctgctttttttccgaccagctccggcgccggaaaaataacaaagtcgcttcccggattataaaaggatgcgatcgacttttttccttttccgtgtgtctgagataacactttatgttccacacttttggacttcccatgggttatcccctcaagttgatcgccgaaattaacgactattgaatgcttaaccggaggaacatcgccccactcgccgtttttaaaaagctgaagcccactgacttttgccctttggaaaaagaggaatattccccccgctttggtgtgggctcggaaaccccttgattaggtccggatta

SEQ ID NO: 130632 - DNA, 727 bp, Arabidopsis thaliana columbia
  unsure (1)..(727): unsure at all n locations
agaagagctctgacgtcgcatgcacgcgtacgtaagcttggatcctctagagcggccgcccttnccttttttttttttttttttttttttttttttttttttttttttttttttttttgccacggaaccccctaatgctttaattttaaagacaatttttttccccatcctttttaaactactgagatgagtaaaaatcacattttttcctttcgagttttcgattatcaaaaaatagcccttactttttttgcagtttgtactttgggagatctgtcgcaacgaaactctactggctcgggttttactttgggtttctaattaaaaggtttttttcgaaaaaaaaaacctggggttgcaaatgtccttttttacacatagaaagaacattactccagttaccgataaccttgacgtttgggtcatcgtacatgaaccactgatcgggctcatgactttttgcaaaacagggataatgctgtccataataacaaaccacggaaactaagctttttgtgtttttagggcccacaccacgggacatgaggctgatgtctatttttgtattcaaaggtgcaagagtaggggtttttttttttacagtctcacatgggttttgcccccctaaaacttttgtaaaaacatgtggtggagtggggaaaaaatggtggaattgggttgggttttcccacacccccccaggtttggggaacccaaagctttgggg

SEQ ID NO: 130633 - DNA, 774 bp, Arabidopsis thaliana columbia
  unsure (1)..(774): unsure at all n locations
tttccgttnnnnnnnnnnnnnnnnnnnnnnnnnnnnnnnnnnnnnnnnnnnnnnnnnnnnnnnnnnnnnnnnnnnctttttttttttttttttccataaatcgatatatctataacacaatgaataaaattgtatacataatacatacatgagcctacaaaatatcaaatcaaaaaagaatccaaaatcgagtagaagtagaacaaacaagaacaagtgtagaaacaaaaagtgaaactaggcgtcctggtgatgtggtccagtggtggtggtaccattgacgccgttagagtacttgctcgaagttggtgcagcgactgtgttacctccacggctcttacggcgaagaacaatgaaccaagtgagtggctcgagaataaggacacaagcaccaagaaagatgaggatcccaatgtaagcccatcgccatttatcctccgggtccaaaatgtcgaatcctttgaaaatgttgacaatagagaggatgatggttgtgtatccaacggtgtgatggtacacgttccagtacgttcgatatttgtggtctggctttggccttacaagcagagcaaatacttgaagtgtggcaaatgtgaagagtgctattccaaggttacgatgggttgagtaagatgtgcctggtgagtcgttaccaagcttgattccggtggcccaacccgctaccccgatgacctaacccgacacttgaaagggaatgtggaaaaagaaccatgttgggatcggcgaaaactttcatgtaccgagccatcattg

SEQ ID NO: 130634 - DNA, 832 bp, Arabidopsis thaliana columbia
cttgacggcgcatgcacgcgtacgtaagcttggatcctctagagcggccgcccttattattttttttttttttttgccgggagatgtcccttaagaacgttttttctattgctcacgtgaaataaataaacatacaattgatttttcttcattatccctttccacggggaaattctggactactaaatggacagaagaaatggaaaaaacaagaaccctaaatactatggaaactgagctatatccttatattttgtttaataagaaataaattatatttgaaaaaaaaacgaaaagggggtcaatctagttctggggatcattgatttcaccccaactcctgattgcttcagtcactgcctgtttcactgcttcagcatccatatattctccatccttcattcctggagtcccatggcatgcaagctaaaagagtcgggccatgaagcccttacttgaataacgttaagcccaatatccttgaaggcttataataccgaaacaagcattcctggctgatttttttcctgaaaacacaattattctttaaaccccttgtcttagggttccacagttaccattgggggttttggaaccctgggcttctcttgaaaattggtatatgaacctaggggtcatgggttgaaatctattttggactttttctgggtttaaagacttcttgggaatcatattcttaagatggccactcccacttttttgaattccggatggtgcattgcgttatattcaggcgtttgggtagaactcttaggggggagcctggatacacgaatatggctagaatttagtaaaatctcttacttatttt

SEQ ID NO: 130635 - DNA, 742 bp, Arabidopsis thaliana columbia
  unsure (1)..(742): unsure at all n locations
nnnnnnnnnnnnnnnnnnnnnnnnnnnnnnnnnnnnnnnnnnnnnnnnnnnnnnnnnnnnnnnnnntcttttttttttttttttttttttttttttttttttttttttttttttttttttttttttttttttttcttttttttttggacccaaaaggggggcaaccttttttttttgaagccccaaataaagggccaaggccacttcccaccttttattttccaaaaaaaaacatttggaacaaaacagggggcaaaaatcaaaaaaaaaaataaaactcgaaggcccgcctgggtccccccccgaaacttggaaaccggaccgggggcaacaaaccccccttggaaaaaaattgcctttgcccttcaaattttttttagcctttccccaatttttttttaaggcttaaaaccattcatttgggcccaaaaaaaaaaaaaccccccttcacctgggaaccgggcccaaacatttgtgccgaaatgccccgtttttttttttttcccctaaaaaaaaaaaccaaaagggttaaaaacccccccggggtcccccatttttccttggactgttccctaggaaaaggcgagggtccaaaaagcccccggggcccaaagaaaagcctccttcttggccccctaaaaaaaaaggggccctgatcccaattgggcaaaacgggtgtatatcttgaacccttttcccacaagcgagggtacccccccctggggaaaaaaaatctattttt

SEQ ID NO: 130636 - DNA, 724 bp, Arabidopsis thaliana columbia
  unsure (1)..(724): unsure at all n locations
ctctgacgtcgcatgcacgcgtacgtaagcttggatcctctagagcggccgccctcanctttttttttttttttttttttagaacaaaggctttaaagcaactaaaccagtcaacagaaatgataattctagtctcataatgaaatcaaaaacagcaaaagaaaaaaaaaaacttggaaagaaagaaaaagctcaagtaaaccttggttttgcacttaaaacctttagttcttcttatcacctcccacttcaatcttcttcttctttgcaggggcctgagaatacaaaaaggtaccgcaaatcgcaatggctgatccaagagcattcagaggtctaacaggattcctaaacaccaaaacagtggagataatcaccacgactcgctttatcgtgttcccaacaaagaaagtcaatggactgatctcgtcgagtgcctggtaagaagactggttgtccagatgatagaagacaccagagagcaaaacccaaaagtagaacgttgatggtgtcccaacagatgcaatggctttatggtaacctggaacccaatgtgatccttcaacgaaaatcgccccggggaaaacagataaaggccggagaggaggtatacctggatgccacccggtttaggatttccaaattcccatccaaaatcttcttttaaaaggcctttttgttaaaggcctttccgttttttaggaggttaagaatgggttttccccgg

SEQ ID NO: 130637 - DNA, 735 bp, Arabidopsis thaliana columbia
ctatgacgtcgcatgcacgcgtacgtaagcttggatcctctagagcggccgccctttttttttttttttatacaatcaattgatttataacatcaccaaatgcaaaattaattttttatttacaacctccacatattgtgctataaaaaataatgaataacatgatcggtactaattaaacttcttatttgatatttgcacactaccggttcctttatattatacaacactcaatgaaatcctgagagtgactcatgtgaaaacgttatcgaacgttgactgttgctaagttataattgacggatataacagaaaagttgggagacgtcagatatctcggaggaatactgaaaataccatctcctgctcccacattccaaaaccgaatccaacttgactgcgtcaatggtgccaccggttcaacctcaccctgcgtcgtctccgacatattactatcttcttggtacactttaaccctagccgccttgtgctctttcggcggggaacccttatctagcttcctgtcgcgtaagccgatgactccttccccataacaagttattgacgtaaccctaacatccagagggaaattcaagatcgcttttctttcacgtaatagaaacgccggttggacataggctcttccagattccacggcggtgtggaaagcaccaagccagatccttcaacctttttctgttgggatctcgtaattttcaccagtatttttcccaa

SEQ ID NO: 130638 - DNA, 786 bp, Arabidopsis thaliana columbia
  unsure (1)..(786): unsure at all n locations
gttnnnnnnnnnnnnnnnnnnnnnnnnnnnnnnnnnnnnnnnnnnnnnnnnnnnnnnnnnnnnnnnnnnncttttttttttttttttttttttttccgggaaattaggtggataattttttttttggggttaaaaaatacctttccttagcctaaaagaactaaatccgcccttcaaatccacctttaaccaccaaccattttggtttttggaacccgatggaggtggctcgtattaggcttttattccgctttaaagcccattcttcccccaaaaaaccaggccaccaaatcttgcccagacccccttaaaaccccaggaggttccaaaaaccaaaaaagccatggtggttaaaccccaacccaacccaaaaatggaaaaatgggaggtacccgggttttaaaggtaccaggtgcctattgggataagctaccagggccgcaaagccggaattccctttcggttaaaaaaaaccaaatggcccaaccccatttttaaaccttgggccatcaaatcccttgggcaaatggttaccattaccccaaccattatttccaaaaaggaaaaccggcatcctcacccaaaggaaggggacccagggatttataaaaaccatggtttaacaatggaattggccaatatttccttcccgggttggcgaccacctacccaaaaggtttttggaaacccccctttaaaccccgggggtcaaaatgggaatggccatgtcaatttggtttcaaccccctgtggtttcaaaatttggcaaaaccttttgggaaatta

SEQ ID NO: 130639 - DNA, 758 bp, Arabidopsis thaliana columbia
  unsure (1)..(758): unsure at all n locations
gttnnnnnnnnnnnnnnnnnnnnnnnnnnnnnnnnnnnnnnnnnnnnnnnnnnnnnnnnnnnnnnnnnnnctttttttttttttttttttgtaaacccccatttattatattgaaaacaccataaaaacgatacacacacacacacacaaaaggagcaatgtacgtatgagggtgatgatgatcatgatattaggtgatgatgggttgatgtgaaagggatatttaggctttgagaacgtgatcatccatgtcagcagcgaggctcttgacgaacttcatgtagttgctgggctcaggcatgtcatcgttttgcttctcccagatcatagtgatcttacagatgatatcatcaggtgacttttgaatgaactgaaagatgacgtcatacactttaagctgctccatcacgtgaccttcgagtcctctgaacgttaccgccatattctaatcggatatctctctcctctccttgaacacctccggtttcccatcgcatgtgtagttccaaatcttgatggctccatgggagtcccattcaccgtcgtggatggtgacaccttggatgtggtggccgatggccttggggaaaaggtgggtctcactcctcccaccgcttgtagtgttttttaaaccgatccttttaaatggaaaccttccgtcacaatttgttttcctgaacgtgggccaatcttttcattccctttgttgttaaccccaaagtgaaaagatgttaggtgtaattattggctcttggttt

SEQ ID NO: 130640 - DNA, 754 bp, Arabidopsis thaliana columbia
ctatgacgtcgcatgcacgcgtacgtaagcttggatcctctagagcggccgccctttttttttttttttttttttttttttttttttttttaaatgctaacaactgggcatatctatcataaagcaaattttacaacatgatgtgatttctacaatgtaaccattcctttttgtgtctttgtaatacctttgattatgctaaggttgctcttttgccctttgcttcttttgacgattttcttgaatccaaaaactggctatatatgtcataaagcttttgtttctcggtttcggaaaccgatggtttagttttaaaagcaatcgacttcaaaagaggatcagttattattggtgtagttccggtctcgggtttatcttctctgttcaaatactcgtgtacagctgcaagttgcgcatctgaaaaaaaagcttgaaaatcagctccactgaagccttcagtcatcaaagctataggctctaggtcaatatcatcagccatcaaaagctttctagaaagaactgtaagaatctctaatcgttctggtggggaaggaaagtcgcacaaaagaagacgatcaagccggccaggccttaggagggcaggatcaagtaaatttggttgcaacaaatacaaagacccctgttaaaactttaacttcatccagttctgtcaaaaattgattaacacctcgatcagttacaccagttttatcatgtccttttttgggagcaattgaatcgaattcattgaaaa

SEQ ID NO: 130641 - DNA, 1144 bp, Arabidopsis thaliana columbia
ctatgggaataccctttttaaggaggccggactcggccccccatagatttattataatctattttgcgttttttctaaacgaagggagtagtaaatctcatttatcctattcgagagaggtaaccttttttgaacctcacttttctcatacggaaccaagggtctacaagggaattcttaaaaaaacctttggagatgataagctcgaatttcgacaaaataataatctgtacgttttgaccacacttataacatttttggtgacctgagtatataaaaacccttgatggccaccaaaagaattaaagccaggcatctcccttataaaaaaaattcccaaataataccccacccttaaaataaactcatatcgtttaggttggcgaaataaacgggtacgagcgctccttaacggacatctattgagcgaagaggtgactaatataatactatctagagggaatgtgagctatagattgtctgtaatcacagaactaactcctctatacatctctattcgctatgctaattgtgtatcctagagttgaccgtcccgctctgctcctcatatgataagcatctaccaactgtgtgaccagctccttgtacataaaggatagaatgacctcacaaaatactttagatgggctctgtgtaacaatcaccccagactaatcacttgctaaatcccgggattccctatagataaaacaacaaccgaaggggcaattatataaaccccctacaattatttttcatctatgggtatgggggaataaagttttcttctatggcgggggataggtggaaaaatacatgagaactacaagacctagatatgtttttacatacccccaaatattttattcgtgtggatccccccaaaaagaaagaggggttaccagcggatgtcacatataagtaacattccacaaaatagagttagacacactccagaaaagtcccttctctctagaaaagtgtggttgcccactttttcccaaaaaaagctgtgtctcaactaaccacaaagaatccgtctctcatattctgggactatacatgctgtatagtaggtgcgacctccttagagggattaattcatataactgtggacgccttgtagaatattagtgataaaaca

SEQ ID NO: 130642 - DNA, 784 bp, Arabidopsis thaliana columbia
  unsure (1)..(784): unsure at all n locations
tggaaagttggttgacttccgttnnnnnnnnnnnnnnnnnnnnnnnnnnnnnnnnnnnnnnnnnnnnnnnnnnnnnnnnnnnnnnnnnnncttttttttttttttttttttttttaagaaacaaagggcatttatgaatggtagagtgcagcattttgataagattacagatcgctaacattagtttccaactggatcataaatctgtaccttctatatctaattctattagccagtaaccgtaaacacacaaactatcaaaagaaaaagatcatcttacattttacgagtcaacaaaataatctaccgagtctcttcgactgcaacgttggagtagctatgctcgaaccgttcttcctcggatcctttcttccatgtcttatacaagctaatcctctcagtttgaacggttcttttcgcaagcatgagggtaaggaagacagggaccatagcggcacacaaatgcttcaaagaatgcccactaataatatgatgagtccagctatatataggcttatccgcagctttttccaccttggctaaaagataaaaccctgcagcccatagccaataagtggaatgtgtatacattggaggcaataaaaaagccatcaacggaatcacaatgcgaggaacaaactgaaccaaagcatatggcctaagggtatcgaaaaacctccaatacaaaatgcttaccagaccccccagaagttaaggagccaatggagttaagtaccctttatgctcaataaatccttctcggatatcaaatatttagcccttg

SEQ ID NO: 130643 - DNA, 788 bp, Arabidopsis thaliana columbia
  unsure (1)..(788): unsure at all n locations
ccgttnnnnnnnnnnnnnnnnnnnnnnnnnnnnnnnnnnnnnnnnnnnnnnnnnnnnnnnnnnnnnnnnnnncttttttttttttttttttttttaatgaaacacagtttgatttctggagtataaactataaatacagttacaacacaaccataatgccaaagccacacgaatcaaagtttcttcacaagtggatctgtagatgacataatatccaacatgagacagaaagctctctttattggatgcttagtttatagaaatctgatgcataagactgagaatcctctaggctgacgcgtctatgacaccaccttcattcaccttcacgaaattatcgatgtactctttccttgcagggaggtggtcctgtgggcgattgtatggtgtccagaccggttcacccacgaaaagccggattgccttgatatagttgtctgagtctacggggaagcgatgatatattccagcaggtaagactatcatacctcccttctttacccatactctaattcaagcttcattgcgatccctcacataaaagtaaccgcttcctgcaacgcaataacggatctcttcatcagtgtgcaaatgttcttcgaaaaagctctgtactttcacttcatagtttggaagctttttccgggcatacctcacaaaagtccctggaaagagtaacccangaggattcgcgggatctttttttaaaatccctaatcgggttttcaataggtttttcaggcaatacaaatttttttcaaactttaattttcttcccccaacctttt

SEQ ID NO: 130644 - DNA, 728 bp, Arabidopsis thaliana columbia
  unsure (1)..(728): unsure at all n locations
attcgttacactatangaagagctatgacttcgcatgcacgcgtgcgtgagctgtatacactagagggccgccctttnttttttttttttttataacaaaacccagaaacccatacatttaccaagaaaattttcaaacgtaagatccatgacaaagtcctatatgcatcctgaaatctaagataaagaacacaaactcttagaccattttgcagacaacgttatacgacgaatagtcaagcacacgaacaatgattttccaagaacatgttaaatttcatgttcataaaaacaccataattagtagtaagtaggttcagacgtgtaaaataaaggaccaccccattaaagcttgaagctcttggcttgaaaaatacggaacgtgctcaatggctggcctctaacacctttgttcacatcggtcggaaaatcgaaatcaacgagtggacatttgtaaaggtaagttttgcattaggccactgtccttcctgcacgaagctgcaaagggaatatcgtggcgatgaagtaacctttagcatcagttttgctgctcaatatcgatattggaactaactccttcccatatgcatggaccttcagacacacaattcttgccggtgcccttgaattgagaagttttgccccggactgcactgatgaacctcaacgcgatgaataatatcggctcggtcgtgatgcgataagactagattatttaatgaaacata

SEQ ID NO: 130645 - DNA, 736 bp, Arabidopsis thaliana columbia
  unsure (1)..(736): unsure at all n locations
nnnnnnnnnnnnnnnnnnnnnnnnnnnnnnnnnnnnnnnnnnnnnnnnnnnnnnnnnnnnnnnnnctttnttttttttttttttttttctagaaacagcatccgtttttataatttaattttcttacaaaggtaggaccaacatttgtgatctataaatcttcctactacgttatatagagacccttcgacataacacttaactcgtttatatatttgttttacttgttttgcacatacacacaaaaataaaaaagactttatatttatttactttttaatcacacggattagctccggcgaagtatggtcgtcgtcttcatcttcttcctccatcatcagatttttccttaaatggaagaaaccaaacgaaactccgatcttctccgttctcgtgttttcctctctggcttttattgctgggattgggaatttctcaccgctctcttgctttttagttgctgattctttttccttcgactttctatttccaatctttcttcttctctttgggtattagattatttttagttttatttttctgtggtaaaataaaaaaagttcgccggagatgacggctgtgacggcggcgcaaagatcagttccggggccgtttttaagcaaaaacgtattcagcttggtggattgatcattagcacaggacggacgttcggttttaatgggaaaacgaaaagaaaggaaacccagccttttttgggttcggggtgggaaaaaaa

SEQ ID NO: 130646 - DNA, 811 bp, Arabidopsis thaliana columbia
cttgacttcgcatgcacgcgtactaagcttggatcctctagagcggccgcccatactctttttcttttttttttaaaacataaaaagcctattacaaatttttatgggacatctccatgtttgttttcacacaattaaagggaacctaaccacaggcttcagcttcatattcacacatgtatctatttggaggtagaaccataacaggtttaactggtttcccctaaaaccataaaaaacagaactttggcatgggaatgatcaaaccgcggacgaggcgataaaatttcttgattaatcgccagcgatagttggaactagctgttgctcaatccctatgtccaccaaagacgaccacctcagttccaaagcccaaggaagaattctattgttatccccaaggatcctatgtttctgaaccggaaagagcaagggattccttgccgtgaagggagaaggctcccattagaactttcacagtgtaaagggacgagtaaattgcctcccaaattaaacataaaaacgctcgaataaaccttttcccagaattcacgggaagggataaaaaacctgggccactcacctagtttttatatccttgcggttgggagagacccaaagccacctggggggatataaaaaaaactccgaaggaagccactttttttaccgtgttttcccttaaacaaatattgtgcaatctatcatggtaaagtaatcgctgtcaataaaagtgggcccttttcgctccccaaatttattttttttaaagaaccactctctgtcttatgcttgaaatttgtcccaacca

SEQ ID NO: 130647 - DNA, 773 bp, Arabidopsis thaliana columbia
  unsure (1)..(773): unsure at all n locations
acgttnnnnnnnnnnnnnnnnnnnnnnnnnnnnnnnnnnnnnnnnnnnnnnnnnnnnnnnnnnnnnnnnnnctttnttttttttttttttttttttacttgagaaggagagactaattcatgtttatcctcatcaaaggcaaatgagggacaaggtagtatttaattacaatacccagacgacaaaaccaagtttttttttttttcaaatttacaaacccttgcttacttatatacctaatttgacccatttttttatttagagactttttttttctactggggagaaacagtgaataaggtatattcactcactggccaacagactcacctgcattaattcttcgccatcatcatcattaaacataaatgtcgacgcttatgcctcccatggaaagatttttcccaaaaagcttttggtccttacgcaagcccagccacagacacgatatcctggccatcgcagcctgccccaccaatttcaccctgttcaccatgctcagatctgcagctgccgcccatagctcattcccattaactttcactgacctccgagaccgtgagtcatcatcattatagccctctagatccgagtgggagactacaaccattgacccattatcaaacaccactacatttccaaaacaaacctgttttacatttcttcggatcaaagctgaagttgcatcagttaaccaactctgaatattaaccaacctgacatggttgtacttaacaacggccttcctttgggctgctggtaaaaaaacccct

SEQ ID NO: 130648 - DNA, 655 bp, Arabidopsis thaliana columbia
  unsure (1)..(655): unsure at all n locations
ctatgaattngcatgcacgcgtacgtaagaccggatcctctaaagcggccgcccccacccacatgtttttttttttttaaaaacagcaaccgcctttataatttaattttcttaccaaggtaggaccaacatttgtgatctataaatcttcctactacgttatatagagacccttcgacataacacttaacctcggtatatatttgttttacttgttttgcacatacacccaaaaataaaaaagactttatatttatttactttttaatcacacggattaactccggcgaagtatggtcgacggcttcatcttcttcctccatcatcagatttttccttaaatggaagaaaccaaacgaaactccgatcttttccgttctcgtggtttcctctctggcttttattgctgggattgggaaattataaccgctctcttgctttttagaggctgattcttttttcttcgactttctatttcccaaacttcttcttcatttttggggtttagaattattttttaagtttaatttttcctggggggaaaaataaaaaaaaaaattccccccgaaaaaaaaacctggtttgttaaagggcggggcggccaaaaaaaaacaatatttcccggggtgtgcccgtctttttttttattccaaaa

SEQ ID NO: 130649 - DNA, 767 bp, Arabidopsis thaliana columbia
  unsure (1)..(767): unsure at all n locations
nnnnnnnnnnnnnnnnnnnnnnnnnnnnnnnnnnnnnnnnnnnnnnnnnnnnnnnnnnnnnnnnctttttttttttttttttttttttttttttttttttttttttaacaaattagatatttgatcaaccagttttcaatatttgatacaattagataagctataaaatatggctattaattaccaaaaccaagaaagactcctggattgcataattaactttggaaacaatcataatctaatttattaaagttaatagaagttgttcccaagtttgttaatctatagaaacaaacaaaacttattttcccgataactgatttcttgacgattatcattagaagatgtgtgagttaaagcacttgagcaaacagacgacgaaaaagtcgaagaagagcaacaacaacaagtagcaggagtcaaattcaaatcacagcatcttcttctccttctctttttcttcgggtcttttctcataaagtcataaaatatgggacaagtactcttcttgttctcctcctcacgttctctctctggctctggctctttctcattctccacctcttctttctcatcttctttcctcttactattactattgcttctcttcttcaagaacactctacacaaaacccaattcatgttctgtccatataatgaatcttgttgtgaatcaacaagacgatattcatgaaaaacccagttagttcttgttccgtttggtgggttacctttggagaaaacaagagttttcttcatccccacga

SEQ ID NO: 130650 - DNA, 652 bp, Arabidopsis thaliana columbia
gcgactccgatgaggagctggggaataccactcagagaggcgggactgcgcctcagtggggtgttaacaacatgttgtcgttttataaccacaccgctgggcctagcttcgacgcggacatcagtggagaatagggtgcaccgaggtgcaaccaccgcctacatgcggacatgcggaatggggaagccgactgtgcgcgactgcgcgaagcggggtcggtagaacacgaacctacctgacaaatacaagcggccgcaatagcattgaggggatcagtatatgcgagaagagtggcgatcacaaatcaaacgggggctcgggcgcgacatcactgaggatacgcgtatctacgggctaccgaacgacgagcagagtggtagcctgtatgaacaggagaacaccgcacacctccgagacgacgaagagatctgcgaagctctggaagagtgaccatgcaacaatctgctcactaatggcgcctacatgggatgggccagcgtgactgatgaaggtgacgagaaggctatcgcgcagttgttccgcccggcactcatagtaatgcgcgagtcaggagaccgcatggccgcgtagacacgaatcgcgacgaccggactatgttcgagcgcatgcgggtgacgcagactaggtcggc

SEQ ID NO: 130651 - DNA, 791 bp, Arabidopsis thaliana columbia
ctctgacgtcgcatgcacgcgtacgtaagcttggatcctgtagagcggccgccctgccctttttttttttttttgtttttgaaagagcagtttgtcccaagggaatgaaatatgcacagaatgctcactctcatcctaaaagtcacacagctaccccctctggtacattagcagaatcattgaccagctacagcatagaaggtagaggacatccgaaccaccagataggccagataactgggcagagcctgaaaccaaagctctgtcaggagaagtatccaccgctgacccaccctggcccgaagccaatatgcacggactccacttctgctggcgtggaggaagaggaacatctccaccaggctgcccattaaagacccaaggctgattattgttctgcctcgttttgctgagacgagctgtcctaatttattctgggctcgactaacactcaataacgatccctaagtcgcctccattacccattttgggaacaagaccatggcggaggagccgagaaaccaacacggtggcgatttcggtacccaacatcgctgcctcagtcggggaaaccttatatcggaccccaggggagaccccaccaaatcgggaccggatccttgaaggcgcaccaaatttcccttagagtgatgccgaaaaaaatcctgcccgaaaaaaatggccatttctcggaggcccctggggggcaaattgtgctaatttggttcctcagatggccaagaaaaaaaaatgcttagccggggtaaatcttttaagtgggaaaaaacccc

SEQ ID NO: 130652 - DNA, 735 bp, Arabidopsis thaliana columbia
gcacgcgtccgtccgctgggatcctctacagcggccgcccttcgtggtcgtttactttttttttcgcgtagaaaaccatgttttcttacaagacattgccgcaccccgaacaaaccaacgctctactatgttagaggaaaacaaacccaccctgagaatgcatccacaacagcaaagaataacctaagtacttgggacatggaagctttgattaaagataataatacttctgagttaaccccaaagatcgacataccctgacttcatcattttttggcggaaacgacgaaatctcgcaaatctttctgtgtggacgttaagggggtgctggagccacgtggtgtacccaggaaccgaggaagcccaccttatacaatactgaacccggctatcttatccgaggaatacttcttccgccggtaataggatggcagttgcgatctcaccaaaagtgcctgcactaatttgttcaacgtttttgaacgtttatgcagaaatcttataacccctcccgcttgtgaggactaagacagactcgtgtgtttacaccgggaattggcggacgcggtaacctggtgggcgttaccaattttctttccttatatttgcgagcctataccaggggcctttgtgcgtctattgggtgggtccaataaccttgcttcttgcttgatggcgaaaaaagttggttttgagcccattttatcgaggtcccccactatcccaacacttaac

SEQ ID NO: 130653 - DNA, 672 bp, Arabidopsis thaliana columbia
attgggttttgggtgaaaaaatttgcggataggaaggttattttttaaggatttgaatttttattttgagggcgagaatttgttttgtttgaatgaatttttatttataaatttgggggtatattatgattatttaggttttgatttttaatttattttgtgagaaattaaaattgatttggtttgatttttaaattaatgattttgatatgtaagttttttgatataataatatgtttttatttgaaattaatgattttttgattggttaaaataatggtttatttagaatgatgaagataattgatatagtttttgatttatatttttaagattaaattaaattgtattagatattggtagtaattagatatatttaggttgataggaagattttagggtagtaagattagtttgtttttttatgtttgttagtgggatgtagggaggtgtatggtattaaagtgagtataatgggagataaagtttgttttaaagaatagaataaggtaaaaggggagaaaagaagtaagttggggaaaatgggaaataatgattggattaaaagaattgtgaaagaataaaggtgggaaaaagggtttttattggaaaatgtttttgaattaattaatgagggttttttgaaaattaatggttaaggtttgggtttaa

SEQ ID NO: 130654 - DNA, 1445 bp, Arabidopsis thaliana columbia
  unsure (1)..(1445): unsure at all n locations
gaagggagaggaggagaaaggggaaagagtagaactataagcagaaggggagaggagagaagaagagttttttattgtggaggaaaggaggaagaggaaggaggaagaagagaggaagggacgagggggggggagaaagaagaagaagagggatgaaaagtgaaggagggggaaaaagaagaagaagaaaggagaagaagggggggagagaagaggaaagaagggggaataggggaggagaagaagaaagagggaggtggaggagaaggagaagggagaggaaataggagaaagaggggaggggaggaagagaggagagaggagatgaagaagagagagaggaagaaggaaggggagagaaaaggggaggagaggaggaggggaagagaagagggagaagagagagggggtgagaaaggaaagatgagagtaaggatgaagaaaggggaaaggagggagaaggaggacgagaaggaggaagatagaaagggtaagggaaagatgaaagtagaaggagggaaaagggagaaggagagagagaggaagagaagagagagtgaggggagaagacaagaggggggaggagagaaaagggaagaggaaaggaatggaaagagaataaggatagtagaggggaagaaggaggtgagggagtgtacggtaggaggtgggagagatgaaatgaggagaaggagatggatgtgagagatgaggaagaagagagtgaagaaggatgagtgatagaggtagaaagaagggagaggagagagaggaggagtgaggagcaggaataagaagaagaagtgagaggagagtagcgagcgataaagagagaggatgagtgatggagtactagaggaggagagagagatgatgatagtgagatgaatgagagagatgagagagaatgagagagaacaaagtgaaagagagaggatcatgtatgagagtagaagggagagagagcgataagaagagtgagtgagagataggagtagagaagagaggaatgagagngaagatgagaggatagaaggtgaagagtagagtgagggatagagagaaatgtagagatgaggataagaagatagtggtggaaggtgaggaagagagagagagagaaagggagtagatagtaagagtaagacgaacgagttgtatagggacggggtaatgaagaatatagaaaaggagatatagagacagggatgggtgacggtaggagagagagagagagagaggagatagaggaaagagagagggagtgagatgggagaggtggaagagttagaagaagcgagatagagagaggtgaaaggatgtggagaatatggtagaggaggagaggcagatgggagcggaggaagtaggtagagagtagagaaggggggatgggggagacagtggagggaagagtacaggagagatatgaggatatgagggat

SEQ ID NO: 130655 - DNA, 1100 bp, Arabidopsis thaliana columbia
  unsure (1)..(1100): unsure at all n locations
aactaaagcccgggccccctanggagtggaaaagataagaagggttagaggagtcaggcggaaaagtaggaatgggtgagagaagaacaattgttttttttagtgagatgagaacggaaagtgatggagtagctatggggagggaaagagtatagaaaaggagagaaagggaaaagtgaaaaaatgagagcaaaagaaaaaatgtaggaggtaaaaggagaagcgaaagaacgaaagggataagagaggagaaaggggagaggaaggaggaatagagaagagagaaagaaagaaggagagagaaaaagttgagaaggggttgacaaagaataggtgaaaagagattacatgaagaaggggggtgagagaacgggcgaggagggagagagagaagaatgggagaggggaagaaaagagagggtgggatggggataagaggcaaggaaaacagaatatgcgatgggagaagaaagtaggaaagggagagaactgagcagcgagcgaacgggggggacgatgacgaaacgtcactggaaaggcgcggaaggaagaacaagaaaaggagaaaagacgacagaagccacgaaagttgaagtgaacagagaaggaggacgctgagaagtaacgaggggggaagtacaaacgtaaatgagggcagagaagaacgaaagggagaaggggaggggagaaagcagtggatgatagcgagcaagagagaatgggagcggaagggaggagacagtgaggaggggatgtagtgaagaatgacaaaggagattagagggtaagacgagtaggatgagaggagaacgatatagaaggttggaagaatctgaggaaggatgaaaaggtgcagggatgatggagaagatgcactaggggatagagaggttaaattcgtaagcgaggaggaatcaggttgaaaaggtaagaagaacgagcaagcgatcggaagtaacaaggaaggcagagggagtagaaaatggataagaaaccgagacgtgagaaggaagaaaaagaaggacagccggaatagtgcagggtgcagaagaagaccattatcggaggagtatggaggaagagagagaattagaagatat

SEQ ID NO: 130656 - DNA, 1183 bp, Arabidopsis thaliana columbia
  unsure (1)..(1183): unsure at all n locations
aaaggggggggcggggtgaataaatcagcgaagagaaatgaggagaaaggagagggatagaaaagcaaatgtattataataaatggacgatatgaaaaggagaggaagagggggaaaatggatgaaggggtgaaaaaaaatgaaaaaggataaacggggggagatagtgagggggataacgaggggagaagaaagaaaaaaaggagaagaaaagtataagggaagggtaaagagaagaaggaaggagcgaacggaaaggagaaagggaaggagaatgaatagcggaggaaagcagagcaagaagagaaaaagagaaagtggaggacagagaggaaaaatacgaaaagggaagaaagggaaaagaaacaacgaaaaaaaaagagcgtagagtaggaagaggggtaggaaggaatagaaaaggtcggggagaaatgggagaagtgagaaagaagggaagtgcggagatggtatgagggaggataaggggataacaagagggaagagaagcggaaagtaaacgaacagtctattgatnggagagaagaagattctaggcagagggtaatggtggatggagagggaggaagatgggggaaagcgagcgataggaatatagaagggggtgcaagagcgtgagaattgaatgaggagagagataagtgtgtcagaataaattaggagtaggaggaagaagagaggagaggagagagggggaacatcaggtatcggagaggaaggatgcgagtgggacaggagagagcggggcaggacaagagaaggaagaagtaaaaagaggtatcgaatagcgaataaaagaggagtgagtcataataagggagggaagaaaagaggaagaataatggtgaaacaagagctgggcgaaaaagaggatgatagggagtgggaagacagtgagagagagaaaaggaaatgagacgttagatgagagaaaaggaagggataaatgaaagagagataatcatagggaaatgaaatacctgatggcaccgagaagagaagaacatagggaaagggaataaggtgtgtgaactgagaagatggacgaggaggaaaagtgtgcgagggagacaaaaaagagtagaagcgaaggataaaagatgggacggataagaagcaagtaagagaggggaggaatatgaagggaaagtaaatgaaaggaaaa

SEQ ID NO: 130657 - DNA, 818 bp, Arabidopsis thaliana columbia
aaaaaattttggttaagggagaaaaagacccggaggctagtaaggtaagtaataagagaggggggaagtgaagtatgaagaaagagagaagagattttttttttttgcaagggtgagaagcggtaaaaagaagaaaagggggggggagaggtatttaaagggggttagagaaagacaggataagataatgggaagaagaaaaagagaagtagatgatgattgatgaaagagagagtaagaaagagaaaagtgaaatataaaggaaaaggtaaaaggagggataagaaaaggtatggaaagtgaagaggaggaataagagcatcggaggagatgagagtgaggagaaaaaggggggtgaaaagatagaagggaagggaagagaagggatgggaaaatgaagaggaagtatatggtgatggaggataaatagttgtaataaatagatagagaggggactgaaaagtgtaaaagtgggatatgagagaaagataaacgagaagaaatgcgttatagagaatagaaataagtgaggcaagaatgtgagtgaggtgagaaatattgagagataaataagaaagagatgaatggagtatgaaataatagcgggtgatgtaggaagaggtaatgattggaggagagagtgtgagttgaagcgatgagataaagtatgtagtgtagtaagattgaggacgaaaaaagggttggtgaagattataagaggaggtagtggagatgtagaagtataatacagcggtatgttgtatgtacatatgtagatgaagtaagataaggggtagaaggtaatataagggagataa

SEQ ID NO: 130658 - DNA, 661 bp, Arabidopsis thaliana columbia
aacaagcaacatgggtccaataacgaccctgcgctggccacactaaatcaaaaaatggagccacgacgacgacatgcgcatcttacaagcagaaactccaagacatcaacaacaaccataaatgagagcatacgtttactaacatataactcctagaacctagaaggcaccttaacaaagaacctcccgaaagcagatgactacttgcctagatgagcagaagacacaacagcaagtgaaagtgctatagacatgcgaacgataccttatctcggaacctgctgcgccgcgatgaccatacctggcatatccttgccacatcccacgctctaaggtggcgccgacaacactaactgagacgcaaaaaaagatcataacgtggtgaaaccaacgcaaaccgcacgagcttagagagatgccgaggcaaaaggcgaaatgcgacatacaacatcaccaatagaggagtgagctcactctctgaacagccgggggaacagcccgtgaatcgccaacatgattcgtgacagacagcagatattacgaagcagaacctgaatcaatccacatcggggatagaaaaccaactaaaaatgcgccgccactgggaaaagaagtgcaataactacgatcctctagcaatggctaggtagcaaacatagag

SEQ ID NO: 130659 - DNA, 614 bp, Arabidopsis thaliana columbia
aatgagatttggggaaaaacccacccgaccaacggaaacacaaagacagaaaacgagagcgagggacgacaaaattttacaaagacaaagaacgcaccaacacaggggggcaacacaaacacaggccccaccaaagcagaaaggaacaaaaggaaacccaggaacaaagagacaaaggaagcgagaaaacccacacaagaagaagaacaagggggacgacacaagcacaacacaaggcaaacgaggggacaagaaggggaccaggacaaacagaaaggagcacaaagagaggaaacagaggggacaagaaaagaaaacgcgagaaagaggccgcgcacaaaaacaagcccaagcggagcaaaaccgcagaaaaacgcgacagacaaacagaacgcagagcacacacccagaaccagaggaaggggaacaaggcaaaggagaagaggcgcagaaaaaccagcaccagcgaaagaacaaaacgaagacaaaaggaagcaaaacgcgaacaaggcaaaaaaaaggagggcacagcagaggacaaaaccgaggagaataggaaaacaaaacgaaaaaggaaaaagggacaaaaaagagcagaggagaaaaaccaaggg

SEQ ID NO: 130660 - DNA, 816 bp, Arabidopsis thaliana columbia
gattcgaatgcacccgccgtaagctggaatcctaaacaggggacgcacttcgcggccgcatttttttttagaacacttacatgccgactaaagcgaaaatcgcgtactactcgtaggatggtcaagcgaagaaactacctgtacaagcacggaaaggactgcttcagagaacgggtgcgctcacaatggatgcacaaaacgtctcgaaagctctcactgacgacgaccacccaaagagctcccataatgaccacggcgacctcactgagcggagcaaagctaggtgcccaaaagattggcctgaaggaccaagttcacgcctttaggacgccaccgagcactccggagggctcagcgaactcgggcgggcaatcacgcacgggtacagtagccctgcagccacgggggggtcactcaatggcgggcggagccaaatgtaatggccaccaggacaattggagacgggcccactactagaacttcctaggccccgggatatacaccataaccgggcgcggatagatcgaaatcttctgagcgccacaaagtgcgggcggttgacaacaaaccatatctatgggggccccctccggggacaaagatgttttccacggaaacaaagcggacaaggaaacacgaggaaagaaggcgataaaggaaccgccctccaacttatgggggaagccatcgccctaagcccaattcatgtctagaggtaaacaacgtgctcatacacaagtgcggaatacggcaaaactccataggacggtgggaatgacactcccacgacccaaagggaatattttggtaccccca

SEQ ID NO: 130661 - DNA, 1151 bp, Arabidopsis thaliana columbia
  unsure (1)..(1151): unsure at all n locations
gggggaggggaacacaagagaaaaagacggagagggcgcacacagccacaaagagaagaggcgggagaagcacgcacacggcacgagaagcaccggacggagagacgacgggagaacaaccgacaaagacagcgtgaagaccagcacgaaacacggcccgaggagggagacgacagcggcaccgcggcaccgaagcaggcgagacaaaccgaggcgaacaaggaaccacagcagcagcatcgacgacgggggcgaggcaacaacggaggagaacagaggagacaagggacaagagctacgcagcggagacacgaggtaccagcgagggacgagtggaggagcaggggcgcaacacacgcaagatcgggcgaagcacaggagagaaggtnggcacagggagcaaggagacgaggaaccagcgaaactaacgacaacgcgccggaatgagaacagcccaaacgcagggaggggcgaggaacagcagacatggacaaggagcgaagaaaaaaggcccggagcgcgcgagaacgagagcgggaacggacgggcgagcagcaccgctggtgagaaagagagcccagagaagagcgacggagaagcgcaccgagcagggcacaaggagacaaggaacacagcaggcggccgagaaacacgtgagaaggaggaggaaagacaggccgagacgggacggcaccgaaacccgggagaaggaaaaagcaggcaagaagcagccgggacgcaacgaagaggaggcggaagaaggagaaggccatacgacgacgggcgaagcagcgcgcaggaggagaacatgcagcgcaccggaagagaagacagcgagggagcagcaaacgcaggaagcagcccagaggccaaaaggagagcgcagagagggccgcaccgcgagcaaaggagagagaaacagcgaagcggcggacggagcccaacaggaagcgggccagacgaaacaagcaacagaaggaagaggggagacgaacgcggcgagcaggaggcacaccggcggcacacgcgaggacggccgaccacacggacaagggaacgtgaggcacgaaaggagggacacgaaacgcgggacgaaagaacgcacgccactcggcacgaagggcacccgcgacgacgggccgccggaggcc

SEQ ID NO: 130662 - DNA, 917 bp, Arabidopsis thaliana columbia
aagaagacgaaagtttatcttttgcgcgaagacgagaggaagaaccaacagcgagaggggggaggcagaaaagcgacaacagaggcgaaggccggacgacgaagaacaggggcgaacaccacaagaggcacgagggcgaagcgccaccgaggcgcggagcaaagaagaaaaacacaagcaaacgaaaaggcagcggacgcagcgccgacgcagaacaccgagcgagaaagacaacagagagagaaccgcagggacgaaaacgaacaggagggacaaacgaaaagagcgggggaagaggaacacaacggacgaaacagcaccaaaaacgagagaagaaggagcgaggacaaaggacgagacggcgaagggaaggacgacgccgacaacaggcgaggacaaacgacaaaaaaaggcgacgggacgaaaaaacaagacgagcaagaaacgccagaccacggacaagggcaaggcgaaaagaggaggaaagagagaagagcgacgaagacagagcaggtcggacgcggaagaaacgaaacacgaagaccaagggagcacgcaacgagcacagaaaggaacacaacgagagaaggcccagaagtaacccgccgagcggcgaggcagcgaggcgggcaaaacaacgcaagcgggacgaggacaagcaacggagccgcggcgaaccgacggacagaaagcgcagacgaaccgaaagaggcaaaggaggcgagaggagacaccggcgacgccggcacccaccacacgccacggaagcgacgccgaaccacgagcgggagaaggaaaaaatgagacgaggcgatcaagacggcacagagaggcgagcgaacacccagacagggagaaaacgagacgcgagacaacggcgtcaagcaggaaccggacgccagacaggagcaggcgga

SEQ ID NO: 130663 - DNA, 717 bp, Arabidopsis thaliana columbia
acgggtaccggtccccccctgacgtcgacgggatcgataagctggatatcgaattcgcggccgttaacacgacacgtttaagaaatccacccacatcaccatcatacaaaaatcttcaaaactaagacctttctttttgttgggtcacaagcaagatttcaaatcacaaccaaaaaagcaaaaagaacagagcatgaatcttctacccataaatatatacaagccacacgaatccgccattcaaatgttttaaaagttcagttgtggccttgtccattattatcttcaggaatatatggttccaaaagcttggcacatgggttaggatcttgatgcataatccttgcagctctttcgaactcctccctcaacactctgatactaaacttgtcgaccaccctacccagatcatggctcgtctcaaacggatcctctatgcatatcaagtgcctatcgttccccacccttctcgtccagtccttctctcgcttcccaagtatggaaccggtgcggacggatacaacattatacgcatagtcatgagcgtaagcccagtagttgaagaatccccagaccagctcagctatggtctccctgttgtttgatccgaagttacggagtctatcaacattatcaaagtatgtgcaccggatattatctacccgaactgagtaagtcggctccattttctgtaagcaaggaagaattggcggccta

SEQ ID NO: 130664 - DNA, 677 bp, Arabidopsis thaliana columbia
gacgtcgtatgcacgcgtacgtacgcttggatcctctagagcggccgcccttttttttttttttttttttttttttaaaggaacactattttttttatttttttttaaggaacgatgaattggtacttaaacactctgacaccacatagaacttacaaaggggttacgttgtcaccttacactcattttcttgggcggacagaaactgattattcttggggttctttaaccggaatgggacgtttttgtgcaagtgtattcttagtgctgtcgaggacaccaaaaaagattgatcctcctatacctattcaaaacactattggcccgataccctttaagagagcaggagctccttcctgtcttacaatcggatgaacacagtcatcgattccttgatattggtgggctgatccctgaaacatttatttggcattaattacatcaagccgagtggtgactgctccggtcagagcaccatccaatgcacggattagagcgttcttaggatcactaagctgtgtacgcgcggtttttttataccccgagcaaagctgcttatatgtgcggaactgcatggcatgaaatggcaaatactgcaaagggaaggaccggtttcgtgcatacagacccctaaatccctcttttgatgcaatcgttcgagcagcactgggagatga

SEQ ID NO: 130665 - DNA, 449 bp, Arabidopsis thaliana columbia
agaaagtagagcggccgccccggcaaaacaccccctttattttcacccccccgagcaaccagaaccccgcagggggggcgcaacgggccaaacacacaaaacgggcccgccacaccacaaacgcccatacaagagccgacgacccacacgcaagacacgcgcccaccccagcccgcgaaaccggacgcgacccgctagccgcacaacacaacaaacgccccgaccgaagaggacaagcccagcagaagaaaccgcacgaaagacgcgcgcaccaccacgaacaacgcctcagacagcccccaccgcgagacgccgccgcgccgaaccgaaggcaacaaagccaagagggcgcacgcagagacaaacacgaaccgccggggcgaggacacaaacccaccccacacacaccagcaacgagcgccacgaccaccacacacgagacggagcag

SEQ ID NO: 130666 - DNA, 1030 bp, Arabidopsis thaliana columbia
cgtccaacaccacgatccaacggcggtttttttttcctcggaaaacaccaaagcgtggggggtttacttaatggtagtcgtacaacttgttgcgctaacattacatttgccgtaggctagtcccacgtattatagcttgattgcgtatatacactatagttgcggagctatgcgggatgagtcgataaggtccagcgcgactacaatattcactccaaacgttgtagggataacatttgtggcctctactcggagttacttggtgaacacaacttacgggcgtggctccgagctctgtattgtacactcatcagaacggagtcttagacatagtccagcactgaatgatcatcgtgcagttatggttcaacaatttgcacaatcaggtctgaaagagcaacttgataatgggaagtctgctagactgtctatgagctgtaatagaagttgaatctgagtccagatctatcaggacaaggtaattcatggctagtactgaactggcgcagtagagccggtttcatctatgtgaggaaacttccttgattgatcccttaagccgagttccacgctagagatatttggcttacatttacgcgtttcacaattcaggtcgttttctgtctcacattctagagattctgattgcttgacgggatactcgctactataacgagagaggatatgtagggaatcacgtccaccttagctgaccggtacgttttattatatgccgggagtgcctccctctccttgattataaactaatcgactcgagagcagcataatagtaatgactccaagcctcggaaagagtacagctgcagtgccggcttgaagtttgcggactagcctgggaactataaatgagtgggcttgatacaacccagtagagtggcagaataagcaagcacgggtacttatcattagcttgtagacgtggattgcaagtctggccgacgagaaccgtttaaggtacactaatgacctcatgcatttactgtcgttatgcgaagataagcgtacgtct

SEQ ID NO: 130667 - DNA, 699 bp, Arabidopsis thaliana columbia
gttgtgatttgggacgcacgcttacgtaagctgggatcctatacagcggacggcctttttggtcgtttttttttttaaccgtgaagaaacggacatttgtgtgctaactcgattttcacatatttatgccccatctacagatgttccaaggctctaccgatatattgagaccataggaccgtgcaaagccggttgtacactacaaattctgttaggagatatatattgacaaacaactaagctactgaaaggtgaatagaaacatctcctattttatttctttacacgcttcgaataactatggctcagctcgcactgagcccgttcacttacacataatgctccgcagactcgttgctcacagaattcttttgggaaggggaagcttgacgctacctaaactctggcacgagaggccttacactactttgctgttcgaaatcggcactgtcttcttctctgcatcttcagctttaatctttttgcgccaagcaacgagcttgtggaactactcaagctccttcaccaggttctatatcgaccttattgggaggaataaagcgattggtcatacctgattattggtccttagcacttattttgaaagagatgagtaaccaaccttgggaggaacagtcaaccttcgtgggcgcttttaccatttggtgtttgctccccccctctcggacgactaaaggg

SEQ ID NO: 130668 - DNA, 483 bp, Arabidopsis thaliana columbia
cccaacacacgcacaagcacgggagcgcccgacgccaacgcaaccccacaccggcccggaacaacgaaggagggagacacgccgggcgcacagcacggccacagacccccacccaaacgcagccgacacggcagcagcacccgacggaggaaacccgcacggagacgcacagaaacggagccacgccggacgacgcacgcggcggcccggacagagcaacacgccgaggggaccggaggcgggacgacgagcagcgaagagcgggacgaaacggaccgaccggaaccacacccccgacacccaagcacgacccagcaccgaccgggacacgagcaaggccggcacaacgcgcgcacgagagaccaggacgacaggccacccgcgcggacgacgcacccggcccgagccagcacagcaagcaagggcccgagcgacccggagggacacgggacgaccgcgcacgcggacgacgcagcggaaaac

SEQ ID NO: 130669 - DNA, 699 bp, Arabidopsis thaliana columbia
ttacagtggaagtgagaagggggtatagattgtggattggggaagggagtgtaaattgaatggagagggcatagaggattttatttttttttttaatggaagtgaagggatggagtgaaagagcggtggaagagtggggatgggtgggggatttaagttagtaggatgtaatagaggttggggatggtatgatcagattagtgttataatataatattagattgatatagaaggaggggttgtaatgtgggtattggagttgtgattggtagaggtggaaataggtgttaagagtggagtgtagtggttattattaagtgtgatggtattagtgcgggtaggtgagggaatataagaaagtggggagaggtagggggtgaggagtaaagatggtttagagagggagagaggagtaatggggaggaggtaaggggatgcaaggaataatgtatttggatgagaagaaggtgtgtattaataaggtgaatagtaagtgagatagaagttatgagttgtagagaggttgatgttagagtggtatgatagtgtatgtgagtaggtacgatgttgatattaagtataagaggagagtgagatgttagtggagaggaataggaggtgtgtataacgagagataagagagtaagtgaaaagttggacagagtgtataaaggtgtgaataattgtagataggaatat

SEQ ID NO: 130670 - DNA, 629 bp, Arabidopsis thaliana columbia
ccaacccattttggttcaccctacccgcccacggaatccatatcctcgtgctccactttcgcggccgacaaaattttttttttttttctctcaaaacggtgtctgcaaacgctctctcttccgcctccgtcctctgttcttcccgtcagagcaagtcgggaggaggaaatcagtatccaggtcatatagttagctacaacaagaggaccatcacactgttataacgttacagctaacgtaaaggaaatagcttttgaccagcactctagagctgctctacaagccggtattgataacgctcgctgattgtgttggtctcactcttggccatagagggaggaatgttctgttggatgaaactggaagccctcacgtagcgaatgatggattcaccattcgtagagccattgagttacctaatgccatcgaaaatgcatggtgtcccgcttattcgcgaggttgccagtaataataatgactgctggctgaatgggacaaccacttgcctttcatcctatgcctcgggaagaaaacatcaagaaccatcggcaattggtttgaaggcccgttccaccttctaatcgggttaggccctaaactactccccgtgtttctccacccttccttag

SEQ ID NO: 130671 - DNA, 718 bp, Arabidopsis thaliana columbia
  unsure (1)..(718): unsure at all n locations
ttnnnnnnnnnnnnnnnnnnnnnnnnnnnnnnnnnnnnnnnnnnnnnnnnnnnnnnnnnnnnnnnnnnncttttttttttttttttttttttttttttttttttttttttttttttttttttttttttttttttttttttaacgggaaaaaaacggggattgttctaaaaagctttctcccccttggcggaaaaccccttttttttgtccctgggaaaggaaaaaccttaaaaccccccccctttttttttaccccattctctgccttttatcccccccccccctccccccaggggggatctttggttctttgtatagccaaaacgggaaaaaacccccccatggccaaattttggggaaaacaaaacaaagcttttttttattatttccccccaaattttggggttaaatcttccctaattctcaaaacgttttggcagacccctcccccctagttaagctgtacaacacttggggccttacccccccaaagggtggggtaaagactgcaaaacccttttcctttttccagcagcaacgagtttttcaccccgggcaacgatttgccttccggaagggtttttttttagagccttcaaatgccctttaataccaggccagttcacgccccccctggtgggccatccatggctcccggcctttttgccctcacaagtttggaaactgatccttttttatcccctgaaaaggcttgttt

SEQ ID NO: 130672 - DNA, 729 bp, Arabidopsis thaliana columbia
  unsure (1)..(729): unsure at all n locations
nnnnnnnnnnnnnnnnnnnnnnnnnnnnnnnnnnnnnnnnnnnnnnnnnnnnnnnnnnnnnnnctttttttttttttttttttttttttttttttttttttttttttatttggaagccataatttgaaatgtactacataatctggtccacattttcaaaccaaagccaaccaaaaaaaaaattcttagttacaacaacaacatcgttttatagtctatggtttcaaaaacatttcctgtgaaccactgatggtccagtctcgtcataatctgctttagtaacatgctgattctgcggaaacaccactttagctagtatgggtcctccaacccaagccgaatacatccccaaattctccggcatatattctggcggtttcaccagtgttggcctaatggcaaatgaacacaagtttgcttttttttggaatctactttcgaatcctgtcatggaggttgtaccaccacaaagtacagtgttctccaagagctgcctatggttctcaaatgacactgtggagataatccggacaagctgctcaacgattccatgctcctccagtcccagtattgatggctgaaacagaactttttcaaccgagtatctttttcgcccgatgcttatcacctgtccatcaagaagagtatgctgctcgatttcacagttttgggtttttttgtaagcaatttcgtcctcggcacaggttgcatactgctccttgagttttt

SEQ ID NO: 130673 - DNA, 758 bp, Arabidopsis thaliana columbia
  unsure (1)..(758): unsure at all n locations
gttcactatanacagcctgacgtcgcatgcacgcgtacgtaagcttggatcctctagagcggccgccctttttttttttttttttaaaaaaacaagaacacactacattatttctcttaatctcctaagaacaatatatttggccattcaaactctacaattacaatcagaaaacattacaattttttataacaaaagtattgtttgagctatttcccatagagattattcaccacaagccatataaaaagcttgattttggcaaaatccatcttcagaaagccgtagtttactatccaatagtcaaacacgttgaccaaagactaatcccaccaaaataaaaaaactcaacggcggcgatcaactctacctaaatccacaagcttcttcgatctatttgcacaaaacgacgccgctgctgatatatgaggcttttccggcaccgccgttacctccccagaattaccaaactccgatggaaatctcattttccgtttaaacggacagttaggactagctctcaccaacggactcaaacaaaaagccattcccgacatgctcttccctatccccatcgcaatcttgctcctttccggagttttcgtcgccggagttctcctcaattcctcgattgattcccccgactgctccggtttccgtatcttcttacagggtgacaattccttctaccgttataatacgttggagggtctaccggcgcaggggaataaacggtctttcgattgtaaacacgccgg

SEQ ID NO: 130674 - DNA, 331 bp, Arabidopsis thaliana columbia
aacacatttttttttttgaacacaattcatactcaaatttcggcctatcgttggggatgaacatatgacattaaatttaagcacccacaaagcataataagccaggcacaaagaacaacttattcttcatccacaccaacacagaaaatagtaactactcctcttttattatgcgcattagcgtcatcgacggataaaaccgctttacagaacaggaaacggcactaactgcaggcctcctcaaactaacttatcccaattacgtacaccgaacgacgcagaacgcaggggctcaaagcgaaagcctgactctaaccgtacagtaaaacaa

SEQ ID NO: 130675 - DNA, 711 bp, Arabidopsis thaliana columbia
agcttgacttgcacgcacgcgtacgcttggatcctttatagcggccgcccttttttttttttttttaagaaatagacaagacttgtttcatcatcatcagttacaagaaagaaagaaatacacatttgtgttaaatcacataatcagaccactcggttaaatacgatgtctggtccatagtcagacaaggaatcttatcatgttttctcggattctctttcccaccaatcaacctcgccggatttccaaccgccgtcgtacgcgccggcacatccttaaccaccaccgaccctgatccaatcttagctccctcaccgattgttatattccccaatatacaactcccagctccaatcaacacaccatcaccaatcttcggatgccgatcaccactctgtttccctgttcctcccaaggtcactccgtgtagaatcgaaacattgtctccaaccaccgccgtctctccgatcaccacgcccgtcgcatggtctaaaagaatcccttttccgatcttcgctccgggatgaatatcgacggcgaaagattctgatactctgttttggatcaataaagctacgatttttctgttctgtttccagagggtatgagctattcgatgagcttgacaagcgaggaagcctttgaagcccaagaagcaatgaacgtagcttatacaagctgggtctctttctttgactgctataagaactt

SEQ ID NO: 130676 - DNA, 952 bp, Arabidopsis thaliana columbia
acttgtttatctcaacatatattccaaatgtgataggttaccgtataaagacaaggaatatatgttagagaacatatacaagtaagaggtcgtgtacaagcaatgaaagaaaaaaacccttcgatattaacacagcgtagagacatataacaatatgaattagagtgataagagaaacatataaacctcggagaattgactacgaaattaccatacatcaggacggatctggacttctaatgtctagcatatactggtcaaataaaatttggagtaaatttttttgcccaaacattttcacagacttgaaggggggacttaatatgtaaattactcaggcgcaatcagaaagcgggaagtctttatatgctagtcaattaactcatgtaccatttactgtacgttcctatagttgcaatgttagtaacctagatataccatatcatcttgtactctccaaaacgagtgctaggtatcctcatataagtgtgtgcatgtacggaaaacacagtaatacaagggtgtccagaagagaatccatctccgctgaactcgtatacaggcggtaagcaccatgcctatctgcggtctttctgatcctcacctgtgtatatgtctcttcccctgaaggtggcgaaatacgtggaatacacccctgggtcaccacagatccgggcttcatggtcatgccgtcaattaatatggttctattctgaagaaactattgggggatctttttgggtccccaaaggttttggatcttgggaattaaatttagaattagtactgcggctccattgctagtgcctatgtcagtagtcagtaggtagaagcttcgcccatcatggtcaatttgtaggcatgcaaagttgcgccatccaatggaatccttcttcaattattttcaggattccacctcatccacttactgggaaacagacgaaaagattcg

SEQ ID NO: 130677 - DNA, 757 bp, Arabidopsis thaliana columbia
  unsure (1)..(757): unsure at all n locations
ccccgcccccggttggttgactttcgttnnnnnnnnnnnnnnnnnnnnnnnnnnnnnnnnnnnnnnnnnnnnnnnnnnnnnnnnnnnnnnnnnnnctttttttttttttttttttttttttttttttgttaaaacacatgaaaaatgtggtttgatattataacaaaccgagacgctcgttttagctcatctgtggcactgataaacaactttcactacatcaccaaagcagtacattttcctaaaataaaaggcatcaaattgcttcagagaaacgtaaatcagcagggcctggtcccagtattcctttttgttcaacaatcttccctagtccttgtgatggatcttctgctggtgcacttgcgtcagtgatcaccgtgataactggcaattctctctcatcatgattattggagctttcaaaaggtattggggtcgttagaggaggttcgatatctgggtcaggcttctgaaatatgaatgttgcatacagacctaacaaatcaaatgctcttggaagaagttttcccctagggtcaacgaaattcgggccagcattcatcagcaagcttgcaaactgggctctgttatcatcataaaaatctgttaaactttgaatttccacaaattcaaggccagcttcccttgctaacctgattaagcttgggaagtgaaccaagcaatggtctttagaaacattgtcaccagaaaatttcagctggtacctcttttcaaacagcggaaattttttttcctc

SEQ ID NO: 130678 - DNA, 666 bp, Arabidopsis thaliana columbia
agaagaccccgaagagaaggagaggggggaaaaaaaattttagaaaaagaagaaaaaggggaggggaaaaggaaaggagagaagaaagaaagaaaagggagaaagaaaaaagagaaagaaagagagaaggagcagaaacagaagaaaaaacaggcgaaagagaggaccgagcagaaagacaaaacaacaccgacgggaagagagaccggggccggaacagaacgcaacgagcgaacagaacaaaagaagagaacggcgcgacaagcaggagaagcggcacgggaaggaaaaaggaaagaacgacacagaaagaaggcagacgaacagaagaaggaggggggaacgagagaggcgagggggaaagacggagggagacacaacggccagcaggaacaagcggacgaacaaaggaaaacaagagaaagggcacaaaaccgaagggaagaagaagagcacaagaaaggcgacgacgaaaaagaagaagccgggagagcagccgagggaaggaaaaccccaaagaaaagacggaaaaggggaagagacggcacagaaggacaacgggccagaaacgggcagacacaagcgaccagggcgagaacgggagacaaaggacagcgggcgaacaaaggaaaacaagaacagaaggaaagagaacggggacgagcg

SEQ ID NO: 130679 - DNA, 1204 bp, Arabidopsis thaliana columbia
tttggggaatgaaaaggtcggtcccggaaaaggtatggtgagaggagaggatgggagttggatatttggagggatgggtgagtgaaaagttttttttttttttgggggaggaagaggaaaaagagaagaggggatagttgatgggggggggggatgtgtatagaaattatgtaatggagatatatgtttatgtgaggtaaagagaagttatggtataataaaagagagttggtagagtgatataaaagagtagatggtagggttaatggaaaatgatggggataggtatggggtatatgggaaaggatgattgggatagaggggtaagggaagttgggatgatgagtatatagagggagggtgaagtaatgagtgtttaattgagtataagagaagagggtggaaaatgggtgagtatgtgaggagtgaaagtggattagataaagtatagtaggatgaggtggatggagaggtggataaggtatgagatgtgttataaaaatttgggggaaattggttaattagggaggaggagggtattttggaggtggtaattttggggtaggtggggagttaattatttatggaatgtagggagagaagagaggtgagtgaaaatgatggttggggagtgttattaggtgagagaaaagattaaggggtgagaaggatggtgtggggtgatgagtgagaagtatgacagtagagtgaggtatgggggagaagattaatgtaatgtaactaggggttaagtgtagaggattataggaggtggcgtggtagagaagttgtatatgggggaataatattatggtggagagttatagaggaagggattaaggagggattaaaataattggtgggaggagaatatgtgtagggggtgggggtaaggatttgatggttattgaggagatggtaattagggattgtttatgtaggaaggggtgagaatggagataaggaggtggatgtaagataaggtatgtaagaattgtatgtagaataagtgaagtgatatgatggtgaagtttagggtagtgggaggattgatatagtggagaggaataggaagagattgtagattatgtaagtaggagggatgtaattgagatggttaagggaagatggatgatgagaattgagatgtaggggatagaggttaagtaaagtatgttgagtagtaagaagaggtagatgtgga

SEQ ID NO: 130680 - DNA, 1411 bp, Arabidopsis thaliana columbia
tcccgagacgacccacccgtccgaaatggaactctagagcgggggcgggacgttttttataagatttacgcaaccacaacgatcaattgcatatgtgaaaaacaacaacaatcccaggacatgcccgtgaaagccgtcatgtaaagattaacggcgactattcttaaataagaaaacacatgaaaccccaggggggtgcgcacgcaatctactcaacacagaaccatcgcctgaggctctccctcactaatacggataggcaatactatccgaaacattcacaatttccttcctagagcagctacttagcgaccggatctctcggtgcgcaaatatcttcgcctacacgttcagtggaactcgcatctgccactctgcgcgtacatctgagctttgtccgtagtatcgatatactcacgatccgagcgcgacagaacatatctgagcctcagtggatgacataatgcagataggttcacgctcaatggagatgagatcagaggacgctctatactcagagtagatattgagaggaccttgagagtagtatctacagagcaatgactacgtgcttcaactcggtatgacatactctcctctataccagtactgacgtacgaacacacacacctatcatgtcaccggagagcatagtaacaccacacactaatctataagcgtgaacgcctgtcaggacagcgcagcgaaccagtaatgtatctaaacctagcacagcacggtctctaattattaggctctccatgatcaggggcgtcttcagcgtgactatgagacacccagtaggattgctacactgctagcatgaactacgaagcacaacgctccgatatgacagcggtaaaacacgtgctaaggctcgactacctgtaataatcacgtaaagactacctcggtcactatcaaggcataatatcgcgctctattatggttatgaaacacgacgccacatcatttacgtaacctcgagtaataggtcgcaaatagtctgagcaagacaatcaacagtcatcctactcccaagacgatcccattacgtactgtacgcgccaatgacgaggctcagctacatataagcgggaggacaactctaccgattacgcacgacgatcacgtccacaccgatcaaaattgcctagatgagcagtattagcaccttcctttgtagacgaaggagataccctcttctcgaggacacgacaaattgaggacaagacaatagctattcctaaaatagtgcttctaacactgccccataaaagcaatccaaagatacgaatcgcctgctcacacgagtgtctatttgcacattcgttcataagactagataagccgtaagcgttgaccgctcccgcataggagacacacatgacctgacacatattcggtagac

SEQ ID NO: 130681 - DNA, 1075 bp, Arabidopsis thaliana columbia
  unsure (1)..(1075): unsure at all n locations
ccccaatgacggcgttgaaggccgtcgcagatcccggccggaattcccgggtcgacccacgcgtccgaaccaatccgcttatacgaaaccccgactgtttaccgtccgaatcattcccgcagatggatggcaacgccgcacagagcgctacagtgggaatactgacaacttcgacgcgatgactgaatgaacatgaaaaggtccaccaaagacatgagaagcatgagagctctcgtntgccactagaagcatgcaaccgcttatccggaaggaccgcaatactatacatcacacgcagaatagtgacggaaccacaggggtcgaccagcgtgaaaaccacagaacgcctcagaagcgcgagggccaagaatccccaattcgtactggggaacatggtgacatcggtaggcagaatcacctagccccataaagaagacctggctccaagagcaaatctcgtaacgaattaatggcccccagccgggggcgaaccacctggaatggaggcttcgggccgcaattttgaaagaggagcccgggaaaataacatgacccaaaaactggacccaaaggcccagcgtcccctcgggggcctggaaggcggtacccaccgaaacaacccggggcctatacaaagctgtcaccagaaaagtgggtaagggactcctacaaaacaccccccgctttaagaagcaaaacctgtactcaaagttgtaaaaacaagagcacactttctagggggatcccctaacacactccaagaaggagagaactctatgagtcaacatgggggaaaaaaacaggggagagccctgccataaaaatgggggcccatacgccccgggggggacacgacctgggtttaaaaaggaaaatactccctgtttcctacacaaggtgggaaagcccctgggggccggctcccctcgaacaaggatatctaaccgtgaccccccccccgtaagggatccccacccgggattagaccccccgggaaaacaaggggcccccatacactgggaaacccccatagaggggggcggcaataaaataaattttttcccccccctggttt

SEQ ID NO: 130682 - DNA, 782 bp, Arabidopsis thaliana columbia
cggaccggaattcccgggtcgacccacccgtccgcactgaagcaaaagagcaagtcatggcggcttcttcttcctctgcttttctccttaatccgttgacttctcgccaccgtcctttcaaatactcgccagagctctcttctctctccttatcctctcgaaaggctgctgctttcgatgtttcctcagctgctttcacgctcaagagacagagccggagtgatgttgtgtgcaaggctgtatctatcaagccagaagctggtgttgaagggctcaatatcgccgataacgccgctcagcttattgggaaaactccgatggtgtacttgaacaatgtagtcaagggctgtgttgcaagtgttgctgctaagcttgagatcatggaaccatgttgcagtgtcaaggataggattgggtacagtatgattactgatgctgaagagaaaggacttataacacctggaaagagtgttcttgtggaatctaccagtgggaacacagggattgggccctgcattcattgctggttcaaaaggctatcaacttatcttgacgatgcctgcgtccatgagtttgggaagggcgggttcttttgagggcatttggagctgagcttgtgttaactgaacctgcaaaaggtttgactggagcaattccaaaaggtggaagaaaacttggaaaaaaacccccccaatttcctaccatgcctcccaacaggttttggacaacccctggcccaattcccaagaatttatattttgagaaccgactgggtccctggg

SEQ ID NO: 130683 - DNA, 845 bp, Arabidopsis thaliana columbia
cccccatttgactggccgtgtgcagtaccgttccagaattcccgggtcgacccacgcgtccggcaggaggtgctagaggaggagctggcggtggtgcacgaggtgtaggaagccatggaggcggagcctgtggagtatctggtgggggcttctccgcgggagtatgatgtggatgatgccatggaggtggaccaagaccagattctggggtccatcctccatgaagactgggacctgggggatggggtcaaaactcgggatagtagagttccttactaagaagaccaggccagattaccaaggacaatctgtcggaggccacgaaggtaacaaatggactccaaatcaataccctagccacaaacagatacgacggccgtcataaaggatcccagcgtagacgcgacagaaagctaactaaaccggaaaccgtggcatctccaaaagccaatacaatgccaatgagacatctccaacagttcagagaaacaaacatcgtaggattcgtaccgaaccataaacttgcattccatgatatacttcaggaaggtgaactaagaggacgtggctggaaccaccatttggaaaaggggttcaaggaggaatgaaaaaggggtccttcccctgagagagtcagaataactcagggttccaagaagttaatctacccctctgggggttcacactgggtgcccttggccctaccttcccgggaaagtaagtctttttcaaaaggggaaaataaataaagcccttggctaattaaaatggcgcacgggtaaccaaggggacctattacacctttatggaaaagccttttaaataatttggttgaagaacacttt

SEQ ID NO: 130684 - DNA, 852 bp, Arabidopsis thaliana columbia
cccccccattgacgcccattgaagtggccgtctgaaatttccggtcgacctacgcgtacgtcctacgcctattccagagacttgcccaattgacacgctgaatctaggcgcttgtgtggacgttcttggaggtttgattcacatcggacttggaaaaagccacgccaaggcagaatgttgtccggttttaggaggtttacttgacctagacgcagccgtttgtctatgtaccaccattaagctcaaacttctcaacatcgaccttgttctccccattgctcttgagcttcttctcgactgtggaaaaactccaccatctgacttcaaatgtcccgcttaatcgatgtagaacgttgagagtctctggacgactccaaaagtttcgtttttttcaagaaattttgttagttttcatgatctatttggtaatgggagggtaatctgcatatgtgcgacctttagttacatgtttcatttgatacaataaaaggcgttgtaatttgggttttgagatctcaatttctttggggtttcttggtatggtggacttttaaagaagaagaaaaaaaaactgttaaacgatataactttttttttaatatgaacaggtttgatctgtctaatttggttttatgtacatacctacctttttggataaaaaaaaaaaaaaaaaggcgggccgcttttaaaggaatccaagctttacgttccgccttgccttgccaaacatcattaaactttttcttttttagggggtcccccctaaaattttacaattttacttggggccgggcggttttttaccaaacccgtctgggtgaacttgtggaaaaaaaacccctgtggggtttc

SEQ ID NO: 130685 - DNA, 735 bp, Arabidopsis thaliana columbia
ccccacattgacggcctttgaaggccgttgggaattccgggcggaactaccggtcgaaccacgcctacgttttataaggcgaattaagatcatcttcaaattcttgtcagatctcttccaattctctagagaaaacatgccttggtgtggtggaagctgcggttgtggatctgcctgcaagtgcggcaatggctgccgaggttgcaaaaggcaccctgacttggagaacaccggcaccgagactcttgcctcgtgttgctcggcaagaacttagtcgagctccgggagacttcgtgcaaaagaagctgcaatgcgactgatgaagtgcaccctgtcccgcaagagactcataacctagctgaaaaccctacgttgtaggggcttagtaaatggtgatttcgagttccggacaggctctcctcttctcgagggccaagaggcaaaaatttccaacataactgtgccataaccaaaatttgggtcttgagccaaaaatttccaaacggggcggcccccctttaggaaatcaagtgtaccttacccctgcccgtggccaaagctcaaaagggtttttttttttgggggggggcgcccccacgagatttttacaaattctcacccggggccccggtgtatttttcccaaacacttcgccgggggcctctgtggggaaaaaacccctcggggcgttatcccccaacccttaatatcgcctttgggaggaaaaaaatcccc

SEQ ID NO: 130686 - DNA, 1027 bp, Arabidopsis thaliana columbia
  unsure (1)..(1027): unsure at all n locations
gccgggcccccccatgacggccgttgaaagaccctgggaaaaattccggaaaaaatttgggaagagacccccccaaaaaancaaaacccgccccagggaaacccccgaaatcttggcgcctgttttaggacgctccccggggcgggaagaagggcaccaaccggctcgggaaaaaaagccacgcccacagagagaaaggctggcccgaatttaagaagggttaccttaacctaaaagccacacggccgggtatggaccaccatgaaaccccaaacctccccaacagcggaaccctggacccacccccaaggggccgggaacgtgaaaactcccactgggggaaaaaaaccccccccatccggacataaaaaaaggccccgcctaaaaacgaaaggaacaaaccgatgaggaagattatgggcccacctcccaaaaaaattcgcaatcatccaagaaaaaatgggcaaaactccacggaaccccattatgggcaaagggggaggggtaaaacccgggcgcattggggaccaacccccggtaaaaaaaacacagggcgtgccaaatttggaaggcccaaaaaaagaaaaggagggggcaagacacaatatgggggggtctggaagcaaacctccaaaaaggtgcctttcaggggaggggttcacctggggaaaaaaagcacgggcgccatctttcgggcaaggaagggaaaccaaaaaaaaccgggccaaaaccgaaaaaaaaacccccctggggttaaaaagaggaaaccaaagcttgggaaacccgccccaaaaagggggggggaaagggaccataaccccaccgccatggggggcgaaaaaaaaaaaaaaaaaaaaaaagcgcgggccccccccccaaagggaagccaagccataacggtacaccggtgccagggcccaaagaaaaaaaccccttcctggaaggggggaaccaaaaaaatcaaattaaacggggccccctggttttcacaaacggcccggaaccgggggaaaaaccccgggggggg
